United States Patent Application Publication US 2018/0126003 A1 - sequence listing, part 132

SEQ ID NO: 230862 - protein, 370 aa, Artificial Sequence
  derived and/or modified sequence
MDAPRQVVNFGPGPAKLPHSVLLEIQKELLDYKGVGISVLEMSHRSSDFAKIINNTENLVRELLAVPDNYKVIFLQGGGCGQFSAVPLNLIGLKAGRCADYVVTGAWSAKAAEEAKKFGTINIVHPKLGSYTKIPDPSTWNLNPDASYVYYCANETVHGVEFDFIPDVKGAVLVCDMSSNFLSKPVDVSKFGVIFAGAQKNVGSAGVTVVIVRDDLLGFALRECPSVLEYKVQAGNSSLYNTPPCFSIYVMGLVLEWIKNNGGAAAMEKLSSIKSQTIYEIIDNSQGFYVCPVEPQNRSKMNIPFRIGNAKGDDALEKRFLDKALELNMLSLKGHRSVGGIRASLYNAVTIEDVQKLAAFMKKFLEMHQL

SEQ ID NO: 230863 - protein, 194 aa, Artificial Sequence
  derived and/or modified sequence
MSSNFLSKPVDVSKFGVIFAGAQKNVGSAGVTVVIVRDDLLGFALRECPSVLEYKVQAGNSSLYNTPPCFSIYVMGLVLEWIKNNGGAAAMEKLSSIKSQTIYEIIDNSQGFYVCPVEPQNRSKMNIPFRIGNAKGDDALEKRFLDKALELNMLSLKGHRSVGGIRASLYNAVTIEDVQKLAAFMKKFLEMHQL

SEQ ID NO: 230864 - DNA, 1113 bp, Artificial Sequence
  derived and/or modified sequence
atggatgctccaagacaggttgttaattttggccccgggcctgccaagctgcctcacagcgtcctgcttgagatacagaaagaactgttggattataaaggagtcggaattagcgtgcttgaaatgagccatcgctcttcagactttgccaaaatcatcaataataccgagaatttagtcagagagctgttggctgttcctgataattacaaggttatcttcctgcagggcggaggatgcggccagttctctgcagtccccctcaacctgattggactcaaggccggacggtgtgccgattacgtcgtgacgggggcttggtccgcgaaagccgccgaggaagctaagaagtttgggaccatcaacatcgtgcaccctaagctggggagctacactaaaattccagaccctagcacctggaatctcaatcctgacgcatcttacgtttattactgcgccaacgagaccgtgcatggcgtggaattcgattttataccggatgtgaagggagctgtgctggtctgtgatatgtcctctaacttcctctctaaaccagtggacgtatctaagttcggggtcattttcgccggtgcccagaagaacgtggggagtgcaggggtgaccgtggtgattgtgcgggatgacctgttggggttcgccctgagagaatgtccttccgttttagagtacaaggtgcaggccggaaactcatctctctataataccccgccctgcttttcaatctatgtcatgggacttgtactggaatggattaaaaacaacggaggggccgcagccatggaaaagttgtcaagcattaaatctcagaccatctacgaaattatcgacaatagtcagggattttatgtatgtcctgtggaaccacaaaatagaagcaaaatgaatatacccttccggattgggaatgcaaagggcgacgatgctctggagaagaggttcctggacaaggcccttgagctcaatatgttatccctgaaaggccatcggagcgtcggcggaatccgagccagcctatataacgcagtcactatcgaggacgttcaaaagcttgctgcttttatgaagaaatttttagaaatgcaccaactgtag

SEQ ID NO: 230865 - DNA, 585 bp, Artificial Sequence
  derived and/or modified sequence
atgtcctcaaacttccttagtaagccagtggacgtttctaagttcggggttatctttgcaggcgcacagaagaacgtgggctcagccggggtaaccgtggtgatagttagggatgatctgctgggatttgcacttagggagtgtcctagcgtcttggagtacaaggtccaggcaggcaatagtagtctatataatacacctccatgcttctcaatttacgtgatgggactggtcctcgaatggatcaagaataacggtggcgcggctgctatggagaagctctcctcaatcaagtcacagacaatctatgagatcattgacaactcacagggcttctatgtctgcccagtggagccccaaaaccgcagtaaaatgaacatccccttccgaatcgggaatgctaagggagacgacgctctggaaaagaggttccttgataaggctctggagctcaatatgctgtcactaaagggacatcgttcggtaggagggatccgtgcgtccctgtacaacgctgtgactatcgaggacgtgcagaaattggctgccttcatgaagaagttcctcgaaatgcatcagctttag

SEQ ID NO: 230866 - DNA, 1113 bp, Artificial Sequence
  derived and/or modified sequence
atggatgccccccggcaggtggtgaactttggacctggccctgccaagctgccccacagcgtgctgctggagatccagaaggagctgctggactacaagggcgtgggcatctctgtgctggagatgagccacaggagcagtgactttgccaagatcatcaacaacacagagaacctggtgcgggagctgctggccgtgcctgacaactacaaggtgatcttcctgcagggcggcggctgcggccagttctctgctgtgcccctgaacctgattggcctgaaggccggccgctgtgccgactatgtggtgactggagcctggagcgccaaggctgctgaggaggccaagaagtttggcaccatcaacatcgtgcaccccaagctgggcagctacaccaagatcccagaccccagcacctggaacctgaacccagatgccagctatgtgtactactgtgccaatgagaccgtgcacggcgtggagtttgacttcatcccagatgtgaagggagctgtgctggtgtgtgacatgagcagcaacttcctgagcaagcctgtggatgtgtccaagtttggagtcatctttgctggggcccagaagaatgtgggcagcgctggggtgacagtggtgattgtgagagatgacctgctgggctttgccctgagagaatgtcccagcgtgctggagtacaaggtgcaggccggcaacagcagcctgtacaacaccccaccctgcttcagcatctacgtgatgggcctggtgctggagtggatcaagaacaatggaggagctgctgccatggagaagctgagcagcatcaagagccagaccatctatgagatcatcgacaacagccagggcttctacgtgtgccctgtggagccccagaacagaagcaagatgaacatccccttcagaattggaaatgccaagggagatgatgccctggagaagcgcttcctggacaaggccctggagctgaacatgctgagcctgaagggccacaggtctgtgggcggcatccgggccagcctgtacaatgctgtgaccattgaagatgtgcagaagctggccgccttcatgaagaagttcctggagatgcaccagctgtag

SEQ ID NO: 230867 - DNA, 585 bp, Artificial Sequence
  derived and/or modified sequence
atgagcagcaacttcctgagcaagcctgtggatgtgtccaagtttggagtcatctttgctggggcccagaagaatgtgggcagcgctggggtgacagtggtgattgtgagagatgacctgctgggctttgccctgagagaatgtcccagcgtgctggagtacaaggtgcaggccggcaacagcagcctgtacaacaccccaccctgcttcagcatctacgtgatgggcctggtgctggagtggatcaagaacaatggaggagctgctgccatggagaagctgagcagcatcaagagccagaccatctatgagatcatcgacaacagccagggcttctacgtgtgccctgtggagccccagaacagaagcaagatgaacatccccttcagaattggaaatgccaagggagatgatgccctggagaagcgcttcctggacaaggccctggagctgaacatgctgagcctgaagggccacaggtctgtgggcggcatccgggccagcctgtacaatgctgtgaccattgaagatgtgcagaagctggccgccttcatgaagaagttcctggagatgcaccagctgtag

SEQ ID NO: 230868 - DNA, 1113 bp, Artificial Sequence
  derived and/or modified sequence
atggacgccccccggcaggtggtgaacttcggccccggccccgccaagctgccacattcagtactgctagagatccagaaggaactgctggattataagggtgtgggaatctccgtgctggagatgtcgcacaggagctcagactttgccaagatcatcaataataccgaaaatctcgtgagagaactactggccgtccctgataattacaaggtgatttttctgcagggtggtgggtgcggtcagttctccgcagtgccccttaatctgattggccttaaagccggtcgctgtgctgactacgtggtaacaggagcatggtctgccaaggcggccgaggaagccaaaaaattcggcacgatcaatatcgtgcatcctaagctcggctcttataccaaaattcctgatccttctacctggaatctaaaccctgacgcttcatatgtttactattgcgctaatgaaaccgttcacggtgtggaatttgattttattcccgatgtgaagggcgccgtgttggtttgcgatatgtccagtaatttcttgagcaaacccgtggacgtgtcaaaattcggggtgatttttgctggcgcccagaagaacgtcgggagtgcaggcgtgactgtcgtcattgtcagggacgacctcctcggtttcgccctcagggaatgccccagtgttcttgagtacaaagtgcaggcaggcaattcctcactatataacacacccccttgcttcagtatttatgtcatgggcctcgtgctggaatggattaagaataacggcggcgcagccgcgatggagaagctgtcgtctattaagtcacagactatctatgaaattattgacaacagccagggcttctacgtatgtcctgtcgagccccagaaccgtagcaagatgaacattccttttcgcatcggcaatgccaaaggtgacgatgcgctggaaaagcggtttctggataaggccctggagttgaacatgctctcgctgaaagggcatcggagtgtcgggggaattagggcctcgctgtacaatgctgtgacaatcgaggatgtgcagaaacttgccgccttcatgaaaaaatttctcgaaatgcatcaactctag

SEQ ID NO: 230869 - DNA, 585 bp, Artificial Sequence
  derived and/or modified sequence
atgagcagcaacttcctgagcaagcccgtggacgtgagcaagttcggtgtgatcttcgctggtgcccagaagaatgtcggttctgccggggtcaccgttgtcatagtgagagatgacttgttgggcttcgcattaagagaatgtccctccgttctggagtacaaagtgcaggccgggaacagttctctttacaacactccaccctgcttctctatctatgtcatgggcctcgttctggagtggattaaaaacaatggaggagccgcggctatggagaagctttcgagcatcaagagccagacgatatatgaaatcatcgacaactctcagggtttttacgtatgcccggttgagccgcagaacaggtctaagatgaacatcccttttcgaatcgggaatgcaaaaggcgatgacgcgctggagaagcgcttcctagacaaagctttggaactgaacatgctgtcactgaaaggccatcgttccgtcggcggtatccgagcttcactctataatgccgtcacaatcgaggacgtgcagaagcttgccgcattcatgaagaagtttctcgaaatgcaccagctgtag

SEQ ID NO: 230870 - DNA, 2188 bp, Artificial Sequence
  derived and/or modified sequence
ggccaggaacgccagccgttcacgcgttcggtcctccttggctgactcaccgccctggccgccgcaccatggacgcccccaggcaggtggtcaactttgggcctggtcccgccaagctgccgcactcagtgttgttagagatacaaaaggaattattagactacaaaggagttggcattagtgttcttgaaatgagtcacaggtcatcagattttgccaagattattaacaatacagagaatcttgtgcgggaattgctagctgttccagacaactataaggtgatttttctgcaaggaggtgggtgcggccagttcagtgctgtccccttaaacctcattggcttgaaagcaggaaggtgtgctgactatgtggtgacaggagcttggtcagctaaggccgcagaagaagccaagaagtttgggactataaatatcgttcaccctaaacttgggagttatacaaaaattccagatccaagcacctggaacctcaacccagatgcctcctacgtgtattattgcgcaaatgagacggtgcatggtgtggagtttgactttatacccgatgtcaagggagcagtactggtttgtgacatgtcctcaaacttcctgtccaagccagtggatgtttccaagtttggtgtgatttttgctggtgcccagaagaatgttggctctgctggggtcaccgtggtgattgtccgtgatgacctgctggggtttgccctccgagagtgcccctcggtcctggaatacaaggtgcaggctggaaacagctccttgtacaacacgcctccatgtttcagcatctacgtcatgggcttggttctggagtggattaaaaacaatggaggtgccgcggccatggagaagcttagctccatcaaatctcaaacaatttatgagattattgataattctcaaggattctacgtttgtccagtggagccccaaaatagaagcaagatgaatattccattccgcattggcaatgccaaaggagatgatgctttagaaaaaagatttcttgataaagctcttgaactcaatatgttgtccttgaaagggcataggtctgtgggaggcatccgggcctctctgtataatgctgtcacaattgaagacgttcagaagctggccgccttcatgaaaaaatttttggagatgcatcagctatgaacacatcctaaccaggatatactctgttcttgaacaacatacaaagtttaaagtaacttggggatggctacaaaaagttaacacagtatttttctcaaatgaacatgtttattgcagattcttcttttttgaaagaacaacagcaaaacatccacaactctgtaaagctggtgggacctaatgtcaccttaattctgacttgaactggaagcattttaagaaatcttgttgcttttctaacaaattcccgcgtattttgcctttgctgctactttttctagttagatttcaaacttgcctgtggacttaataatgcaagttgcgattaattatttctggagtcatgggaacacacagcacagagggtaggggggccctctaggtgctgaatctacacatctgtggggtctcctgggttcagcggctgttgattcaaggtcaacattgaccattggaggagtggtttaagagtgccaggcgaagggcaaactgtagatcgatctttatgctgttattacaggagaagtgacatactttatatatgtttatattagcaaggtctgtttttaataccatatactttatatttctatacatttatatttctaataatacagttatcactgatatatgtagacacttttagaatttattaaatccttgaccttgtgcattatagcattccattagcaagagttgtaccccctccccagtcttcgccttcctctttttaagctgttttatgaaaaagacctagaagttcttgattcatttttaccattctttccataggtagaagagaaagttgattggttggttgtttttcaattatgccattaaactaaacatttctgttaaattaccctatcctttgttctctactgttttctttgtaatgtatgactacgagagtgatactttgctgaaaagtctttcccctattgtttatctattgtcagtattttatgttgaatatgtaaagaacattaaagtcctaaaacatctaa

SEQ ID NO: 230871 - DNA, 1476 bp, Artificial Sequence
  derived and/or modified sequence
agactctcaccgcagcggccaggaacgccagccgttcacgcgttcggtcctccttggctgactcaccgccctggccgccgcaccatggacgcccccaggcaggtggtcaactttgggcctggtcccgccaagctgccgcactcagtgttgttagagatacaaaaggaattattagactacaaaggagttggcattagtgttcttgaaatgagtcacaggtcatcagattttgccaagattattaacaatacagagaatcttgtgcgggaattgctagctgttccagacaactataaggtgatttttctgcaaggaggtgggtgcggccagttcagtgctgtccccttaaacctcattggcttgaaagcaggaaggtgtgctgactatgtggtgacaggagcttggtcagctaaggccgcagaagaagccaagaagtttgggactataaatatcgttcaccctaaacttgggagttatacaaaaattccagatccaagcacctggaacctcaacccagatacccgatgtcaagggagcagtactggtttgtgacatgtcctcaaacttcctgtccaagccagtggatgtttccaagtttggtgtgatttttgctggtgcccagaagaatgttggctctgctggggtcaccgtggtgattgtccgtgatgacctgctggggtttgccctccgagagtgcccctcggtcctggaatacaaggtgcaggctggaaacagctccttgtacaacacgcctccatgtttcagcatctacgtcatgggcttggttctggagtggattaaaaacaatggaggtgccgcggccatggagaagcttagctccatcaaatctcaaacaatttatgagattattgataattctcaaggattctacgtttgtccagtggagccccaaaatagaagcaagatgaatattccattccgcattggcaatgccaaaggagatgatgctttagaaaaaagatttcttgataaagctcttgaactcaatatgttgtccttgaaagggcataggtctgtgggaggcatccgggcctctctgtataatgctgtcacaattgaagacgttcagaagctggccgccttcatgaaaaaatttttggagatgcatcagctatgaacacatcctaaccaggatatactctgttcttgaacaacatacaaagtttaaagtaacttggggatggctacaaaaagttaacacagtatttttctcaaatgaacatgtttattgcagattcttcttttttgaaagaacaacagcaaaacatccacaactctgtaaagctggtgggacctaatgtcaccttaattctgacttgaactggaagcattttaagaaatcttgttgcttttctaacaaattcccgcgtattttgcctttgctgctactttttctagttagatttcaaacttgcctgtggacttaataatgcaagttgcgattaattatttctg

SEQ ID NO: 230872 - DNA, 1113 bp, Artificial Sequence
  derived and/or modified sequence
atggacgcgccaagacaggtcgttaatttcggtcctggccctgccaagctcccccacagcgtgttactggagattcagaaggaacttctggactataagggcgttggcatatctgtcctcgaaatgtctcacagaagctcagattttgcaaaaatcatcaataacaccgagaatctggtgagagaactgctcgcagttcccgacaattacaaagtcattttcctacagggcggaggttgtggtcagttctcggcagtcccattgaacctcattggactaaaggccggacgctgtgcagactacgtggtgacaggtgcatggtccgccaaggcggctgaggaagctaaaaagttcggcaccatcaatatcgttcatcccaagctcgggagctataccaagattccggacccctccacctggaacctaaatcccgatgcaagctacgtgtactactgcgccaacgaaaccgttcacggagtggagtttgacttcatccctgatgtgaagggagccgtcctggtgtgcgatatgagcagtaattttctgtctaagcccgtcgacgtgagtaagttcggagtgatctttgctggagcccagaaaaatgtgggctctgctggagtcaccgtggtgatcgtaagagacgacctcctagggtttgcactgagagagtgcccgagcgtgttagagtataaagtgcaagcagggaattcctccttgtacaacacccccccttgctttagcatctacgtgatgggcctggtcctggagtggatcaaaaacaatggcggagctgccgctatggagaagctcagctctattaaatcccaaactatttatgagataattgacaactcacagggattctacgtctgtccagtagaaccccagaaccgctcgaagatgaacatcccattccgtatcgggaatgcgaaaggggacgacgctctggaaaaaaggttcctggacaaggctttggaattgaacatgctatcacttaagggacatcgcagcgtgggcggaatccgtgcttccctttacaacgcagtgactatagaagatgttcagaaactggccgcttttatgaaaaaatttttggagatgcaccagctgtag

SEQ ID NO: 230873 - DNA, 585 bp, Artificial Sequence
  derived and/or modified sequence
atgtccagtaattttctgtcaaagcccgttgacgtatcaaagtttggcgtgatatttgccggtgcccagaagaatgtggggtctgccggagtaaccgtagtgattgtgcgcgacgatctgctgggcttcgccctgcgggaatgccctagcgtgttggaatataaagttcaagctggcaattcatccctctacaatacaccaccttgtttcagtatatatgtaatgggacttgtgctcgagtggattaagaataacgggggtgccgcagctatggagaaactctccagcattaaatctcagactatatatgaaatcattgacaacagccaaggattctatgtctgtcccgtggagcctcagaaccggagtaaaatgaacattccatttcgtatcggcaatgcaaagggagacgatgccttggagaagagatttcttgacaaggcattggaactgaacatgctgagcctaaagggccatcggtcagtggggggtatccgagcctccctttataacgccgtcacaattgaggacgtgcagaaactcgctgcattcatgaaaaagtttctagagatgcaccagctgtag

SEQ ID NO: 230874 - DNA, 1113 bp, Artificial Sequence
  derived and/or modified sequence
atggacgcccccagacaggtggtgaacttcggccccggccccgccaagctgccccacagcgtgctgctggagatccagaaggagctgctggactacaagggcgtgggcatcagcgtgctggagatgagccacagaagcagcgacttcgccaagatcatcaacaacaccgagaacctggtgagagagctgctggccgtgcccgacaactacaaggtgatcttcctgcagggcggcggctgcggccagttcagcgccgtgcccctgaacctgatcggcctgaaggccggcagatgcgccgactacgtggtgaccggcgcctggagcgccaaggccgccgaggaggccaagaagttcggcaccatcaacatcgtgcaccccaagctgggcagctacaccaagatccccgaccccagcacctggaacctgaaccccgacgccagctacgtgtactactgcgccaacgagaccgtgcacggcgtggagttcgacttcatccccgacgtgaagggcgccgtgctggtgtgcgacatgagcagcaacttcctgagcaagcccgtggacgtgagcaagttcggcgtgatcttcgccggcgcccagaagaacgtgggcagcgccggcgtgaccgtggtgatcgtgagagacgacctgctgggcttcgccctgagagagtgccccagcgtgctggagtacaaggtgcaggccggcaacagcagcctgtacaacacccccccctgcttcagcatctacgtgatgggcctggtgctggagtggatcaagaacaacggcggcgccgccgccatggagaagctgagcagcatcaagagccagaccatctacgagatcatcgacaacagccagggcttctacgtgtgccccgtggagccccagaacagaagcaagatgaacatccccttcagaatcggcaacgccaagggcgacgacgccctggagaagagattcctggacaaggccctggagctgaacatgctgagcctgaagggccacagaagcgtgggcggcatcagagccagcctgtacaacgccgtgaccatcgaggacgtgcagaagctggccgccttcatgaagaagttcctggagatgcaccagctgtag

SEQ ID NO: 230875 - DNA, 585 bp, Artificial Sequence
  derived and/or modified sequence
atgagcagcaacttcctgagcaagcccgtggacgtgagcaagttcggcgtgatcttcgccggcgcccagaagaacgtgggcagcgccggcgtgaccgtggtgatcgtgagagacgacctgctgggcttcgccctgagagagtgccccagcgtgctggagtacaaggtgcaggccggcaacagcagcctgtacaacacccccccctgcttcagcatctacgtgatgggcctggtgctggagtggatcaagaacaacggcggcgccgccgccatggagaagctgagcagcatcaagagccagaccatctacgagatcatcgacaacagccagggcttctacgtgtgccccgtggagccccagaacagaagcaagatgaacatccccttcagaatcggcaacgccaagggcgacgacgccctggagaagagattcctggacaaggccctggagctgaacatgctgagcctgaagggccacagaagcgtgggcggcatcagagccagcctgtacaacgccgtgaccatcgaggacgtgcagaagctggccgccttcatgaagaagttcctggagatgcaccagctgtag

SEQ ID NO: 230876 - protein, 235 aa, Artificial Sequence
  derived and/or modified sequence
MRPLAGGLLKVVFVVFASLCAWYSGYLLAELIPDAPLSSAAYSIRSIGERPVLKAPVPKRQKCDHWTPCPSDTYAYRLLSGGGRSKYAKICFEDNLLMGEQLGNVARGINIAIVNYVTGNVTATRCFDMYEGDNSGPMTKFIQSAAPKSLLFMVTYDDGSTRLNNDAKNAIEALGSKEIRNMKFRSSWVFIAAKGLELPSEIQREKINHSDAKNNRYSGWPAEIQIEGCIPKERS

SEQ ID NO: 230877 - DNA, 708 bp, Artificial Sequence
  derived and/or modified sequence
atgcggcctcttgccggtggcttgttgaaggtcgtgtttgtcgtgttcgccagcctgtgtgcttggtactctggatacctgttggcggagttaatcccagatgcacccttgtcctccgccgcttacagtatcaggagtataggcgaacgacccgtgctgaaggccccagtgcccaaaagacagaagtgcgaccactggacgccctgcccttccgacacctacgcatataggctgttgtcgggcggaggtcggagtaagtacgctaagatttgtttcgaagataaccttctgatgggcgagcagctgggcaatgtcgctagagggatcaacattgccattgtgaactatgtgacagggaacgtcaccgctaccagatgcttcgatatgtacgagggagataacagcgggcctatgaccaagtttatccaatcagctgctccaaaaagcttgctgttcatggttacctacgatgatgggtccacgaggcttaacaatgatgctaagaacgctattgaggcacttgggagcaaagagatcagaaatatgaaattccgctccagctgggtgtttattgccgctaagggcctggagctcccatccgagatccaaagggagaagatcaatcactctgatgccaagaataacagatacagcggatggcccgctgaaattcaaattgagggctgcatccccaaggagcgctcttag

SEQ ID NO: 230878 - DNA, 708 bp, Artificial Sequence
  derived and/or modified sequence
atgcgacctttagccgggggtttacttaaagtggtgttcgtagttttcgcgtctctatgtgcctggtatagcggttatctcctcgccgaacttattccagacgcccctcttagctctgcagcatattcaattaggtcaatcggagagcgtccagtactgaaagctccagtccctaagcggcagaagtgtgaccattggaccccttgtccctctgacacttacgcctaccggctgctctccggcggcggacgctctaagtatgcgaaaatttgttttgaggataatctgctgatgggcgagcaactcgggaacgtggcccggggaattaacattgctattgtgaactatgtgactggcaatgtcacggccactcggtgttttgacatgtatgagggagacaactctggacccatgacgaagtttatccagtccgctgcacctaaaagcttgctgtttatggttacatatgacgacggctccacacgattgaacaatgatgccaaaaacgccattgaagccctgggaagtaaggaaattaggaatatgaaatttaggtcatcatgggtttttattgcggcaaagggccttgaactaccatcagaaattcagcgcgagaagatcaaccactctgatgccaagaataatagatactctggttggccagctgaaatccagatcgaggggtgcattccgaaggaacggagttag

SEQ ID NO: 230879 - DNA, 708 bp, Artificial Sequence
  derived and/or modified sequence
atgcgacctttagccgggggtttacttaaagtggtgttcgtagttttcgcgtctctatgtgcctggtatagcggttatctcctcgccgaacttattccagacgcccctcttagctctgcagcatattcaattaggtcaatcggagagcgtccagtactgaaagctccagtccctaagcggcagaagtgtgaccattggaccccttgtccctctgacacttacgcctaccggctgctctccggcggcggacgctctaagtatgcgaaaatttgttttgaggataatctgctgatgggcgagcaactcgggaacgtggcccggggaattaacattgctattgtgaactatgtgactggcaatgtcacggccactcggtgttttgacatgtatgagggagacaactctggacccatgacgaagtttatccagtccgctgcacctaaaagcttgctgtttatggttacatatgacgacggctccacacgattgaacaatgatgccaaaaacgccattgaagccctgggaagtaaggaaattaggaatatgaaatttaggtcatcatgggtttttattgcggcaaagggccttgaactaccatcagaaatccagagagaaaagattaatcattccgacgctaaaaacaatagatactccggatggcctgccgagattcagattgagggatgtattccaaaagaacgttcctag

SEQ ID NO: 230880 - DNA, 708 bp, Artificial Sequence
  derived and/or modified sequence
atgagacccctggccggcggcctgctgaaggtggtgttcgtggtgttcgccagcctgtgcgcctggtacagcggctacctgctggccgagctgatccccgacgcccccctgagcagcgccgcctacagcatcagaagcatcggcgagagacccgtgctgaaggcccccgtgcccaagagacagaagtgcgaccactggaccccctgccccagcgacacctacgcctacagactgctgagcggcggcggcagaagcaagtacgccaagatctgcttcgaggacaacctgctgatgggcgagcagctgggcaacgtggccagaggcatcaacatcgccatcgtgaactacgtgaccggcaacgtgaccgccaccagatgcttcgacatgtacgagggcgacaacagcggccccatgaccaagttcatccagagcgccgcccccaagagcctgctgttcatggtgacctacgacgacggcagcaccagactgaacaacgacgccaagaacgccatcgaggccctgggcagcaaggagatcagaaacatgaagttcagaagcagctgggtgttcatcgccgccaagggcctggagctgcccagcgagatccagagagagaagatcaaccacagcgacgccaagaacaacagatacagcggctggcccgccgagatccagatcgagggctgcatccccaaggagagaagctag

SEQ ID NO: 230881 - DNA, 708 bp, Artificial Sequence
  derived and/or modified sequence
atgcggcctctcgccggtgggctgctcaaggtcgtcttcgtcgtgttcgccagcttgtgtgcctggtatagtggctatcttctcgcagaattaattcctgacgcccccctgagctctgccgcctactccattcgcagcatcggcgagcgaccggtgctgaaggcaccagtcccaaagcggcagaagtgcgatcattggaccccctgccctagtgatacttatgcctaccgcttattatcaggcggaggcaggtccaagtatgcaaagatctgttttgaggacaacttgttgatgggggaacagctcgggaacgttgccagagggatcaacatagctattgtaaactatgtcactggcaatgtaacagccactaggtgttttgacatgtatgaaggtgacaacagtggacctatgaccaaatttatccagtctgcagccccgaaaagtctgcttttcatggtaacctacgacgacggctcaactcgattaaataatgatgccaagaacgcaatcgaggccctcggtagcaaggagatcagaaacatgaagtttcgcagttcctgggtgttcattgccgcaaagggcctcgaacttcctagcgaaatccagagagagaagattaaccattccgacgccaagaacaatcgctactccggatggccagcagagattcagatcgaggggtgtatcccgaaggaaaggtcttag

SEQ ID NO: 230882 - DNA, 1088 bp, Artificial Sequence
  derived and/or modified sequence
tttgcccgactggccgcgcacccagctggcccgcccctgcccgacacgaccgctgcccgccccttgccttcctgacccaggggctccgctggctgcggtcgcctgggagctgccgccagggccaggaggggagcggcacctggaagatgcgcccattggctggtggcctgctcaaggtggtgttcgtggtcttcgcctccttgtgtgcctggtattcggggtacctgctcgcagagctcattccagatgcacccctgtccagtgctgcctatagcatccgcagcatcggggagaggcctgtcctcaaagctccagtccccaaaaggcaaaaatgtgaccactggactccctgcccatctgacacctatgcctacaggttactcagcggaggtggcagaagcaagtacgccaaaatctgctttgaggataacctacttatgggagaacagctgggaaatgttgccagaggaataaacattgccattgtcaactatgtaactgggaatgtgacagcaacacgatgttttgatatgtatgaaggtgataactctggaccgatgacaaagtttattcagagtgctgctccaaaatccctgctcttcatggtgacctatgacgacggaagcacaagactgaataacgatgccaagaatgccatagaagcacttggaagtaaagaaatcaggaacatgaaattcaggtctagctgggtatttattgcagcaaaaggcttggaactcccttccgaaattcagagagaaaagatcaaccactctgatgctaagaacaacagatattctggctggcctgcagagatccagatagaaggctgcatacccaaagaacgaagctgacactgcagggtcctgagtaaatgtgttctgtataaacaaatgcagctggaatcgctcaagaatcttatttttctaaatccaacagcccatatttgatgagtattttgggtttgttgtaaaccaatgaacatttgctagttgtatcaaatcttggtacgcagtatttttataccagtattttatgtagtgaagatgtcaattagcaggaaactaaaatgaatggaaattcttaaa

SEQ ID NO: 230883 - DNA, 708 bp, Artificial Sequence
  derived and/or modified sequence
atgaggcccctggccggcggcctgctgaaggtggtgtttgtggtgtttgccagcctgtgtgcctggtacagcggctacctgctggccgagctgatcccagatgcccccctgagcagcgctgcctacagcatccgcagcattggagagaggcctgtgctgaaggcccctgtgcccaagaggcagaagtgtgaccactggaccccctgccccagcgacacctacgcctaccgcctgctgagcggcggcggccgcagcaaatatgccaagatctgctttgaggacaacctgctgatgggagagcagctgggcaatgtggcccggggcatcaacatcgccatcgtgaactacgtgactggaaatgtgacagccacccgctgctttgacatgtatgaaggagacaacagcggccccatgaccaagttcatccagagcgctgcccccaagagcctgctcttcatggtgacctatgatgatggcagcacccggctgaacaatgatgccaagaatgccatcgaggccctgggcagcaaggagatccggaacatgaagttccgcagctcctgggtgttcatcgccgccaagggcctggagctgcccagcgagatccagcgggagaagatcaaccacagtgatgccaagaacaaccgctacagcggctggccagctgagatccagatcgagggctgcatccccaaggagaggagctag

SEQ ID NO: 230884 - DNA, 708 bp, Artificial Sequence
  derived and/or modified sequence
atgcggcccctggccggcggcctgctgaaggtggtgttcgtggtgtttgcctctctctgtgcgtggtatagtggctaccttctggctgagctgatccccgatgccccgctttcatcagccgcgtatagcattcggtcaattggtgaaagacctgtcctcaaggcaccagtgccaaaacgccaaaaatgtgatcactggacaccctgtcccagtgatacatacgcttatcgtttgttgtcaggcgggggccggtctaagtacgctaaaatctgcttcgaagacaacctgctcatgggcgagcaactaggaaatgtggcacgggggattaatattgcaatcgtgaactacgtgaccggcaacgtgactgcaaccagatgtttcgacatgtacgagggcgataattcgggacccatgacaaaattcatccagtctgccgctcccaaatccctactgtttatggtaacatacgatgatggctctaccaggctgaataatgacgccaagaacgccatcgaggctcttggatccaaggagatacgaaatatgaagttccggtcttcatgggtattcattgcagctaaaggactcgaactaccgtctgagattcagcgcgaaaaaattaaccatagtgacgctaagaataatcgctattcagggtggcccgccgagatccaaattgagggctgtatacccaaggagaggtcatag

SEQ ID NO: 230885 - RNA, 708 nt, Artificial Sequence
  derived and/or modified sequence
augcgaccuuuagccggggguuuacuuaaagugguguucguaguuuucgcgucucuaugugccugguauagcgguuaucuccucgccgaacuuauuccagacgccccucuuagcucugcagcauauucaauuaggucaaucggagagcguccaguacugaaagcuccagucccuaagcggcagaagugugaccauuggaccccuugucccucugacacuuacgccuaccggcugcucuccggcggcggacgcucuaaguaugcgaaaauuuguuuugaggauaaucugcugaugggcgagcaacucgggaacguggcccggggaauuaacauugcuauugugaacuaugugacuggcaaugucacggccacucgguguuuugacauguaugagggagacaacucuggacccaugacgaaguuuauccaguccgcugcaccuaaaagcuugcuguuuaugguuacauaugacgacggcuccacacgauugaacaaugaugccaaaaacgccauugaagcccugggaaguaaggaaauuaggaauaugaaauuuaggucaucauggguuuuuauugcggcaaagggccuugaacuaccaucagaaauucagcgcgagaagaucaaccacucugaugccaagaauaauagauacucugguuggccagcugaaauccagaucgaggggugcauuccgaaggaacggaguuag

SEQ ID NO: 230886 - RNA, 708 nt, Artificial Sequence
  derived and/or modified sequence
augcgaccuuuagccggggguuuacuuaaagugguguucguaguuuucgcgucucuaugugccugguauagcgguuaucuccucgccgaacuuauuccagacgccccucuuagcucugcagcauauucaauuaggucaaucggagagcguccaguacugaaagcuccagucccuaagcggcagaagugugaccauuggaccccuugucccucugacacuuacgccuaccggcugcucuccggcggcggacgcucuaaguaugcgaaaauuuguuuugaggauaaucugcugaugggcgagcaacucgggaacguggcccggggaauuaacauugcuauugugaacuaugugacuggcaaugucacggccacucgguguuuugacauguaugagggagacaacucuggacccaugacgaaguuuauccaguccgcugcaccuaaaagcuugcuguuuaugguuacauaugacgacggcuccacacgauugaacaaugaugccaaaaacgccauugaagcccugggaaguaaggaaauuaggaauaugaaauuuaggucaucauggguuuuuauugcggcaaagggccuugaacuaccaucagaaauccagagagaaaagauuaaucauuccgacgcuaaaaacaauagauacuccggauggccugccgagauucagauugagggauguauuccaaaagaacguuccuag

SEQ ID NO: 230887 - protein, 441 aa, Artificial Sequence
  derived and/or modified sequence
MLLPGRARQPPTPQPVQHPGLRRQVEPPGQLLRLFYCTVLVCSKEISALTDFSGYLTKLLQNHTTYACDGDYLNLQCPRHSTISVQSAFYGQDYQMCSSQKPASQREDSLTCVAATTFQKVLDECQNQRACHLLVNSRVFGPDLCPGSSKYLLVSFKCQPNELKNKTVCEDQELKLHCHESKFLNIYSATYGRRTQERDICSSKAERLPPFDCLSYSALQVLSRRCYGKQRCKIIVNNHHFGSPCLPGVKKYLTVTYACVPKNILTAIDPAIANLKPSLKQKDGEYGINFDPSGSKVLRKDGILVSNSLAAFAYIRAHPERAALLFVSSVCIGLALTLCALVIRESCAKDFRDLQLGREQLVPGSDKVEEDSEDEEEEEDPSESDFPGELSGFCRTSYPIYSSIEAAELAERIERREQIIQEIWMNSGLDTSLPRNMGQFY

SEQ ID NO: 230888 - DNA, 1998 bp, Artificial Sequence
  derived and/or modified sequence
gggcgaggctggcacccggccagcgcgggcagggccacgggtgcccggctgtttcccgggtgtggaaggcgctcaaggtgcgcggcccggggcgcgctactgggggcgccctccgcggtgggcagcgcgccagggatcggcctgggcagccgcggggcgcgcgaaggctgcgctttccctacggcccccctcgcttcctccggcacggcggcaacggagatttcctctcggggaaactacgcggatccttttcggggatcctcgccccgccccagttctccgccccctcccctttgctggggcgcctgggctggcccgcgcaggggaggaggctctggcagcctgggcagggaggcggcggggggccgcggagccgctggccatcgattctccccgccatgtgacgccgtccttagccctgcgacccccagcgcgtcccgggcctgcgcctccgccccgccgcgcagcgcacgatgcttctgccgggacgcgcacgccaaccgccgacgccccagcccgtgcagcatcccggcctccgccggcaggtagagccgccggggcagctcctgcgcctcttctactgcactgtcctggtctgctccaaagagatctcagcgctcaccgacttctctggttacctaaccaaactcctgcaaaaccacaccacctatgcctgtgatggggactatttgaatctacagtgccctcggcattctacgataagtgtccaatcggcattttatgggcaagattaccaaatgtgtagttcccagaagcctgcctcccagagggaagacagcttaacctgtgtggcagccaccaccttccagaaggtgctggacgaatgccagaaccagcgggcctgccacctcctggtcaatagccgtgtttttggacctgacctttgtccaggaagcagtaaatacctcctggtctcctttaaatgccaacctaatgaattaaaaaacaaaaccgtgtgtgaagaccaggagctgaaactgcactgccatgaatccaagttcctcaacatctactctgcgacctacggcaggaggacccaggaaagggacatctgctcctccaaggcagagcggctcccccctttcgattgcttgtcttactcagctttgcaagtcctatcccgaaggtgctatgggaagcagagatgcaaaatcatcgtcaacaatcaccattttggaagcccctgtttgccaggcgtgaaaaaatacctcactgtgacctacgcatgtgttcccaagaacatactcacagcgattgatccagccattgctaatctaaaaccttctttgaagcagaaagatggtgaatatggtataaacttcgacccaagcggatcgaaggttctgaggaaagatggaattcttgttagcaactctctggcagcctttgcttacattagagcccacccggagagagctgccctgctgttcgtgtccagtgtctgcatcggcctggccctcacactgtgcgccctggtcatcagagagtcctgtgccaaggacttccgcgacttgcagctggggagggagcagctggtgccaggaagtgacaaggtcgaggaggacagcgaggatgaagaagaggaggaggacccctctgagtctgatttcccaggggaactgtcggggttctgtaggacttcatatcctatatacagttccatagaagctgcagagctcgcagaaaggattgagcgcagggagcaaatcattcaggaaatatggatgaacagtggtttggacacctcgctcccaagaaacatgggccagttctactgaaaaccacatgcatcttgatgcgatcgcactttctgaagaaggaaggatcccaaatgcccctccagttctggttcacctgtaccttctatgaaggagaattcgtcatgtcattcaacactcgtgaggccaggaagctattaaagggatgtttcaagctgtttctagcacattccaaaataaatgaggagggaagagtctt

SEQ ID NO: 230889 - DNA, 1326 bp, Artificial Sequence
  derived and/or modified sequence
atgctgctgcccggcagagccagacagccccccaccccccagcccgtgcagcaccccggcctgagaagacaggtggagccccccggccagctgctgagactgttctactgcaccgtgctggtgtgcagcaaggagatcagcgccctgaccgacttcagcggctacctgaccaagctgctgcagaaccacaccacctacgcctgcgacggcgactacctgaacctgcagtgccccagacacagcaccatcagcgtgcagagcgccttctacggccaggactaccagatgtgcagcagccagaagcccgccagccagagagaggacagcctgacctgcgtggccgccaccaccttccagaaggtgctggacgagtgccagaaccagagagcctgccacctgctggtgaacagcagagtgttcggccccgacctgtgccccggcagcagcaagtacctgctggtgagcttcaagtgccagcccaacgagctgaagaacaagaccgtgtgcgaggaccaggagctgaagctgcactgccacgagagcaagttcctgaacatctacagcgccacctacggcagaagaacccaggagagagacatctgcagcagcaaggccgagagactgccccccttcgactgcctgagctacagcgccctgcaggtgctgagcagaagatgctacggcaagcagagatgcaagatcatcgtgaacaaccaccacttcggcagcccctgcctgcccggcgtgaagaagtacctgaccgtgacctacgcctgcgtgcccaagaacatcctgaccgccatcgaccccgccatcgccaacctgaagcccagcctgaagcagaaggacggcgagtacggcatcaacttcgaccccagcggcagcaaggtgctgagaaaggacggcatcctggtgagcaacagcctggccgccttcgcctacatcagagcccaccccgagagagccgccctgctgttcgtgagcagcgtgtgcatcggcctggccctgaccctgtgcgccctggtgatcagagagagctgcgccaaggacttcagagacctgcagctgggcagagagcagctggtgcccggcagcgacaaggtggaggaggacagcgaggacgaggaggaggaggaggaccccagcgagagcgacttccccggcgagctgagcggcttctgcagaaccagctaccccatctacagcagcatcgaggccgccgagctggccgagagaatcgagagaagagagcagatcatccaggagatctggatgaacagcggcctggacaccagcctgcccagaaacatgggccagttctactag

SEQ ID NO: 230890 - DNA, 1326 bp, Artificial Sequence
  derived and/or modified sequence
atgctcctgccggggagagccagacagccgcctaccccacagcctgtgcagcacccaggccttcgccggcaggtagagcccccaggccaactcctgcgactgttctactgcacagttctggtgtgctccaaagagatatcggctctcaccgattttagtggttatctcaccaaacttctccaaaatcacaccacatacgcctgtgatggagactaccttaacttgcagtgtccgagacacagcacaatttcagtgcagtctgccttctacgggcaggactaccagatgtgttctagccagaagcctgcgtctcagcgggaggatagcttaacgtgcgtcgctgccacaacctttcaaaaggtcctcgatgagtgtcagaatcaacgggcttgtcacctgctggtgaattctcgagtgtttggacccgatctgtgccctggctcttccaagtatttgcttgtttctttcaagtgtcagcccaacgaactcaaaaataaaacagtgtgcgaagatcaggaattaaagcttcactgccacgaatcgaagtttttgaacatctacagtgcaacgtatggaaggcggacgcaggagagagatatctgttccagtaaggccgaacgcctcccgccttttgattgcctctcttactccgctcttcaggtactgagcagacgatgctatggcaagcagcggtgtaaaatcatcgtcaataatcaccatttcggctccccatgcctcccaggagtcaaaaaatacttgacagttacttacgcatgtgtgccaaagaacattctgaccgccatcgacccagcgatcgctaaccttaagcccagtctcaaacagaaggacggcgaatacgggatcaacttcgatccctccggatcaaaagtcctgcgtaaagatgggattttggtgagcaattccctcgccgcttttgcttacatcagggcccatccggaacgtgctgccctcctgttcgtgtctagtgtgtgcatcggcctggcactgactctctgtgccttggtgatccgagagtcctgtgctaaggattttcgggacctccaattagggagagagcagctagtgcccgggtcagacaaggtagaggaggactcagaggatgaggaagaagaggaggatccatccgaatcagattttcctggcgagctttcaggcttttgcaggacctcttatccaatctatagctccatcgaggctgctgagctcgcagagagaatagaaagacgcgagcaaatcatacaggagatttggatgaatagtggactcgacacttccctgcctaggaatatggggcaattctactag

SEQ ID NO: 230891 - DNA, 1326 bp, Artificial Sequence
  derived and/or modified sequence
atgctgctgcccggccgggcccggcagccccccaccccccagcctgtgcagcaccctggcctgcggcggcaggtggagcccccaggccagctgctgcggctcttctactgcaccgtgctggtgtgcagcaaggagatcagcgccctgacagacttcagcggctacctgaccaagctgctgcagaaccacaccacctacgcctgtgatggagactacctgaacctgcagtgccccaggcacagcaccatctctgtgcagagcgccttctacggccaggactaccagatgtgcagcagccagaagccagccagccagcgggaggacagcctgacctgtgtggccgccaccaccttccagaaggtgctggatgagtgccagaaccagagggcctgccacctgctggtgaacagccgggtgtttggaccagacctgtgccccggcagcagcaagtacctgctggtgtccttcaagtgccagcccaatgagctgaagaacaagacagtgtgtgaggaccaggagctgaagctgcactgccacgagagcaagttcctgaacatctacagcgccacctatggaagaaggacccaggagcgggacatctgcagcagcaaggccgagcggctgcccccatttgactgcctgagctacagcgccctgcaggtgctgagccgccgctgctacggcaagcagcgctgcaagatcatcgtgaacaaccaccacttcggcagcccctgcctgcccggggtgaagaagtacctgactgtgacctacgcctgtgtgcccaagaacatcctgacagccatcgaccctgccatcgccaacctgaagcccagcctgaagcagaaggatggagaatatggcatcaactttgaccccagcggcagcaaggtgctgaggaaggatggcatcctggtgagcaacagcctggccgcctttgcctacatccgggcccaccctgagcgggccgccctgctgtttgtgtcctctgtgtgcatcggcctggccctgaccctgtgtgccctggtgatccgggagagctgtgccaaggacttccgggacctgcagctgggccgggagcagctggtgcccggcagtgacaaggtggaggaggacagtgaagatgaggaggaggaggaggaccccagcgagagtgacttccctggagagctgagcggcttctgcaggaccagctaccccatctacagcagcattgaggccgctgagctggccgagagaattgaaagaagagagcagatcatccaggagatctggatgaacagcggcctggacaccagcctgcccaggaacatgggccagttctactag

SEQ ID NO: 230892 - DNA, 1326 bp, Artificial Sequence
  derived and/or modified sequence
atgctgctgcccggccgggcccggcagccccccaccccccagcccgtacagcatcctgggctccggcggcaggtggaaccacctgggcagctattacgcctgttctattgtactgtgctggtgtgtagtaaagagatcagtgcactcacggacttctcaggatacctgacaaaattgctccaaaatcacacgacttatgcgtgtgacggcgattatctgaaccttcaatgcccgagacactccacaattagcgtgcaatctgcattctacggacaggactatcagatgtgcagtagccagaagcccgcttctcagagagaggattccttgacatgtgttgctgccactacatttcaaaaggtcctcgacgagtgccagaatcagagagcgtgtcacttgctggttaacagcagggtattcggacccgacctatgtccgggatccagcaagtacttgctggttagctttaaatgccagcctaatgagctgaagaacaagacagtttgcgaggatcaagagttgaaactgcattgccacgaaagcaaattccttaatatctactccgccacctatggccgacgtactcaggaacgggacatatgcagctctaaggcagaacggctgccaccctttgactgcctcagctacagcgcactgcaggtgctctcaagacgctgctatggcaagcagcgctgcaagattattgtcaataatcaccactttggcagcccttgtctacctggcgtcaaaaagtatctcacagtgacatacgcatgtgtgccaaaaaacatacttacagccattgatcccgctatcgctaatctgaagcccagccttaaacagaaggacggcgagtacggaatcaactttgatccgtctggcagcaaggtcctccggaaggatggcattctggtctccaactccctggccgcgttcgcatacatccgggctcaccctgagcgcgcagccttgctgttcgtgtcttccgtatgcattggactggcactgaccctctgcgctctggtgattagagagtcatgtgccaaggacttccgtgacctgcaattggggcgagaacaacttgtccccgggtctgacaaggtcgaagaagacagtgaggacgaagaagaagaagaagatccttctgagtccgacttccccggcgagctgtcgggattctgccgaacaagctatcctatatattcaagcatcgaggccgcagagctggcagagagaatcgagcgcagggagcaaataatacaggaaatttggatgaattcgggccttgatacatcccttcccagaaacatggggcaattctactag

SEQ ID NO: 230893 - DNA, 1326 bp, Artificial Sequence
  derived and/or modified sequence
atgctgctgccaggccgagctcgacagccgccaactccccagcccgtacagcacccaggattgcgtcgtcaggtggagccaccaggccagttactaaggctattctactgcacagtgcttgtttgctcaaaggaaatctcggccctcacggatttttccggttacctcactaagctgctccaaaaccatacgacctatgcctgcgacggcgactatctgaatttgcagtgccctcgacatagcactatcagtgtacagtcagcgttttacgggcaggactaccaaatgtgcagctcccaaaaacctgcctcgcagagggaagactccttgacttgtgttgccgcaaccaccttccaaaaggtcctcgatgagtgccagaaccagcgcgcttgccacctacttgtaaacagtagggtttttggacccgatctctgcccagggagcagtaagtatttactcgtaagctttaagtgtcagccaaatgagctcaagaataagacggtgtgtgaggaccaggaactgaagttgcactgccacgaatctaaattcttgaatatttattctgctacctacggcaggcggacccaggagcgtgatatttgttctagtaaggcagaaaggctgcctcccttcgactgtctctcctactctgcgctccaggtcctatcaaggcgatgctacggcaagcagagatgtaaaattattgtaaataaccaccactttggctcaccctgcttgccaggagtaaaaaaatacttaaccgtcacctacgcctgtgttccaaagaacattctgactgctatagaccctgccatcgccaatctcaaaccgagtttaaagcagaaggatggagagtacggcatcaacttcgatcccagcggcagcaaagtactgcgtaaggacggcatcttagtttctaattctttggcagcttttgcgtatattcgcgctcacccggaacgtgcagcattgctctttgtctcttccgtgtgtattggtctggcactaactctgtgcgccctggtcatcagagaatcttgcgccaaagattttcgggacctgcaacttggcagggagcagttagtgccgggatccgataaagtggaagaggattccgaggatgaggaggaagaagaggatcccagcgagagcgatttcccgggagagttatccggcttctgtagaacgtcataccccatatactcgtctatcgaagccgcagaactggcagagcgaattgaacggagggagcagattatacaggagatctggatgaattctggactggacacctccttgcccagaaacatggggcagttctactag

SEQ ID NO: 230894 - protein, 173 aa, Artificial Sequence
  derived and/or modified sequence
MGRGRCVGPSLQLRGQEWRCSPLVPKGGAAAAELGPGGGENMVRRFLVTLRIRRACGPPRVRVFVVHIPRLTGEWAAPGAPAAVALVLMLLRSQRLGQQPLPRRPGHDDGQRPSGGAAAAPRRGAQLRRPRHSHPTRARRCPGGLPGHAGGAAPGRGAAGRARCLGPSARGPG

SEQ ID NO: 230895 - protein, 132 aa, Artificial Sequence
  derived and/or modified sequence
MVRRFLVTLRIRRACGPPRVRVFVVHIPRLTGEWAAPGAPAAVALVLMLLRSQRLGQQPLPRRPGHDDGQRPSGGAAAAPRRGAQLRRPRHSHPTRARRCPGGLPGHAGGAAPGRGAAGRARCLGPSARGPG

SEQ ID NO: 230896 - DNA, 399 bp, Artificial Sequence
  derived and/or modified sequence
atggtgagaagattcctggtgaccctgagaatcagaagagcctgcggcccccccagagtgagagtgttcgtggtgcacatccccagactgaccggcgagtgggccgcccccggcgcccccgccgccgtggccctggtgctgatgctgctgagaagccagagactgggccagcagcccctgcccagaagacccggccacgacgacggccagagacccagcggcggcgccgccgccgcccccagaagaggcgcccagctgagaagacccagacacagccaccccaccagagccagaagatgccccggcggcctgcccggccacgccggcggcgccgcccccggcagaggcgccgccggcagagccagatgcctgggccccagcgccagaggccccggctag

SEQ ID NO: 230897 - DNA, 399 bp, Artificial Sequence
  derived and/or modified sequence
atggtcaggcgctttctggttacacttcgcattcgtagagcttgtgggcccccaagggtgcgcgtgtttgtggtgcatatccctaggctaacaggagagtgggccgccccaggcgcccctgccgctgtagctcttgtactgatgctactgcggtctcagcggctggggcaacagccccttccgcgccgacccgggcacgacgatggccagcgcccctcaggtggggccgcagccgccccaaggagaggggcccaactgagaagaccacgccatagtcaccccaccagggccagacgatgccctggcggtctgcccggccacgctggcggcgctgcacccgggagaggggcagccggacgcgcccggtgcctgggcccgagtgcccggggcccaggctag

SEQ ID NO: 230898 - DNA, 399 bp, Artificial Sequence
  derived and/or modified sequence
atggtgcggcgcttcctggtgaccctgcgcatccggcgggcctgtggccccccccgggtgcgggtgtttgtggtgcacatcccccggctgactggagagtgggccgcccctggggccccagctgctgtggccctggtgctgatgctgctgcggagccagaggctgggccagcagcccctgccccggcggcccggccatgatgatggccagaggccttctggaggagctgctgctgcccccaggagaggagcccagctgcggcggcccaggcacagccaccccacccgggcccggcgctgccctgggggcctgcccggccacgccggcggggccgcccctggaagaggagctgctggccgggcccgctgcctgggccccagcgcccggggccctggatag

SEQ ID NO: 230899 - DNA, 399 bp, Artificial Sequence
  derived and/or modified sequence
atggtgcggcggttcctggtgaccctgcggatccggcgggcctgcggaccaccccgcgtacgggtatttgtcgtacatatcccccggctcactggcgaatgggccgcccctggcgccccagccgccgtggcacttgtcctcatgctgctgcggagtcagcgcctggggcaacaaccattgcctaggcgtccgggacacgacgacggacagcgaccctcgggcggcgccgcggccgcaccacggagaggggcccaactgcgacggccccggcatagccaccccacgcgtgctaggcggtgcccaggagggctacctggccatgctgggggagccgcccctgggagaggcgccgcgggccgggcacggtgtcttgggccgtccgcaaggggtccaggctag

SEQ ID NO: 230900 - DNA, 399 bp, Artificial Sequence
  derived and/or modified sequence
atggtgcgaaggttcctggtgacactacgcataaggcgggcatgtggcccacctagggtccgggtttttgtcgtccacataccaaggctgaccggggaatgggccgcaccaggggctcctgccgctgttgcccttgtcctaatgctcctcagaagccaacggctggggcagcagcccctgcccaggcgccctggccatgatgacggccaaagacccagcggcggagccgcagccgctcctcgtcggggagcccagctgcggcgaccacgacatagtcacccgactcgggcacggcgatgcccaggtgggctgcccggacatgccggaggtgcggcacctggccgtggggcagccggacgagccaggtgtctgggaccatcggctcgtgggcctggatag

SEQ ID NO: 230901 - protein, 108 aa, Artificial Sequence
  derived and/or modified sequence
MRQRLLPSVTSLLLVALLFPGSSQARHVNHSATEALGELRERAPGQGTNGFQLLRHAVKRDLLPPRTPPYQGDVPPGIRNTICHMQQGICRLFFCHSGTGQQHRQRCG

SEQ ID NO: 230902 - DNA, 327 bp, Artificial Sequence
  derived and/or modified sequence
atgaggcagcggctgcttccatcggtgacctctctgctgttggtggccttgctgtttcctggttcgtctcaagcaagacatgtgaaccacagcgctacagaggccctgggcgaacttagagagcgcgctcccggacagggcactaacggattccagctcttgagacatgccgttaaacgcgatttgctgccacctaggaccccaccctaccaaggtgatgtgccccctggcatccgaaatactatctgccatatgcaacagggcatttgtcgccttttcttctgtcattccggcaccggacagcagcacagacagcgatgcgggtag

SEQ ID NO: 230903 - DNA, 327 bp, Artificial Sequence
  derived and/or modified sequence
atgcggcagcgattactgcctagcgtgactagtctcctcttagttgccctcctgttcccagggtcctcccaggcaaggcatgttaaccactccgcgacagaggcccttggagaattgagagaaagagcaccaggccagggaaccaacggcttccagctcctgcggcatgctgtgaagcgagacttgcttccacccagaaccccaccttaccaaggggacgtacccccaggcatcagaaatacaatttgtcatatgcagcagggaatttgcagactttttttctgtcactcaggcacgggacagcagcatcgccaaagatgcggctag

SEQ ID NO: 230904 - DNA, 327 bp, Artificial Sequence
  derived and/or modified sequence
atgcggcagcgattactgcctagcgtgactagtctcctcttagttgccctcctgttcccagggtcctcccaggcaaggcatgttaaccactccgcgacagaggcccttggagaattgagagaaagagcaccaggccagggaaccaacggcttccagctcctgcggcatgctgtgaagcgagacttgcttccacccagaaccccaccttaccaaggggacgtacccccaggcatcagaaatacaatttgtcatatgcagcagggaatttgcagactttttttctgtcactcaggcacgggacaacagcatagacagaggtgtggatag

SEQ ID NO: 230905 - DNA, 327 bp, Artificial Sequence
  derived and/or modified sequence
atgagacagagactgctgcccagcgtgaccagcctgctgctggtggccctgctgttccccggcagcagccaggccagacacgtgaaccacagcgccaccgaggccctgggcgagctgagagagagagcccccggccagggcaccaacggcttccagctgctgagacacgccgtgaagagagacctgctgccccccagaacccccccctaccagggcgacgtgccccccggcatcagaaacaccatctgccacatgcagcagggcatctgcagactgttcttctgccacagcggcaccggccagcagcacagacagagatgcggctag

SEQ ID NO: 230906 - DNA, 327 bp, Artificial Sequence
  derived and/or modified sequence
atgaggcagcgactgctgccttctgtgaccagtctgctactcgtggccctcttgttccccgggagctcgcaagcacgccacgttaaccacagtgccaccgaggcgctgggcgaactccgcgaacgggcccccggccagggtacaaacggctttcaactgctgcgtcatgctgttaagcgagacttactgcctccgagaacacccccgtaccagggggacgttcccccaggaatccgcaataccatttgccacatgcaacaggggatctgccggctgttcttctgccatagtggtacaggtcagcaacaccggcagaggtgtggctag

SEQ ID NO: 230907 - DNA, 612 bp, Artificial Sequence
  derived and/or modified sequence
ggcttgcagtgctcttggcagacatgaggcaacgattgctcccgtccgtcaccagccttctccttgtggccctgctgtttccaggatcgtctcaagccagacatgtgaaccactcagccactgaggctctcggagaactcagggaaagagcccctgggcaaggcacaaacgggtttcagctgctacgccacgcagtgaaacgggacctcttaccaccgcgcaccccaccttaccaaggggatgttccaccgggaattagaaataccatctgccatatgcagcaagggatctgcagactttttttctgccattctgggacaggccagcagcacagacaacgctgtggataaggagagtagagacttcctcttcctgcctcctgtcttctggagttgtgacctcagggtggcccaggtggatcggcttcagaggccaggaggcagctctctgcagccgaagagcaggagcctcacccagggtctgtggctctgactaagcctggactgcctctcggctgtgctccatggactggctccccagggatccatgtgagagaccggagtatgatcctcagtgcgaggacaaataaaagtagtgattatgtccacccca

SEQ ID NO: 230908 - DNA, 327 bp, Artificial Sequence
  derived and/or modified sequence
atgaggcagaggctgctgcccagcgtgaccagcctgctgctggtggccctgctcttccctggcagcagccaggcccggcacgtgaaccacagcgccacagaggccctgggggagctgcgggagcgggcccctggccagggcaccaacggcttccagctgctgcggcatgctgtgaagagggacctgctgccccccaggaccccaccctaccagggagatgtgcccccaggcatccggaacaccatctgccacatgcagcagggcatctgccgcctcttcttctgccacagcggcaccggccagcagcaccggcagagatgtggctag

SEQ ID NO: 230909 - DNA, 327 bp, Artificial Sequence
  derived and/or modified sequence
atgcggcagcggctgctgcccagcgtgaccagcctgctgctggtggcactcctctttccaggatcatctcaagccagacacgtcaaccactccgcaactgaggctctcggcgagctgagggaaagggccccagggcagggcaccaatggattccaattacttagacatgccgtgaagagggatctattacccccaagaactccaccataccagggggacgtgcctccaggtatacgaaatacaatttgccacatgcagcaaggcatctgtagacttttcttttgtcattccggcacagggcagcaacatcgacaaagatgcggctag

SEQ ID NO: 230910 - RNA, 327 nt, Artificial Sequence
  derived and/or modified sequence
augcggcagcgauuacugccuagcgugacuagucuccucuuaguugcccuccuguucccaggguccucccaggcaaggcauguuaaccacuccgcgacagaggcccuuggagaauugagagaaagagcaccaggccagggaaccaacggcuuccagcuccugcggcaugcugugaagcgagacuugcuuccacccagaaccccaccuuaccaaggggacguacccccaggcaucagaaauacaauuugucauaugcagcagggaauuugcagacuuuuuuucugucacucaggcacgggacagcagcaucgccaaagaugcggcuag

SEQ ID NO: 230911 - RNA, 327 nt, Artificial Sequence
  derived and/or modified sequence
augcggcagcgauuacugccuagcgugacuagucuccucuuaguugcccuccuguucccaggguccucccaggcaaggcauguuaaccacuccgcgacagaggcccuuggagaauugagagaaagagcaccaggccagggaaccaacggcuuccagcuccugcggcaugcugugaagcgagacuugcuuccacccagaaccccaccuuaccaaggggacguacccccaggcaucagaaauacaauuugucauaugcagcagggaauuugcagacuuuuuuucugucacucaggcacgggacaacagcauagacagagguguggauag

SEQ ID NO: 230912 - protein, 35 aa, Artificial Sequence
  derived and/or modified sequence
RDVICLTQHGTCRLFFCHFGERKAEICSDPWNRCC

SEQ ID NO: 230913 - protein, 62 aa, Artificial Sequence
  derived and/or modified sequence
GDVPPGIRNTICLMQQGTCRLFFCHSGEKKRDICSDPWNRCCVSNRDEEGKEKPKTDGRSGI

SEQ ID NO: 230914 - protein, 52 aa, Artificial Sequence
  derived and/or modified sequence
PGDIPPGIRNTVCLMQQGHCRLFMCRSGERKGDICSDPWNRCCVPYSVKDRR

SEQ ID NO: 230915 - protein, 49 aa, Artificial Sequence
  derived and/or modified sequence
DIPPGIRNTVCFMQRGHCRLFMCRSGERKGDICSDPWNRCCVSSSIKNR

SEQ ID NO: 230916 - protein, 43 aa, Artificial Sequence
  derived and/or modified sequence
IIGVSEMERCHKKGGYCYFYCFSSHKKIGSCFPEWPRCCKNIK

SEQ ID NO: 230917 - protein, 133 aa, Artificial Sequence
  derived and/or modified sequence
MRQRLLPSVTSLLLVALLFPGSSQARHVNHSATEALGELRERAPGQGTNGFQLLRHAVKRDLLPPRTPPYQGDVPPGIRNTICHMQQGICRLFFCHSGEKKRDICSDPWNRCCVSNTDEEGKEKPEMDGRSGI

SEQ ID NO: 230918 - DNA, 402 bp, Artificial Sequence
  derived and/or modified sequence
atgagacagcggctcttgcccagcgtgacaagtctgctcctagtagcactcctttttcccggaagctcccaagcccgtcacgtaaaccactcggccactgaagctcttggagaactgcgtgagagagctcctggtcaggggaccaacggcttccagctgctgaggcatgcagtgaagagggacttattgccaccacggacgcctccttatcaaggggacgtgccaccaggtatccggaacacaatctgccatatgcagcagggcatctgccgtctgtttttctgccactctggtgaaaaaaagcgggatatctgcagcgatccatggaacaggtgctgcgtgagcaacactgatgaagaaggaaaggagaagccagaaatggatggcaggagtgggatctag

SEQ ID NO: 230919 - DNA, 402 bp, Artificial Sequence
  derived and/or modified sequence
atgaggcagcggttactaccctctgttacatcgctgctgttagtggctcttctgttccccgggtcttcccaggcacggcacgtgaaccactcagccacggaggccttaggcgagctccgagagcgggcccccggccaaggcacaaacggattccaactactcagacatgctgtaaaacgcgacttactccctcctcgcacacctccataccagggtgatgttcctccagggattcgcaacactatatgccatatgcaacagggaatttgtaggctgtttttctgtcactcaggcgagaaaaagagggacatatgttcagatccctggaacagatgctgtgtttccaatacagacgaagaaggcaaagagaaacccgaaatggatggtagatctgggatatag

SEQ ID NO: 230920 - DNA, 402 bp, Artificial Sequence
  derived and/or modified sequence
atgagacagagattacttccatctgtcacctcacttttactcgtggccttgctgttccccgggagctcacaagctcgacatgtcaaccatagcgcgactgaagccttaggcgaattacgcgaaagagctccggggcaaggaaccaatggctttcaattactaagacatgctgtcaagcgcgacctgctacctccccgcacccctccctatcagggcgatgtgcccccaggaatacggaataccatctgccacatgcagcaaggaatctgtcgtctgtttttctgtcatagtggcgagaaaaagagggacatatgttcagatccctggaacagatgctgtgtttccaatacagacgaagaaggcaaagagaaacccgaaatggatggtagatctgggatatag

SEQ ID NO: 230921 - DNA, 402 bp, Artificial Sequence
  derived and/or modified sequence
atgagacagagactgctgcccagcgtgaccagcctgctgctggtggccctgctgttccccggcagcagccaggccagacacgtgaaccacagcgccaccgaggccctgggcgagctgagagagagagcccccggccagggcaccaacggcttccagctgctgagacacgccgtgaagagagacctgctgccccccagaacccccccctaccagggcgacgtgccccccggcatcagaaacaccatctgccacatgcagcagggcatctgcagactgttcttctgccacagcggcgagaagaagagagacatctgcagcgacccctggaacagatgctgcgtgagcaacaccgacgaggagggcaaggagaagcccgagatggacggcagaagcggcatctag

SEQ ID NO: 230922 - DNA, 402 bp, Artificial Sequence
  derived and/or modified sequence
atgcgacagcggctgctccccagcgtcacaagcttgctgctagtggcactgcttttcccaggctcatcccaggctaggcatgtcaatcactctgccaccgaggccctcggggagttacgcgaaagggctcccggacagggcacgaatggatttcagttgttacggcatgcagttaagcgggatcttctgccaccaagaacccccccctaccaaggagacgttcctccgggaattcggaacaccatctgccacatgcaacagggaatttgcaggctctttttctgtcatagtggcgagaaaaagcgagacatttgctctgacccatggaacagatgttgcgtaagcaacactgatgaagaaggaaaagagaaacccgaaatggatggtcggtcgggcatttag

SEQ ID NO: 230923 - DNA, 402 bp, Artificial Sequence
  derived and/or modified sequence
atgaggcagaggctgctgcccagcgtgaccagcctgctgctggtggccctgctcttccctggcagcagccaggcccggcacgtgaaccacagcgccacagaggccctgggggagctgcgggagcgggcccctggccagggcaccaacggcttccagctgctgcggcatgctgtgaagagggacctgctgccccccaggaccccaccctaccagggagatgtgcccccaggcatccggaacaccatctgccacatgcagcagggcatctgccgcctcttcttctgccacagcggggagaagaagagggacatctgcagcgacccctggaaccgctgctgcgtgagcaacacagatgaggagggcaaggagaagccagagatggatggccgcagcggcatctag

SEQ ID NO: 230924 - DNA, 402 bp, Artificial Sequence
  derived and/or modified sequence
atgcggcagcggctgctgcccagcgtgaccagcctgctgctggtggcgctgctgttccccggcagctctcaggcaaggcacgtgaatcacagtgcaactgaagccctaggcgaactgcgagagcgcgcgccaggacaaggaacaaacggctttcagctgctaagacatgctgttaaaagagacctgttgcctcctcggacaccgccctatcagggtgatgtgccccctgggatccgtaataccatttgtcatatgcagcaaggaatttgccgattattcttttgtcactctggagaaaaaaagagagatatatgctcggatccgtggaatagatgttgtgtcagtaataccgacgaagaagggaaggagaagcccgagatggacgggaggtcagggatctag

SEQ ID NO: 230925 - RNA, 402 nt, Artificial Sequence
  derived and/or modified sequence
augaggcagcgguuacuacccucuguuacaucgcugcuguuaguggcucuucuguuccccgggucuucccaggcacggcacgugaaccacucagccacggaggccuuaggcgagcuccgagagcgggcccccggccaaggcacaaacggauuccaacuacucagacaugcuguaaaacgcgacuuacucccuccucgcacaccuccauaccagggugauguuccuccagggauucgcaacacuauaugccauaugcaacagggaauuuguaggcuguuuuucugucacucaggcgagaaaaagagggacauauguucagaucccuggaacagaugcuguguuuccaauacagacgaagaaggcaaagagaaacccgaaauggaugguagaucugggauauag

SEQ ID NO: 230926 - RNA, 402 nt, Artificial Sequence
  derived and/or modified sequence
augagacagagauuacuuccaucugucaccucacuuuuacucguggccuugcuguuccccgggagcucacaagcucgacaugucaaccauagcgcgacugaagccuuaggcgaauuacgcgaaagagcuccggggcaaggaaccaauggcuuucaauuacuaagacaugcugucaagcgcgaccugcuaccuccccgcaccccucccuaucagggcgaugugcccccaggaauacggaauaccaucugccacaugcagcaaggaaucugucgucuguuuuucugucauaguggcgagaaaaagagggacauauguucagaucccuggaacagaugcuguguuuccaauacagacgaagaaggcaaagagaaacccgaaauggaugguagaucugggauauag

SEQ ID NO: 230927 - protein, 82 aa, Artificial Sequence
  derived and/or modified sequence
MRQRLLPSVTSLLLVALLFPGSSQARHVNHSATEALGELRERAPGQGTNGFQLLRHAVKRDLLPPRTPPYQGTGQQHRQRCG

SEQ ID NO: 230928 - DNA, 249 bp, Artificial Sequence
  derived and/or modified sequence
atgcgacaacgcctgctgccatcggtgacttctctgttgctcgtggctttactctttcccggatctagtcaggctcgccacgtgaaccattccgctacagaagcactgggtgagctgcgtgaacgggcaccaggacaggggacaaacggtttccaattgctacgtcacgccgtgaagcgagatttattgccacctcgcactccgccataccagggaactggccagcagcaccgtcaaagatgtggatag

SEQ ID NO: 230929 - DNA, 249 bp, Artificial Sequence
  derived and/or modified sequence
atgaggcagcgattactcccttccgttacgagcctgctcctcgtcgcgctcttgttccctggatcatcccaagcccggcacgtgaatcactccgctacagaggccctgggtgagctgcgggagagagctccagggcaaggcacaaatggctttcagctgctcaggcacgccgtaaagagggatcttcttccccccagaacacccccttaccaaggaacaggccaacagcacagacaaaggtgtggttag

SEQ ID NO: 230930 - DNA, 249 bp, Artificial Sequence
  derived and/or modified sequence
atgagacagagactgctgcccagcgtgaccagcctgctgctggtggccctgctgttccccggcagcagccaggccagacacgtgaaccacagcgccaccgaggccctgggcgagctgagagagagagcccccggccagggcaccaacggcttccagctgctgagacacgccgtgaagagagacctgctgccccccagaacccccccctaccagggcaccggccagcagcacagacagagatgcggctag

SEQ ID NO: 230931 - DNA, 249 bp, Artificial Sequence
  derived and/or modified sequence
atgagacagcgattgctaccctcagtcacttccctcctgctagtggcgctgctgttccctgggagtagtcaggctcgccatgtgaatcattccgccacggaagctcttggagaactgagagaacgtgctcccggacaggggacgaacggatttcagttactgcgacacgccgtgaaacgagatctgctgccaccccgcacgcctccataccagggcacggggcaacaacacaggcagagatgcgggtag

SEQ ID NO: 230932 - DNA, 534 bp, Artificial Sequence
  derived and/or modified sequence
ggcttgcagtgctcttggcagacatgaggcaacgattgctcccgtccgtcaccagccttctccttgtggccctgctgtttccaggatcgtctcaagccagacatgtgaaccactcagccactgaggctctcggagaactcagggaaagagcccctgggcaaggcacaaacgggtttcagctgctacgccacgcagtgaaacgggacctcttaccaccgcgcaccccaccttaccaagggacaggccagcagcacagacaacgctgtggataaggagagtagagacttcctcttcctgcctcctgtcttctggagttgtgacctcagggtggcccaggtggatcggcttcagaggccaggaggcagctctctgcagccgaagagcaggagcctcacccagggtctgtggctctgactaagcctggactgcctctcggctgtgctccatggactggctccccagggatccatgtgagagaccggagtatgatcctcagtgcgaggacaaataaaagtagtgattatgtccacccca

SEQ ID NO: 230933 - DNA, 249 bp, Artificial Sequence
  derived and/or modified sequence
atgaggcagaggctgctgcccagcgtgaccagcctgctgctggtggccctgctcttccctggcagcagccaggcccggcacgtgaaccacagcgccacagaggccctgggggagctgcgggagcgggcccctggccagggcaccaacggcttccagctgctgcggcatgctgtgaagagggacctgctgccccccaggaccccaccctaccagggcaccggccagcagcaccggcagagatgtggctag

SEQ ID NO: 230934 - DNA, 249 bp, Artificial Sequence
  derived and/or modified sequence
atgcggcagcggctgctgcccagcgtgaccagcctgctgctggtggctctactcttccctgggagttctcaggctcgccacgtgaatcactcagcaaccgaagctctcggggagctaagggagcgggcacccgggcaagggacaaatgggtttcagttactcagacatgctgtgaaaagagatttgctcccaccaaggacaccaccctaccaagggacagggcagcaacatcgccagagatgtggttag

SEQ ID NO: 230935 - RNA, 249 nt, Artificial Sequence
  derived and/or modified sequence
augaggcagcgauuacucccuuccguuacgagccugcuccucgucgcgcucuuguucccuggaucaucccaagcccggcacgugaaucacuccgcuacagaggcccugggugagcugcgggagagagcuccagggcaaggcacaaauggcuuucagcugcucaggcacgccguaaagagggaucuucuuccccccagaacacccccuuaccaaggaacaggccaacagcacagacaaaggugugguuag

SEQ ID NO: 230936 - protein, 53 aa, Artificial Sequence
  derived and/or modified sequence
DLLPPRTPPYQEPASDLKVVDFRRSEGFCQEYCNYMETQVGYCPKKKDACCLH

SEQ ID NO: 230937 - DNA, 342 bp, Artificial Sequence
  derived and/or modified sequence
atgagacagagactgttgcctagtgtgacatctctgttgctcgtggcacttctgttccctggatcgtcccaggcacgacacgttaaccatagtgccacagaagcactgggcgagctgcgcgagagagcaccaggacagggcaccaatgggttccagctgctacgacatgccgttaaacgcgacctgctgccccctagaacgcctccatatcaggaacccgcatccgatttgaaggtggtcgattgtcgcaggtccgaaggtttctgccaggaatactgtaattatatggagacgcaggtgggctactgttcaaaaaaaaaagatgcatgttgcttacactag

SEQ ID NO: 230938 - DNA, 342 bp, Artificial Sequence
  derived and/or modified sequence
atgcgtcaacgactcctccctagtgttacatctctgctactggtggcgttgctgtttccaggatcttcacaggcgagacacgtcaatcattctgcgactgaagctttgggagagctgcgggagagggcacctggccagggaaccaacggcttccagctgctgaggcacgccgtgaagcgcgatctgctgccaccacgaacaccgccttatcaggaacccgcatccgatctgaaagtagtagactgtcgccggtctgaaggattctgccaagagtactgcaactacatggaaactcaggtcggctactgttcaaaaaagaaagacgcttgctgcctacactag

SEQ ID NO: 230939 - DNA, 342 bp, Artificial Sequence
  derived and/or modified sequence
atgcgtcaacgactcctccctagtgttacatctctgctactggtggcgttgctgtttccaggatcttcacaggcgagacacgtcaatcattctgcgactgaagctttgggagagctgcgggagagggcacctggccagggaaccaacggcttccagctgctgaggcacgccgtgaagcgcgatctgctgccaccacgaacaccgccttatcaggaacccgcatccgatctgaaagtagtagactgtcgccggtctgaaggattctgccaagagtactgcaactacatggaaactcaggtcggttattgctccaagaaaaaagatgcatgttgtctacactag

SEQ ID NO: 230940 - DNA, 342 bp, Artificial Sequence
  derived and/or modified sequence
atgagacagagactgctgcccagcgtgaccagcctgctgctggtggccctgctgttccccggcagcagccaggccagacacgtgaaccacagcgccaccgaggccctgggcgagctgagagagagagcccccggccagggcaccaacggcttccagctgctgagacacgccgtgaagagagacctgctgccccccagaacccccccctaccaggagcccgccagcgacctgaaggtggtggactgcagaagaagcgagggcttctgccaggagtactgcaactacatggagacccaggtgggctactgcagcaagaagaaggacgcctgctgcctgcactag

SEQ ID NO: 230941 - DNA, 342 bp, Artificial Sequence
  derived and/or modified sequence
atgagacagaggctgctgccatcggtgacctccctgcttcttgtcgcattactcttcccaggatcctcccaggccagacacgtgaatcactcggcaacagaagcactcggtgaattaagagagagagcccctggacagggcactaacggcttccagctcctcagacacgcagtaaagcgtgacttgctgccgccacggaccccaccttatcaggaaccggcctccgaccttaaggtggtcgactgcaggagatcagaggggttttgccaggaatattgcaactatatggagacgcaggtcggctattgtagcaaaaaaaaggatgcctgttgtctgcactag

SEQ ID NO: 230942 - DNA, 342 bp, Artificial Sequence
  derived and/or modified sequence
atgaggcagaggctgctgcccagcgtgaccagcctgctgctggtggccctgctcttccctggcagcagccaggcccggcacgtgaaccacagcgccacagaggccctgggggagctgcgggagcgggcccctggccagggcaccaacggcttccagctgctgcggcatgctgtgaagagggacctgctgccccccaggaccccaccctaccaggagcccgccagtgacctgaaggtggtggactgcagaagaagtgagggcttctgccaggagtactgcaactacatggagacccaggtgggctactgcagcaagaagaaggatgcctgctgcctgcactag

SEQ ID NO: 230943 - DNA, 342 bp, Artificial Sequence
  derived and/or modified sequence
atgcggcagcggctgctgcccagcgtgaccagcctgctgctggtggccctgctgttccctggaagcagtcaggcacgacatgtgaaccacagcgcaaccgaggccttgggtgagctgagggagagagctcccggacagggcactaatggatttcagcttctgcgccacgccgtgaaaagggatttgctccccccgcgcactccaccttatcaggaacccgccagcgatctaaaagttgtggactgtaggaggtcagagggcttttgccaggaatattgtaactacatggagacacaagtggggtactgctccaaaaagaaggatgcttgttgtctacattag

SEQ ID NO: 230944 - RNA, 342 nt, Artificial Sequence
  derived and/or modified sequence
augcgucaacgacuccucccuaguguuacaucucugcuacugguggcguugcuguuuccaggaucuucacaggcgagacacgucaaucauucugcgacugaagcuuugggagagcugcgggagagggcaccuggccagggaaccaacggcuuccagcugcugaggcacgccgugaagcgcgaucugcugccaccacgaacaccgccuuaucaggaacccgcauccgaucugaaaguaguagacugucgccggucugaaggauucugccaagaguacugcaacuacauggaaacucaggucggcuacuguucaaaaaagaaagacgcuugcugccuacacuag

SEQ ID NO: 230945 - RNA, 342 nt, Artificial Sequence
  derived and/or modified sequence
augcgucaacgacuccucccuaguguuacaucucugcuacugguggcguugcuguuuccaggaucuucacaggcgagacacgucaaucauucugcgacugaagcuuugggagagcugcgggagagggcaccuggccagggaaccaacggcuuccagcugcugaggcacgccgugaagcgcgaucugcugccaccacgaacaccgccuuaucaggaacccgcauccgaucugaaaguaguagacugucgccggucugaaggauucugccaagaguacugcaacuacauggaaacucaggucgguuauugcuccaagaaaaaagaugcauguugucuacacuag

SEQ ID NO: 230946 - protein, 29 aa, Artificial Sequence
  derived and/or modified sequence
MKVFFLFAVLFCLVRRNSVHISHQEARGP

SEQ ID NO: 230947 - protein, 50 aa, Artificial Sequence
  derived and/or modified sequence
MKVFFLFAVLFCLVQTNSVHISHREARGPSFRICVDFLGPRWARGCSTGN

SEQ ID NO: 230948 - DNA, 153 bp, Artificial Sequence
  derived and/or modified sequence
atgaaagtattctttctcttcgcggtgttattttgtctggtccagactaactcggtgcacattagccatcgcgaggccaggggcccatccttcaggatctgcgtggattttctcggacccagatgggccagaggatgtagcacaggtaattag

SEQ ID NO: 230949 - DNA, 153 bp, Artificial Sequence
  derived and/or modified sequence
atgaaggtttttttcctgtttgctgtcctgttctgcttggtacagaccaatagcgtccatatttctcatcgcgaggcacgcggcccatcatttagaatatgcgtagatttcctgggaccgaggtgggcgagaggatgttccactggtaattag

SEQ ID NO: 230950 - DNA, 153 bp, Artificial Sequence
  derived and/or modified sequence
atgaaggtgttcttcctgttcgccgtgctgttctgcctggtgcagaccaacagcgtgcacatcagccacagagaggccagaggccccagcttcagaatctgcgtggacttcctgggccccagatgggccagaggctgcagcaccggcaactag

SEQ ID NO: 230951 - DNA, 153 bp, Artificial Sequence
  derived and/or modified sequence
atgaaggtgtttttccttttcgctgtgctgttctgtcttgtccagacaaactccgtacatatctcacatagagaagcgcgcggcccatcttttaggatatgcgtggacttcttgggtccccggtgggcacgcggctgttccactggcaactag

SEQ ID NO: 230952 - DNA, 153 bp, Artificial Sequence
  derived and/or modified sequence
atgaaggtgttcttcctgtttgctgtgctcttctgcctggtgcagaccaacagcgtgcacatcagccaccgggaggcccggggccccagcttccgcatctgtgtggacttcctgggcccccgctgggcccggggctgcagcacaggcaactag

SEQ ID NO: 230953 - DNA, 153 bp, Artificial Sequence
  derived and/or modified sequence
atgaaggtgttcttcctgttcgccgtgctgttctgcctggtgcagaccaatagcgtgcacatttctcatagggaggccagagggccttctttcagaatttgcgtggatttcctcggaccccggtgggctagaggctgctcaactggtaactag

SEQ ID NO: 230954 - RNA, 153 nt, Artificial Sequence
  derived and/or modified sequence
augaagguuuuuuuccuguuugcuguccuguucugcuugguacagaccaauagcguccauauuucucaucgcgaggcacgcggcccaucauuuagaauaugcguagauuuccugggaccgaggugggcgagaggauguuccacugguaauuag

SEQ ID NO: 230955 - protein, 80 aa, Artificial Sequence
  derived and/or modified sequence
MKVFFLFAVLFCLVQTNSGDVPPGIRNTICHMQQGICRLFFCHSGEKKRDICSDPWNRCCVSNTDEEGKEKPEMDGRSGI

SEQ ID NO: 230956 - DNA, 243 bp, Artificial Sequence
  derived and/or modified sequence
atgaaagttttcttcctctttgccgttctcttttgtctggtccagacaaacagtggagacgtgcccccaggaattcgcaataccatttgccacatgcagcagggaatttgtaggctgtttttctgtcattccggggagaagaagcgtgatatctgtagcgatccatggaatcggtgttgcgttagcaacactgatgaagaagggaaggagaagccagaaatggacgggagaagcgggatttag

SEQ ID NO: 230957 - DNA, 243 bp, Artificial Sequence
  derived and/or modified sequence
atgaaagtgttttttctgttcgctgtcttattctgtctggtacagaccaatagtggcgatgttccccccggcattagaaatacgatctgtcacatgcaacaaggcatctgtcgcctgttcttttgtcacagtggagaaaaaaaacgagacatctgcagcgacccctggaatagatgttgcgtgtctaacaccgatgaagagggaaaggagaagccagaaatggacgggcgcagtggtatctag

SEQ ID NO: 230958 - DNA, 444 bp, Artificial Sequence
  derived and/or modified sequence
catatttgtgctccttcacgggagggcagggaggttcaacggaccttaaaacatgaaggtcttttttctgtttgctgttctcttttgtttggtccaaacaaactcaggggatgttccaccgggaattagaaataccatctgccatatgcagcaagggatctgcagactttttttctgccattctggtgagaaaaagcgtgacatttgctctgatccctggaataggtgttgcgtatcaaatacagatgaagaaggaaaagagaaaccagagatggatggcagatctgggatctaaaatataagctcccggaaggcagggatgttgaagtatcccaagggcttaaaggaatgtgtggcttatagtaggtgttcaataaatatttgttgaatgaatttagcaccaaaggtgaagagctgataaaagacatttttttaacttcctta

SEQ ID NO: 230959 - DNA, 481 bp, Artificial Sequence
  derived and/or modified sequence
catatttgtgctccttcacgggagggcagggaggttcaacggaccttaaaacatgaaggtcttttttctgtttgctgttctcttttgtttggtccaaacaaactcagtgcacatctctcaccgggaggctcgaggaccctcatttaggatctgtgtggactttttagggcctagatgggccaggggatgttccaccgggaattagaaataccatctgccatatgcagcaagggatctgcagactttttttctgccattctggtgagaaaaagcgtgacatttgctctgatccctggaataggtgttgcgtatcaaatacagatgaagaaggaaaagagaaaccagagatggatggcagatctgggatctaaaatataagctcccggaaggcagggatgttgaagtatcccaagggcttaaaggaatgtgtggcttatagtaggtgttcaataaatatttgttgaatgaatttagcaccaaa

SEQ ID NO: 230960 - DNA, 243 bp, Artificial Sequence
  derived and/or modified sequence
atgaaggtgttcttcctgttcgccgtgctgttctgcctggtgcagaccaacagcggcgacgtgccccccggcatcagaaacaccatctgccacatgcagcagggcatctgcagactgttcttctgccacagcggcgagaagaagagagacatctgcagcgacccctggaacagatgctgcgtgagcaacaccgacgaggagggcaaggagaagcccgagatggacggcagaagcggcatctag

SEQ ID NO: 230961 - DNA, 243 bp, Artificial Sequence
  derived and/or modified sequence
atgaaagtctttttccttttcgcagtgcttttttgtctggtgcagactaactctggagatgtcccacccggcatccggaatactatctgccacatgcagcaagggatttgtcgcctgttcttttgccattccggggaaaaaaagcgggatatctgtagcgatccatggaaccggtgctgtgtcagcaacactgatgaggaagggaaggagaagccggagatggacggaagatctggcatctag

SEQ ID NO: 230962 - DNA, 243 bp, Artificial Sequence
  derived and/or modified sequence
atgaaggtgttcttcctgtttgctgtgctcttctgcctggtgcagaccaacagcggagatgtgcccccaggcatccggaacaccatctgccacatgcagcagggcatctgccgcctcttcttctgccacagcggggagaagaagagggacatctgcagcgacccctggaaccgctgctgcgtgagcaacacagatgaggagggcaaggagaagccagagatggatggccgcagcggcatctag

SEQ ID NO: 230963 - DNA, 243 bp, Artificial Sequence
  derived and/or modified sequence
atgaaggtgttcttcctgttcgccgtgctgttctgcctggtgcagaccaattccggggatgttcctccgggcattcgcaacacaatttgccacatgcaacaggggatctgccgcttattcttctgccactctggcgagaagaagcgcgatatatgttctgatccgtggaatcgatgttgtgtgagcaacaccgacgaagagggtaaagagaaacccgaaatggacggacgctccggaatctag

SEQ ID NO: 230964 - RNA, 243 nt, Artificial Sequence
  derived and/or modified sequence
augaaaguguuuuuucuguucgcugucuuauucugucugguacagaccaauaguggcgauguuccccccggcauuagaaauacgaucugucacaugcaacaaggcaucugucgccuguucuuuugucacaguggagaaaaaaaacgagacaucugcagcgaccccuggaauagauguugcgugucuaacaccgaugaagagggaaaggagaagccagaaauggacgggcgcagugguaucuag

SEQ ID NO: 230965 - protein, 376 aa, Artificial Sequence
  derived and/or modified sequence
MRGKTFRFEMQRDLVSFPLSPAVRVKLVSAGFQTAEELLEVKPSELSKEVGISKAEALETLQIIRRECLTNKPRYAGTSESHKKCTALELLEQEHTQGFIITFCSALDDILGGGVPLMKTTEICGAPGVGKTQLCMQLAVDVQIPECFGGVAGEAVFIDTEGSFMVDRVVDLATACIQHLQLIAEKHKGEEHRKALEDFTLDNILSHIYYFRCRDYTELLAQVYLLPDFLSEHSKVRLVIVDGIAFPFRHDLDDLSLRTRLLNGLAQQMISLANNHRLAVILTNQMTTKIDRNQALLVPALGESWGHAATIRLIFHWDRKQRLATLYKSPSQKECTVLFQIKPQGFRDTVVTSACSLQTEGSLSTRKRSRDPEEEL

SEQ ID NO: 230966 - DNA, 1131 bp, Artificial Sequence
  derived and/or modified sequence
atgagaggcaagaccttcagattcgagatgcagagagacctggtgagcttccccctgagccccgccgtgagagtgaagctggtgagcgccggcttccagaccgccgaggagctgctggaggtgaagcccagcgagctgagcaaggaggtgggcatcagcaaggccgaggccctggagaccctgcagatcatcagaagagagtgcctgaccaacaagcccagatacgccggcaccagcgagagccacaagaagtgcaccgccctggagctgctggagcaggagcacacccagggcttcatcatcaccttctgcagcgccctggacgacatcctgggcggcggcgtgcccctgatgaagaccaccgagatctgcggcgcccccggcgtgggcaagacccagctgtgcatgcagctggccgtggacgtgcagatccccgagtgcttcggcggcgtggccggcgaggccgtgttcatcgacaccgagggcagcttcatggtggacagagtggtggacctggccaccgcctgcatccagcacctgcagctgatcgccgagaagcacaagggcgaggagcacagaaaggccctggaggacttcaccctggacaacatcctgagccacatctactacttcagatgcagagactacaccgagctgctggcccaggtgtacctgctgcccgacttcctgagcgagcacagcaaggtgagactggtgatcgtggacggcatcgccttccccttcagacacgacctggacgacctgagcctgagaaccagactgctgaacggcctggcccagcagatgatcagcctggccaacaaccacagactggccgtgatcctgaccaaccagatgaccaccaagatcgacagaaaccaggccctgctggtgcccgccctgggcgagagctggggccacgccgccaccatcagactgatcttccactgggacagaaagcagagactggccaccctgtacaagagccccagccagaaggagtgcaccgtgctgttccagatcaagccccagggcttcagagacaccgtggtgaccagcgcctgcagcctgcagaccgagggcagcctgagcaccagaaagagaagcagagaccccgaggaggagctgtag

SEQ ID NO: 230967 - DNA, 1131 bp, Artificial Sequence
  derived and/or modified sequence
atgcgcgggaaaacctttagatttgaaatgcagcgggacctggtgagtttcccactcagtccagctgtgagagtaaagctggtgagtgccggatttcagactgcagaggaactgttagaggtaaagccttcggagttgtccaaggaggttggtatctctaaggcggaagcactcgagacccttcagattatcagacgtgaatgccttaccaataagcccagatatgcgggcactagcgaaagccacaagaagtgtacagctctggagctgctggaacaggagcatacgcagggttttatcatcacgttctgctcggccttggacgatattctgggtgggggggtccccctgatgaagacaaccgagatatgtggagcacccggcgtgggtaaaactcagttgtgtatgcaactcgccgtggacgtacagatacccgagtgtttcggtggcgtcgctggggaagccgtgtttattgacaccgagggtagtttcatggtcgaccgagtcgtagacctggctacagcctgcatacaacatctccagctcattgcggagaaacataagggggaggagcatagaaaggcactggaagacttcactttggataatatcttgagccatatctactacttccgatgccgagactacacggagcttcttgcacaggtgtatcttctgcctgacttcctctcagaacattcaaaggtcagactagtgattgtggatgggatcgcattccctttcagacatgacctcgatgacctcagcctgcggactcgtctactgaacggcttagcccaacaaatgatctcactggcaaataatcaccgccttgccgtgatcctcacaaatcagatgactaccaaaattgaccgaaaccaggccctcttggtgccggcgttaggagaatcatggggacatgccgcaaccatcagactgatattccattgggacagaaagcagcggctggccacactctacaagtcaccatcacagaaggagtgcaccgtgctctttcagatcaaaccgcaaggattccgagataccgtcgtgacgagcgcttgctcgctccagaccgaaggctcactgtccacccgaaagcgcagtcgagatcccgaagaagagctttag

SEQ ID NO: 230968 - DNA, 1131 bp, Artificial Sequence
  derived and/or modified sequence
atgaggggcaagaccttccgctttgagatgcagagggacctggtgtccttccccctgagccctgctgtgcgggtgaagctggtgtctgctggcttccagacagctgaggagctgctggaggtgaagcccagcgagctgagcaaggaggtgggcatcagcaaggccgaggccctggagaccctgcagatcatcagaagagaatgtctgaccaacaagcccaggtatgccggcaccagcgagagccacaagaagtgcacagccctggagctgctggagcaggagcacacccagggcttcatcatcaccttctgcagcgccctggatgacatcctgggcggcggcgtgcccctgatgaagaccacagagatctgtggggcccctggggtgggcaagacccagctgtgcatgcagctggccgtggatgtgcagatccctgagtgcttcggcggcgtggccggggaggccgtgttcatcgacacagagggcagcttcatggtggacagagtggtggacctggccacagcctgcatccagcacctgcagctgattgctgagaagcacaagggggaggagcacaggaaggccctggaggacttcaccctggacaacatcctgagccacatctactacttccgctgccgggactacacagagctgctggcccaggtgtacctgctgcctgacttcctgtctgagcacagcaaggtgcggctggtgattgtggatggcatcgccttccccttcagacatgacctggatgacctgagcctgcggacccggctgctgaatggcctggcccagcagatgatcagcctggccaacaaccaccggctggccgtcatcctgaccaaccagatgaccaccaagattgacaggaaccaggccctgctggtgcctgccctgggggagagctggggccacgccgccaccatccgcctcatcttccactgggacaggaagcagaggctggccaccctgtacaagagccccagccagaaggagtgcaccgtgctcttccagatcaagccccagggcttccgggacacagtggtgaccagcgcctgcagcctgcagacagagggcagcctgagcaccaggaagaggagccgggaccctgaggaggagctgtag

SEQ ID NO: 230969 - DNA, 1131 bp, Artificial Sequence
  derived and/or modified sequence
atgcggggcaagaccttccggttcgagatgcagcgggacctggtgagtttccctctgtcaccggccgttcgcgttaaactggtaagcgccggattccagacggctgaagagttgctggaagttaaaccttccgagctttctaaagaagtgggaatcagtaaggccgaagcccttgaaacactgcagataattaggcgcgagtgcttaaccaacaaaccacgctatgcgggcacttctgagtctcacaaaaagtgtactgctctggagctgcttgagcaggaacatacccaggggtttatcatcaccttttgcagtgccttggacgacattctggggggcggggtgcccctgatgaagacaaccgaaatctgcggggctccaggcgtgggcaaaacgcagctgtgtatgcaactggccgtggatgtgcagatccctgagtgcttcggtggggtggccggtgaagctgtgtttattgatactgaggggagttttatggtggaccgggtagtagacctggcgacagcatgtatacagcacctccaattaattgccgaaaagcacaagggggaggaacacaggaaagcccttgaagatttcaccttggacaacattctctcccatatatactattttcgatgccgggattacacagaacttcttgctcaggtttacctccttccagactttctgtctgagcacagtaaggtgagacttgtgatcgtcgacggcattgcctttccatttaggcatgacctggatgacttgtcgttgcggactcgacttctaaatggcctcgcccagcagatgatcagtctggcaaacaaccatcggttagctgtgattctgacaaatcagatgaccaccaagatagataggaatcaggctttgctggtaccggccttgggtgaatcctggggtcatgccgcaactatcagactgattttccattgggaccggaaacagaggctggcaactctgtataagtcacccagccagaaagagtgtaccgtactgttccaaatcaagcctcaggggttccgcgatacagttgtgacctccgcttgctctttacagacggaggggagcttaagcacgcgcaagcgtagcagagatccagaagaagagctctag

SEQ ID NO: 230970 - DNA, 1131 bp, Artificial Sequence
  derived and/or modified sequence
atgagagggaaaacctttaggttcgaaatgcagagagatcttgtgagttttcccctgagtcccgctgtgcgagtcaagttggtaagcgccggtttccagacggccgaagagctgcttgaggttaagccttctgagctctctaaggaggttggcatctccaaggccgaggctcttgagactctccagataatccgcagggaatgcctgactaacaaaccacgctacgctggcacgagtgaaagccacaagaagtgcacagccctggaactgttggagcaggaacacacccaggggtttattataaccttttgctccgctctcgacgacatccttggcggtggggtgccattaatgaagaccacagagatctgcggggcaccaggcgtggggaagacacagctgtgcatgcagctcgctgtcgatgtgcagatccccgaatgttttggcggagtggccggagaggccgtcttcattgatacggagggtagcttcatggtggaccgcgttgttgacctggctaccgcatgtatccagcatctgcaactgattgccgaaaaacacaagggcgaggagcacaggaaggcgctcgaagattttaccctggacaacatcctgtcccacatatattacttcaggtgcagagattataccgaactcctggcccaggtatatttattgccggactttctgtccgagcattccaaagttcggctggtgatcgtagatggcatcgcctttccattccgtcacgatctagacgatctgagcctcaggactcggttattgaatggactggcccagcagatgatctcacttgcaaataatcaccgactggctgtaatcttaaccaaccagatgaccacaaagatcgaccgcaatcaggcacttctggtgcctgctctgggggaaagctgggggcacgccgctacaatccggctgatctttcactgggaccgtaagcagcgcctcgccaccttgtacaagagcccaagtcagaaagagtgcaccgtactgtttcagatcaagcctcagggatttagggatactgttgtgacgagcgcgtgttctctgcagaccgagggtagcctctctacccgcaagaggtctagggatccagaagaggagctgtag

SEQ ID NO: 230971 - DNA, 1322 bp, Artificial Sequence
  derived and/or modified sequence
gacgtcacgccgcacgccccagcgagggcgtgcggagtttggctgctccggggttagcaggtgagcctgcgatgcgcgggaagacgttccgctttgaaatgcagcgggatttggtgagtttcccgctgtctccagcggtgcgggtgaagctggtgtctgcggggttccagactgctgaggaactcctagaggtgaaaccctccgagcttagcaaagaagttgggatatctaaagcagaagccttagaaactctgcaaattatcagaagagaatgtctcacaaataaaccaagatatgctggtacatctgagtcacacaagaagtgtacagcactggaacttcttgagcaggagcatacccagggcttcataatcaccttctgttcagcactagatgatattcttgggggtggagtgcccttaatgaaaacaacagaaatttgtggtgcaccaggtgttggaaaaacacaattatgtatgcagttggcagtagatgtgcagataccagaatgttttggaggagtggcaggtgaagcagtttttattgatacagagggaagttttatggttgatagagtggtagaccttgctactgcctgcattcagcaccttcagcttatagcagaaaaacacaagggagaggaacaccgaaaagctttggaggatttcactcttgataatattctttctcatatttattattttcgctgtcgtgactacacagagttactggcacaagtttatcttcttccagatttcctttcagaacactcaaaggttcgactagtgatagtggatggtattgcttttccatttcgtcatgacctagatgacctgtctcttcgtactcggttattaaatggcctagcccagcaaatgatcagccttgcaaataatcacagattagctgtaattttaaccaatcagatgacaacaaagattgatagaaatcaggccttgcttgttcctgcattaggggaaagttggggacatgctgctacaatacggctaatctttcattgggaccgaaagcaaaggttggcaacattgtacaagtcacccagccagaaggaatgcacagtactgtttcaaatcaaacctcagggatttagagatactgttgttacttctgcatgttcattgcaaacagaaggttccttgagcacccggaaacggtcacgagacccagaggaagaattataacccagaaacaaatctcaaagtgtacaaatttattgatgttgtgaaatcaatgtgtacaagtggacttgttaccttaaagtataaataaacacactatggcatgaatgaatccagatcata

SEQ ID NO: 230972 - protein, 272 aa, Artificial Sequence
  derived and/or modified sequence
MPGDHRRIRGPEESQPPQLYAADEEEAPGTRDPTRLRPVYARAGLLSQAKGSAYLEAGGTKVLCAVSGPRQAEGGERGGGPAGAGGEAPAALRGRLLCDFRRAPFAGRRRRAPPGGCEERELALALQEALEPAVRLGRYPRAQLEVSALLLEDGGSALAAALTAAALALADAGVEMYDLVVGCGLSLAPGPAPTWLLDPTRLEEERAAAGLTVALMPVLNQVAGLLGSGEGGLTESWAEAVRLGLEGCQRLYPVLQQSLVRAARRRGAAAQP

SEQ ID NO: 230973 - DNA, 819 bp, Artificial Sequence
  derived and/or modified sequence
atgcccggcgaccacagaagaatcagaggccccgaggagagccagcccccccagctgtacgccgccgacgaggaggaggcccccggcaccagagaccccaccagactgagacccgtgtacgccagagccggcctgctgagccaggccaagggcagcgcctacctggaggccggcggcaccaaggtgctgtgcgccgtgagcggccccagacaggccgagggcggcgagagaggcggcggccccgccggcgccggcggcgaggcccccgccgccctgagaggcagactgctgtgcgacttcagaagagcccccttcgccggcagaagaagaagagccccccccggcggctgcgaggagagagagctggccctggccctgcaggaggccctggagcccgccgtgagactgggcagataccccagagcccagctggaggtgagcgccctgctgctggaggacggcggcagcgccctggccgccgccctgaccgccgccgccctggccctggccgacgccggcgtggagatgtacgacctggtggtgggctgcggcctgagcctggcccccggccccgcccccacctggctgctggaccccaccagactggaggaggagagagccgccgccggcctgaccgtggccctgatgcccgtgctgaaccaggtggccggcctgctgggcagcggcgagggcggcctgaccgagagctgggccgaggccgtgagactgggcctggagggctgccagagactgtaccccgtgctgcagcagagcctggtgagagccgccagaagaagaggcgccgccgcccagccctag

SEQ ID NO: 230974 - DNA, 819 bp, Artificial Sequence
  derived and/or modified sequence
atgccaggggaccatcgcaggatcagggggccagaggagagccagccacctcagctgtatgcagcagacgaggaagaggcccccggcacaagagaccccaccaggctcagacccgtgtacgcgcgagccgggctgctgtcccaggctaagggcagcgcctacctcgaagccggaggtacgaaggttttgtgcgccgtaagcggtccaaggcaggcagaaggtggtgaaaggggagggggaccagccggagcaggaggagaggcccctgctgccctccgtgggcggttactgtgcgactttcggagggctccatttgctggaaggcgcaggcgggcacctccagggggctgtgaggaacgcgaattggcattggcactgcaagaggcgctggagcccgccgtgcgcctgggtcggtatccacgcgctcagcttgaggtgtctgctcttctgctcgaggacgggggatcagctcttgctgcggctctcacagcagccgccctggcccttgcagacgctggggtggagatgtatgacctggtcgtggggtgtggactctcactggcccccggacccgcgcccacatggctgctcgatcccacaaggctggaggaggagcgggccgccgcaggcctgacggttgcactgatgccagtgctcaaccaagtcgccggcctccttggcagcggggagggtggactcacagagagctgggccgaggccgtgcgcctgggccttgagggatgtcagaggctatacccagtgctacaacaaagcctcgtacgggcggccagacgccgtggggctgccgcccagccctag

SEQ ID NO: 230975 - DNA, 819 bp, Artificial Sequence
  derived and/or modified sequence
atgcctggggaccaccggcgcatccggggccctgaggagagccagcccccccagctgtatgctgctgatgaggaggaggcccctggcacccgggaccccacccggctgcggcctgtgtatgcccgggccggcctgctgagccaggccaagggcagcgcctacctggaggccggcggcaccaaggtgctgtgtgctgtgtctggcccccggcaggccgagggcggggagcggggcggcggccctgctggggccggcggggaggccccagctgccctgcggggccgcctgctgtgtgacttcagaagagccccctttgctggaagaagaagaagagcccctcctgggggctgtgaggagcgggagctggccctggccctgcaggaggccctggagcctgctgtgcggctgggccgctacccccgggcccagctggaggtgtctgccctgctgctggaggatggcggcagcgccctggccgccgccctgacagctgctgccctggccctggctgatgctggggtggagatgtatgacctggtggtgggctgcggcctgagcctggcccctggccctgcccccacctggctgctggaccccacccggctggaggaggagagagctgctgctggcctgactgtggccctgatgcctgtgctgaaccaggtggccggcctgctgggcagcggggagggcggcctgacagagagctgggccgaggccgtgcggctgggcctggagggctgccagaggctgtaccctgtgctgcagcagagcctggtgcgggccgccaggagaagaggagctgctgcccagccctag

SEQ ID NO: 230976 - DNA, 819 bp, Artificial Sequence
  derived and/or modified sequence
atgcccggcgaccaccggcggatccggggccccgaggagagccagccaccccagttgtacgctgccgacgaagaagaggctcccggcacgcgggatcccactaggttgaggccagtgtacgcgcgcgcaggcctgttgtcacaggccaaaggtagcgcctatcttgaggcagggggcacaaaagtgctgtgcgccgtgtctggccctaggcaggctgagggtggagagaggggtggaggtcccgcgggcgccgggggagaagcgcccgctgccttgagggggaggttactttgcgatttccggcgtgccccgttcgccggaagacggcgaagggccccacctggggggtgcgaagagcgcgaactagctctagccctccaggaggccctcgagccagcagttcgcctgggccggtatcctcgcgcacagctggaagtgtctgctctgttgctggaggacggcggctcggctctcgccgcggccctaaccgccgccgccctggccttagcagacgctggcgttgagatgtatgacctggtcgtgggctgtggcctgtcactggcccccgggcctgcccctacttggcttctcgacccaacaaggttagaggaggagagagctgccgccggactgacagtggcactgatgcctgtgctaaatcaggttgccggcttattgggctctggggaaggaggtctaacagagtcttgggcagaggcggtgagactggggttggagggatgccagcgtctatatcccgtgctacagcagtccctcgtaagggccgcccgacggagaggtgccgctgcccaaccttag

SEQ ID NO: 230977 - DNA, 819 bp, Artificial Sequence
  derived and/or modified sequence
atgcctggagatcacaggagaattagaggaccagaggaaagccagccaccccagctctatgccgctgatgaggaagaagcgcctggaacacgtgatccaaccaggctccgccctgtatacgcaagggctggactgctgtcccaagcaaagggatctgcctaccttgaagctgggggaacaaaggtcttgtgcgcagtttccggtccacgacaggccgagggcggagagcgcggaggcggacctgccggtgcaggaggggaggctcccgcagcattgaggggtagactgctctgtgacttccgcagagcaccattcgcaggaagacggaggagggcgcctcctgggggatgcgaagaacgggaactggctctggccctccaggaagcgttagaaccagccgtccggttagggagataccctcgagcccagctggaggtctccgcgcttctgctcgaggacggcggatctgcgctggccgctgcactgacggccgcagccttagcgctcgccgacgctggcgtggagatgtacgatttagtggttggatgtggtctaagtttagcccctggccctgcccctacttggctgctagacccaacccgacttgaggaggaacgggctgctgccggtttgacggtggcactcatgcctgtgctcaatcaagtggccggactcctcggctcaggtgagggtggcctgactgaatcttgggctgaagccgtgcggctgggccttgagggatgccagcggctgtatcccgtcctccagcagagcctggtcagggccgctcgacggcgtggggcagccgctcagccatag

SEQ ID NO: 230978 - DNA, 1700 bp, Artificial Sequence
  derived and/or modified sequence
gcggaaggggttcgcacgccaagaaccgccatgcctggggatcaccgccgcatccgcggccctgaagaatcgcagccgccgcagctgtacgcggccgacgaggaggaggcgcccggcacccgcgacccaacgcggctacggcccgtgtacgcgcgcgccgggctgctgagccaggccaagggctcggcctacctggaggcgggaggcaccaaggtgctgtgtgccgtgtcgggcccgcgacaggccgagggcggcgagcgcggcggcggcccggccggagcaggcggcgaggccccggccgcgctgcgcggtcgcctgctctgcgacttccgccgcgcacccttcgcgggccgccggcgccgcgctcccccgggcggctgcgaggagcgtgagctggcgctggcgctgcaggaggcgctggagccggctgtgcgcctgggccgctacccgcgcgcgcagctcgaggtgtcggcgctgctgctggaggacggtggctcggccctggccgccgcgctcaccgccgccgcgctcgccctggccgacgcgggcgtggagatgtacgacctggtggtgggctgcggcctcagcctcgcgccggggcccgcgcccacctggctcctggaccccacgcggctcgaggaagagcgcgccgccgccggcctcaccgtggcgctcatgcctgtgctgaatcaggtggccgggctgctgggcagcggcgagggcggcctgacagagagctgggcggaggccgtacgcctgggcctcgagggctgccagcgcctctaccccgtgctgcagcagagcctggtgcgggccgcccgccgcaggggcgccgccgcccagccctgaaccagaagcctgagcaactacggacgcaagccgaggaccgtgctgccgccgtccacgaaaagacccgcgccatcggcctccagtttgcgtcgagaattcctggaagggccctgatatgactgtggttggactgacctgactgccagatggtgggacttggtctggagcagggactacttggaatgataaaggcaaaactcaacagcccctggagctgcgcttgtggtggagctggaccctgaaattacctggaccttttttttagagacagggtttctttctgcagtctcaaactcctagccttgattgatcctcctgccttggcctcccaaagtgctgggactacaggtgcatgcaaccacacctggctaattttcttttcttctttctttcttttttttttttttttttttttgatggagtcttgttctgttgcccaggctggagtgcaatggtgcaatcttggctcactgcaacctctgcctcctgggttcaatccattctcctgcctcagcctcccaagtagctgggattacaggcacatgcctccataccgggctaatttttgtatttttagtagagatggggtttcgccatgtgggccaggctgttctcgaatgcctgacctcaggtgatccacccgccttggcctcccaaagtgctggaattacaggtgtgagccactgtgcccagctgagtaaatttcttgattgcacagaatgtacggtgatattggcggacttaaggacatcgaattgtttatcaggaataaagtattatgtgtgttttctgcggccctggataatgctgtagcattcagggtcgattgagtaaaaaaaatgtagagatgg

SEQ ID NO: 230979 - protein, 355 aa, Artificial Sequence
  derived and/or modified sequence
MPFLGQDWRSPGQNWVKTADGWKRFLDEKSGSFVSDLSSYCNKEVYNKENLFNSLNYDVAAKKRKKDMLNSKTKTQYFHQEKWIYVHKGSTKERHGYCTLGEAFNRLDFSTAILDSRRFNYVVRLLELIAKSQLTSLSGIAQKNFMNILEKVVLKVLEDQQNIRLIRELLQTLYTSLCTLVQRVGKSVLVGNINMWVYRMETILHWQQQLNNIQITRPAFKGLTFTDLPLCLQLNIMQRLSDGRDLVSLGQAAPDLHVLSEDRLLWKKLCQYHFSERQIRKRLILSDKGQLDWKKMYFKLVRCYPRKEQYGDTLQLCKHCHILSWKGTDHPCTANNPESCSVSLSPQDFINLFKF

SEQ ID NO: 230980 - DNA, 6744 bp, Artificial Sequence
  derived and/or modified sequence
agcactcccggagcctgcaacgcttgagatcctctccgcgcccgccaccccgcagggtgccccgcgccgttcccgccgccccgccgcccccgtcgcgggcccctgcaccccgagcatccgccccgggtggcacgtccccgagcccaccaggccggccccgtctccccatccgtctagtccgctcgcggtgccatgccattcctcgggcaggactggcggtcccccgggcagaactgggtgaagacggccgacggctggaagcgcttcctggatgagaagagcggcagtttcgtgagcgacctcagcagttactgcaacaaggaggtatacaataaggagaatcttttcaacagcctgaactatgatgttgcagccaagaagagaaagaaggacatgctgaatagcaaaaccaaaactcagtatttccaccaagaaaaatggatctatgttcacaaaggaagtactaaagagcgccatggatattgcaccctgggggaagctttcaacagactggacttctcaactgccattctggattccagaagatttaactacgtggtccggctgttggagctgatagcaaagtcacagctcacatccctgagtggcatcgcccaaaagaacttcatgaatattttggaaaaagtggtactgaaagtccttgaagaccagcaaaacattagactaataagggaactactccagaccctctacacatccttatgtacactggtccaaagagtcggcaagtctgtgctggtcgggaacattaacatgtgggtgtatcggatggagacgattctccactggcagcagcagctgaacaacattcagatcaccaggcctgccttcaaaggcctcaccttcactgacctgcctttgtgcctacaactgaacatcatgcagaggctgagcgacgggcgggacctggtcagcctgggccaggctgcccccgacctgcacgtgctcagcgaagaccggctgctgtggaagaaactctgccagtaccacttctccgagcggcagatccgcaaacgattaattctgtcagacaaagggcagctggattggaagaagatgtatttcaaacttgtccgatgttacccaaggaaagagcagtatggagatacccttcagctctgcaaacactgtcacatcctttcctggaagggcactgaccatccgtgcactgccaataacccagagagctgctccgtttcactttcaccccaggactttatcaacttgttcaagttctgaatcccagcacatgacaacacttcagaagggtccccctgctgactggagagctgggaatatggcatttggacacttcatttgtaaatagtgtacattttaaacattggctcgaaacttcagagataagtcatggagaggacattggaggggagaaatgcagttgctgactgggaatttaagaatgtgaacttctcactagaattggtatggaaaagcaaaatactgtaaataaactttttttctaacaatttgccagcaagactataagggcaataattctatttcagcggtgaaaatggagtcctcttaatggtcacagaaactctcttatagttccctaggaagaaaaaggcaaaactcaaatacaaaataggacgctttgtttacaatgtgaaaatttgtttagaaaagaaaaaatgaagaaggaaaactatataggagaaattcctgggctttggggtttgatctggtgtttgttttgagaaggcgaaggaagcgccacccatcctaaacctgcatgggcacagagccttaccctacagagataccacacaatggtctacctctaaaagcgtagagtgccctctctgacaacgcatgtgatccagtaggcagtgtctgtttttctcgtaagtgttttcatcactataaaaagtgatttaaaatggaaagggatattggaggcaatcctctggtttcacacttccttttcaggcaaacagggccctccttagagttatctgttcaccagaacaacccaaaagcacatgttccttttttcctgtcatgttgtagctcatttgggggaaaagaaggccaacttaaaacagtcccaggggaggattgcttgagcccaggagtctgaggtttgcagtgagctatgattgtgccactgcactccagcctgtctccaaaacaaaacaaaacaaaacaaaagccgtcccagaggaagtcctgctgcagaaaagatgatagaattggtcacccaatcaatagctgtgaagacttccttattcctgctgaacttccttccttggatatcttcatggataagcctgtgtctgtggacagagtggggcccaagtgctgaggctcgaaagacaggttttacaatcagccaattaaacatcttaccagttgctgtaccccttgccaaggggatgagctgaggagcttcttttctttaggtccaacatcaaaatgagtccatctgagctagggctttttgcaaaggtgattaaaaatcaaggctggagttccagccaaatagggaggagaggtaccacaagttcatcttaaacttgcttccgggctgggtagttaaaacaggaagatcccaaggggatcttacgaggcaaatatcagcaggtaactgtggaagaaaggaaatctcaggacctaatgagttcgttgtaaaatattcctgggaatagatgggggatctactcccagttttttactttttacagaatattgttgctttcctacaacaatgtacatatatttgcagttgtatatgctttttttttttccaaataaacttgtcaccctgcatgcccttggcaaataagtgaagcagaaataggaacacagtccacattcaagttgaggaacagtgtatctttaagagctgagctttgggtgacctggaaagggggaaagatggctaagcatggagagaaacgaggcaagagacaagctatgatacaacaccgcttcagcccctgccctcaatagcacacaacccacatatcagctttctgaagagaaggaacctactgtttagtgctcctcactttgcaatgtttgtgctacgccagaatttctccagtttttttcattatcatccccctgagaaaaaaattacattgaatttaaattttccctaataagagaaattaaatatgaaagaataggattttgttgggtaagattgagctttggaaggtcacgaaccattattctatctaaggtgtgtgttttgttttgtttttttttgttttttttttgcaatccctctccccctgaaccaatttcacattgggaatgcaggacctagactgctgaataaaaagctacttcttctataattgtcaggttctctccaatttctcagcttcctcaaagacatggggtggagttgggtgtgccatcactgagagagctctggaacttttgactcttagtgacatttttagatttaggggttcatggccttccacatgttgccaccaactggtgatctctgccccttcatgctgatcaagaaagtagaaactcctcgtcgccttcaggtttgcagtcgcagaaacattgcctgctgtggactgtcagcacaaaactgggacactggtgtcatttagactgtcagcagtgcacatgattgtacgatagactccaggcaaccatgtgcatctgtgcaagatgacctctgccccaagagaagggttacggtctaattaaatgtttaccaagatggtaccagtgggctctccccgtgtcctttggtgttattggagctggtgtatgacagactcaaggaaattttttaaggaaaatgaagaagaaatcaacctttatggttctctttcattggaagaggagaataaggaaagaaatggcaggtagagagggagggggaaaggaatagaaatggcatgtctttgatgctgtggcttgtgtggggacaatgggaagagcacagcaggcacaacatatctgtgttagtgccacgtggtatctgttaagtatggccagagcctcacatataagtgaagagagttaagacaattcttgctctttgaacaataatagtctatagaatttctattggcaaaccatcccagacaacctgacctatcaaacaaaagcaaataatccctgtctcagaactgctggtctaaaagctagaaggggcatgataatggaaattgctagaaaagagagaatgctctactctctttcctgtgcctacctacccccatcctaaaccctgtaaaacagaatttcaaaatagatgtcaaatatgaagtaattcagacttccaaagaaggaaagagttctgcccagggcagtatgagcaaatccacagggatgttaagatttggtccaactcaaaggtttatgggcagtgagcctagagtctcttgagagtaaacccttgcatttgggacaaggagaatatgtgaagttcaggagtgctcacactagagcaagatccagaaaaaaaaaaatccaatggcattttaaactagattgcattatcactcaatgctgttactttgagcagacaaatcagttgaatgggagggcaaatggcagaaatgaacaaaagctattaggtgaaagcatccccaatgtatcagttgtgagatgatttttgtttaatgatgatcaggtttacattgaagtggcttggaagacgtatttcagagggactgggtttgtactgcaaaactctgaacactagagcaggttctactagcacttgggcagtaaggtagcgggtgtgtattatgctattgccatagttctcgtctttgtggattcacataccctttcccatgaggagcttgctactaacagcctcctgtttctgttgtttttatatgggagaagagaaagagcttggaatttcaattgtctaaacaattggtatgatttacaagaaggcaaaccattcaggagatgttcaacagtgtatcattcttagcattcaatacaatgtttattataaaatatacacctgagtttatgtttttctgccaggctgaagggcaataatgtcttgctatgcaaacactctattttatgtgtgaatttttttaactgtaattttatgtgtgaatttttttaactaaactctatcatcattttctatgttgacatcttttttttttttttaatctgtttccaactctgagtctgtgaactatctcttctgactggatgctggcctaaaatcctattagtgcttaaacagacctcaaaacactctgaacctgtaggccaatacagagatgttgttctttgatatatcttgggtccttgatggcttcaacaaacaaggtcataatttgtttaaattcagtgttttctgtagataccttcttctcagtttcattaagaagagtaaccatctttggttttccaaagaatggaaactcctaccctagactttagacttagagcgtctgcctttcacgatgagtaagagatccagaatgtttaggggatgtgcgtcagcccacctggtacagtggcaaagctgaatgcgaacttgaggcctcctgaggcctgaccttctatgcccccagccctccaccccaagcaccttttggtgtggctggaaacacatgacattggatgtgatttttctcaagcccttcactgtggaaggcatgggagactgcccagcattgggcatgtggctgttaacgtttccatttcaagtccctgattcttactggagaagttaaggagccacttaatgttttcacagacctctgattctgttgtgaatgtggcattccagtgagtacaacctgcttgctataaagaaagcagcatattttgacaattttatttcttccttgggtacttacatttttattacaaaaatggccgttataaaaaaagacagaagggctgggcagtggcttgctccctagaaactgagattccgaagcaggtgtttcctctcccctagactcagaggtacatttaatccatcttctccatttcctccttcaggaccagctatgagattcagtgcatttctagcccagcggatgttcattctccactaaacttcatcttttactaagcaaagggggattattccatgaggcagccaggagcaaggggccatgatattcatgactttgtctgctgggcatttttcaaagtgtccttgaattcactcagcaaacaaagctttctggagaatctctcaaaacttaggccctgctccatttggccaaaaatgatggctgctccaaaactctgaacttcttaaaactccatctgctacattatttctggagtttaaacatgactttttctgtctttgagtatagatgtgtttgtttaattaacgaagcacaagtctgttaagcagaaggctccaagctgtattctatacttgggaatccttggtgccatctttattctaccaagtgccaatcaccatggctaaagtgggcgtatattacagcctgtgtcctaagcttagaagctttaatgtacttttttaaatgaaaagtattagagggggttgaacattgtaactaaagcataaagttagaccaattacatgcagagatgtttatttaatattgtgtgagctgagtccttctgtataaattatttgcacacttttcttgcatgatgaactgattttttatagttgtttgtaccagacggtggcatatttttgtaaaaaacttttgacactgaattgcaataaatgtttttccaacaaca

SEQ ID NO: 230981 - DNA, 1068 bp, Artificial Sequence
  derived and/or modified sequence
atgccattcctgggccaggactggaggtcaccgggccaaaactgggtgaaaactgcagacggttggaaacgttttctcgacgaaaagagcggctccttcgtctcagatctgagcagctactgtaataaggaagtctataacaaagaaaatttgttcaactctctgaattacgatgtagctgcaaaaaagcggaaaaaggacatgctgaattcaaagactaagactcagtatttccatcaggagaaatggatttacgtgcacaagggttccacaaaagagagacacggatactgtactttgggcgaggctttcaatagactggacttttccacagcaattttggacagtaggagattcaactatgtggtaaggctgctcgaactcatcgccaagagtcagcttacatcgcttagcgggatcgcgcaaaaaaatttcatgaacatcctggaaaaggtcgtgcttaaggttcttgaggaccagcagaacatccgcctaatcagggaactgctccagacactgtacacttctctgtgtaccctagtgcagagagtaggaaagagtgtgttggtcggcaacataaacatgtgggtgtaccgcatggagactattctccactggcaacaacagttgaacaacatacagatcacccggcccgcgttcaaaggacttacttttaccgatctccccctgtgcttgcagttaaatattatgcagcgcctaagtgacggaagggatctcgtctctctgggtcaagctgcccccgacttgcatgtcctatccgaggatcgactcttatggaagaagttgtgtcaataccacttctccgaaagacagatccgcaaacgtctaattttgtccgataaggggcagttagattggaaaaagatgtactttaaactggtgagatgttatccccggaaggagcagtacggagacacactgcaactctgtaagcattgtcacatcctgagctggaaaggtaccgaccatccctgcaccgctaataacccagagtcatgttccgtctcgttaagtccacaggattttatcaatctgtttaagttttag

SEQ ID NO: 230982 - DNA, 1068 bp, Artificial Sequence
  derived and/or modified sequence
atgcccttcctgggccaggactggaggagccctggccagaactgggtgaagacagcagatggctggaagcgcttcctggatgagaagagcggcagctttgtgtctgacctgagcagctactgcaacaaggaggtgtacaacaaggaaaatctcttcaacagcctgaactatgatgtggccgccaagaagaggaagaaggacatgctgaacagcaagaccaagacccagtacttccaccaggagaagtggatctacgtgcacaagggcagcaccaaggagagacatggctactgcaccctgggggaggccttcaaccggctggacttcagcacagccatcctggacagccgccgcttcaactacgtggtgcggctgctggagctgattgccaagagccagctgaccagcctgagcggcatcgcccagaagaacttcatgaacatcctggagaaggtggtgctgaaggtgctggaggaccagcagaacatccgcctcatccgggagctgctgcagaccctgtacaccagcctgtgcaccctggtgcagagggtgggcaagtctgtgctggtgggcaacatcaacatgtgggtgtacaggatggagaccatcctgcactggcagcagcagctgaacaacatccagatcaccaggcctgccttcaagggcctgaccttcacagacctgcccctgtgcctgcagctgaacatcatgcagaggctgagtgatggccgggacctggtgtccctgggccaggccgccccagacctgcacgtgctgtctgaagatcggctgctgtggaagaagctgtgccagtaccacttcagcgagcggcagatcaggaagaggctcatcctgagtgacaagggccagctggactggaagaagatgtacttcaagctggtgcgctgctaccccaggaaggagcagtacggggacaccctgcagctgtgcaagcactgccacatcctgtcctggaagggcacagaccacccctgcacagccaacaaccctgagagctgcagcgtgtccctgagcccccaggacttcatcaacctcttcaagttctag

SEQ ID NO: 230983 - DNA, 1068 bp, Artificial Sequence
  derived and/or modified sequence
atgcccttcctgggccaggactggcggagccccggccagaactgggtgaagactgcagatgggtggaagcgttttctggacgagaagagcgggagctttgtgagcgacctcagctcgtactgtaataaggaagtttataacaaagagaaccttttcaactctctgaattacgatgtcgctgcgaaaaagaggaagaaagatatgctcaatagtaagacaaagacacagtacttccatcaggaaaaatggatctacgtgcataagggttccacaaaagaaagacacgggtactgtaccctcggcgaagcttttaataggctggacttcagcacagcgatcctcgatagccgccgatttaactacgtggttaggcttttggaactcatcgctaagagccaactgacctccctttcaggcatcgcacagaagaatttcatgaacattcttgagaaagtggtgttgaaagtactagaagatcagcagaacattaggttaatccgtgagcttctgcagacgctgtacacaagcttatgtacccttgtgcagcgcgtcgggaagtcagttctcgtgggcaacatcaatatgtgggtgtacagaatggaaacaatcctccactggcagcagcaactaaacaatatccagattacacgacccgcctttaagggtcttacattcacagacttacccttatgcctccagctgaatataatgcaaaggctgtctgatggacgagatctggtttcgttgggccaggccgctcccgatttgcacgtgctttcggaggaccgcttattatggaagaaactgtgccagtaccacttttccgagcgccagattaggaagcgtcttatcttaagcgacaagggccagctggattggaaaaagatgtacttcaagctcgtgcgttgctatcctaggaaggaacagtacggcgataccctgcaactgtgcaaacactgtcacatcttatcatggaagggaactgaccatccttgcacagcaaacaacccagagagttgctcggtttccctgtcaccgcaggattttatcaacctcttcaaattctag

SEQ ID NO: 230984 - DNA, 1068 bp, Artificial Sequence
  derived and/or modified sequence
atgcccttcctgggacaggattggagatcccccggacaaaactgggttaaaacggcggacgggtggaaaagattcctggatgagaagagcggatcattcgtgtctgacctgtcctcatattgtaacaaggaagtgtataacaaggagaatttgttcaatagcctgaactacgacgtcgctgccaaaaagcggaaaaaggacatgttgaattctaaaaccaagactcagtacttccatcaggagaaatggatttacgtccataaaggatccaccaaggagagacacggctattgtacgctaggcgaagcctttaatcggttggacttttctacagccatactggacagtaggcgatttaactacgttgttaggctgctggaactcatcgctaagtcccagctgacatcactttccggcatagcccaaaagaacttcatgaacattctggaaaaagtggttcttaaggtgctggaagaccaacaaaacatacgtcttatcagagaactgctgcaaaccctgtacacatcactgtgtacgctggtccagcgcgtggggaaatctgtcctggttggcaatattaacatgtgggtgtacagaatggagacaatcctgcactggcagcaacagctgaataatatacaaatcacaaggccggcatttaaagggttgacttttactgatcttcctttgtgtctgcaactgaacattatgcagcgcctcagcgacggcagagatttagtgtcccttggccaggcggcaccagatctccacgtgctgtctgaagatagactgttgtggaagaaactgtgtcagtaccacttctcagagaggcagattaggaagcgcctcatcctgagcgacaagggacagcttgattggaaaaagatgtattttaagctagtacgatgttacccgaggaaagaacaatatggagacactttacagctgtgcaagcactgtcacattctaagctggaagggaaccgaccacccatgcacagctaacaatccagagtcatgttccgtctcactgtcacctcaggacttcataaacctattcaagttttag

SEQ ID NO: 230985 - DNA, 1068 bp, Artificial Sequence
  derived and/or modified sequence
atgcccttcctgggccaggactggagaagccccggccagaactgggtgaagaccgccgacggctggaagagattcctggacgagaagagcggcagcttcgtgagcgacctgagcagctactgcaacaaggaggtgtacaacaaggagaacctgttcaacagcctgaactacgacgtggccgccaagaagagaaagaaggacatgctgaacagcaagaccaagacccagtacttccaccaggagaagtggatctacgtgcacaagggcagcaccaaggagagacacggctactgcaccctgggcgaggccttcaacagactggacttcagcaccgccatcctggacagcagaagattcaactacgtggtgagactgctggagctgatcgccaagagccagctgaccagcctgagcggcatcgcccagaagaacttcatgaacatcctggagaaggtggtgctgaaggtgctggaggaccagcagaacatcagactgatcagagagctgctgcagaccctgtacaccagcctgtgcaccctggtgcagagagtgggcaagagcgtgctggtgggcaacatcaacatgtgggtgtacagaatggagaccatcctgcactggcagcagcagctgaacaacatccagatcaccagacccgccttcaagggcctgaccttcaccgacctgcccctgtgcctgcagctgaacatcatgcagagactgagcgacggcagagacctggtgagcctgggccaggccgcccccgacctgcacgtgctgagcgaggacagactgctgtggaagaagctgtgccagtaccacttcagcgagagacagatcagaaagagactgatcctgagcgacaagggccagctggactggaagaagatgtacttcaagctggtgagatgctaccccagaaaggagcagtacggcgacaccctgcagctgtgcaagcactgccacatcctgagctggaagggcaccgaccacccctgcaccgccaacaaccccgagagctgcagcgtgagcctgagcccccaggacttcatcaacctgttcaagttctag

SEQ ID NO: 230986 - protein, 349 aa, Artificial Sequence
  derived and/or modified sequence
MHRNFRKWIFYVFLCFGVLYVKLGALSSVVALGANIICNKIPGLAPRQRAICQSRPDAIIVIGEGAQMGINECQYQFRFGRWNCSALGEKTVFGQELRVGSREAAFTYAITAAGVAHAVTAACSQGNLSNCGCDREKQGYYNQAEGWKWGGCSADVRYGIDFSRRFVDAREIKKNARRLMNLHNNEAGRKVLEDRMQLECKCHGVSGSCTTKTCWTTLPKFREVGHLLKEKYNAAVQVEVVRASRLRQPTFLRIKQLRSYQKPMETDLVYIEKSPNYCEEDAATGSVGTQGRLCNRTSPGADGCDTMCCGRGYNTHQYTKVWQCNCKFHWCCFVKCNTCSERTEVFTCK

SEQ ID NO: 230987 - protein, 205 aa, Artificial Sequence
  derived and/or modified sequence
MHRNFRKWIFYVFLCFGVLYVKLGALSSVVALGANIICNKIPGLAPRQRAICQSRPDAIIVIGEGAQMGINECQYQFRFGRWNCSALGEKTVFGQELRVGSREAAFTYAITAAGVAHAVTAACSQGNLSNCGCDREKQGYYNQAEGWKWGGCSADVRYGIDFSRRFVDAREIKKNARRLMNLHNNEAGRKGLLGQPRVTSSPLFP

SEQ ID NO: 230988 - DNA, 1050 bp, Artificial Sequence
  derived and/or modified sequence
atgcacagaaacttcagaaagtggatcttctacgtgttcctgtgcttcggcgtgctgtacgtgaagctgggcgccctgagcagcgtggtggccctgggcgccaacatcatctgcaacaagatccccggcctggcccccagacagagagccatctgccagagcagacccgacgccatcatcgtgatcggcgagggcgcccagatgggcatcaacgagtgccagtaccagttcagattcggcagatggaactgcagcgccctgggcgagaagaccgtgttcggccaggagctgagagtgggcagcagagaggccgccttcacctacgccatcaccgccgccggcgtggcccacgccgtgaccgccgcctgcagccagggcaacctgagcaactgcggctgcgacagagagaagcagggctactacaaccaggccgagggctggaagtggggcggctgcagcgccgacgtgagatacggcatcgacttcagcagaagattcgtggacgccagagagatcaagaagaacgccagaagactgatgaacctgcacaacaacgaggccggcagaaaggtgctggaggacagaatgcagctggagtgcaagtgccacggcgtgagcggcagctgcaccaccaagacctgctggaccaccctgcccaagttcagagaggtgggccacctgctgaaggagaagtacaacgccgccgtgcaggtggaggtggtgagagccagcagactgagacagcccaccttcctgagaatcaagcagctgagaagctaccagaagcccatggagaccgacctggtgtacatcgagaagagccccaactactgcgaggaggacgccgccaccggcagcgtgggcacccagggcagactgtgcaacagaaccagccccggcgccgacggctgcgacaccatgtgctgcggcagaggctacaacacccaccagtacaccaaggtgtggcagtgcaactgcaagttccactggtgctgcttcgtgaagtgcaacacctgcagcgagagaaccgaggtgttcacctgcaagtag

SEQ ID NO: 230989 - DNA, 618 bp, Artificial Sequence
  derived and/or modified sequence
atgcacagaaacttcagaaagtggatcttctacgtgttcctgtgcttcggcgtgctgtacgtgaagctgggcgccctgagcagcgtggtggccctgggcgccaacatcatctgcaacaagatccccggcctggcccccagacagagagccatctgccagagcagacccgacgccatcatcgtgatcggcgagggcgcccagatgggcatcaacgagtgccagtaccagttcagattcggcagatggaactgcagcgccctgggcgagaagaccgtgttcggccaggagctgagagtgggcagcagagaggccgccttcacctacgccatcaccgccgccggcgtggcccacgccgtgaccgccgcctgcagccagggcaacctgagcaactgcggctgcgacagagagaagcagggctactacaaccaggccgagggctggaagtggggcggctgcagcgccgacgtgagatacggcatcgacttcagcagaagattcgtggacgccagagagatcaagaagaacgccagaagactgatgaacctgcacaacaacgaggccggcagaaagggcctgctgggccagcccagagtgaccagcagccccctgttcccctag

SEQ ID NO: 230990 - DNA, 174 bp, Artificial Sequence
  derived and/or modified sequence
atgggcatcaacgagtgccagtaccagttcagattcggcagatggaactgcagcgccctgggcgagaagaccgtgttcggccaggagctgagagtgggcagcagagaggccgccttcacctacgccatcaccgccgccggcgtggcccacgccgtgaccgccgcctgcagctag

SEQ ID NO: 230991 - DNA, 1050 bp, Artificial Sequence
  derived and/or modified sequence
atgcataggaacttcaggaaatggattttctacgtttttctgtgcttcggggtcctctatgtgaagctgggagccctgtcctcagtggtggctctgggagccaatatcatatgcaacaagattcctggacttgctccaaggcaacgtgcaatttgccagtcacgccctgatgccatcatcgtgattggcgagggcgcacaaatgggtattaatgagtgccagtaccagttccgtttcggccggtggaattgttctgccctgggagaaaagaccgtgtttggccaggagctccgtgtcggatctcgagaagcagcatttacctacgctattacagccgctggagtggcccatgccgtgacagccgcctgctcccagggaaacctttcaaactgtggatgtgatcgcgagaagcagggatattacaatcaggccgaagggtggaagtggggaggatgttccgccgacgtgagatacgggatcgacttctcccgcaggtttgtcgacgccagggaaataaaaaagaatgcgcgtcggctgatgaacctgcacaacaacgaagccgggagaaaagtgctggaggacaggatgcagttggagtgcaagtgccatggcgtctcaggaagctgtactacgaagacctgttggacgactctgccaaagtttagagaggttggccacctgctgaaggaaaaatacaatgccgccgtgcaagtggaggtggtgagggcgtccagattgcgtcagccaacttttctacgcatcaaacagctgcgtagctaccagaagccaatggaaacagacctcgtctacatcgagaaatcacccaactactgcgaggaggacgcagctacggggtctgtcggcactcagggccgtctctgcaataggactagccccggagccgacggctgcgatacgatgtgttgcggcagagggtacaacactcaccaatatacgaaggtatggcagtgcaactgcaaatttcactggtgctgttttgtgaaatgtaatacatgctctgaaaggacagaagtgttcacatgcaaatag

SEQ ID NO: 230992 - DNA, 618 bp, Artificial Sequence
  derived and/or modified sequence
atgcacagaaattttcgaaaatggattttctacgtgtttctctgcttcggggtcctgtatgtgaagctgggtgcattgtcctctgtcgtcgccctcggggccaatattatctgtaataaaatacccggactggcccctaggcaacgggctatatgccaatctcgccctgatgccattatcgttataggtgagggggcacagatggggataaatgagtgccaataccaatttagattcggtcgatggaactgtagcgctctaggagagaaaacagtcttcggccaagagttgagggtcgggtctcgggaggctgcctttacatacgcgataacagccgcaggtgtggctcacgcagttaccgccgcatgcagtcaaggcaacctttcaaactgcgggtgtgatcgggagaagcaaggctactacaaccaggctgagggttggaaatggggtggatgcagcgctgacgtacgctatggaatcgatttcagcaggcgtttcgtcgatgcacgggagattaagaaaaatgccaggcgactgatgaatctccacaataatgaggcgggcaggaagggcctgctgggccaacctagagttacatcatcccctctattcccatag

SEQ ID NO: 230993 - DNA, 174 bp, Artificial Sequence
  derived and/or modified sequence
atgggtatcaacgaatgccagtaccagttcagattcggccggtggaactgttctgccttgggcgaaaaaacagtattcggacaggaactacgcgtcggttctcgcgaagcagcattcacctatgccatcaccgccgctggggtggcccacgccgttacagcggcctgtagttag

SEQ ID NO: 230994 - DNA, 1050 bp, Artificial Sequence
  derived and/or modified sequence
atgcacaggaacttcaggaagtggatcttctacgtgttcctgtgcttcggcgtgctgtatgtgaagctgggcgccctgagctctgtggtggccctgggcgccaacatcatctgcaacaagatccctggcctggccccccggcagagggccatctgccagagcaggccagatgccatcatcgtcatcggggagggcgcccagatgggcatcaatgaatgccagtaccagttccgcttcggccgctggaactgcagcgccctgggggagaagacagtgtttggccaggagctgcgggtgggcagccgggaggccgccttcacctacgccatcacagctgctggggtggcccatgctgtgacagctgcctgcagccagggcaacctgagcaactgtggctgtgaccgggagaagcagggctactacaaccaggccgagggctggaagtggggcggctgcagcgcagatgtgcgctatggcatcgacttcagccgccgctttgtggatgcccgggagatcaagaagaatgcccggcggctgatgaacctgcacaacaatgaagctggcaggaaggtgctggaggacaggatgcagctggagtgcaagtgccacggcgtgtctggcagctgcaccaccaagacctgctggaccaccctgcccaagttccgggaggtgggccacctgctgaaggagaagtacaatgctgctgtgcaggtggaggtggtgcgggccagccggctgcggcagcccaccttcctgcgcatcaagcagctgcggagctaccagaagcccatggagacagacctggtgtacatcgagaagagccccaactactgtgaggaggatgctgccaccggctctgtgggcacccagggccgcctgtgcaacagaaccagccctggagcagatggctgtgacaccatgtgctgcggccggggctacaacacccaccagtacaccaaggtgtggcagtgcaactgcaagttccactggtgctgctttgtgaagtgcaacacctgcagcgagaggacagaggtgttcacctgcaagtag

SEQ ID NO: 230995 - DNA, 618 bp, Artificial Sequence
  derived and/or modified sequence
atgcacaggaacttcaggaagtggatcttctacgtgttcctgtgcttcggcgtgctgtatgtgaagctgggcgccctgagctctgtggtggccctgggcgccaacatcatctgcaacaagatccctggcctggccccccggcagagggccatctgccagagcaggccagatgccatcatcgtcatcggggagggcgcccagatgggcatcaatgaatgccagtaccagttccgcttcggccgctggaactgcagcgccctgggggagaagacagtgtttggccaggagctgcgggtgggcagccgggaggccgccttcacctacgccatcacagctgctggggtggcccatgctgtgacagctgcctgcagccagggcaacctgagcaactgtggctgtgaccgggagaagcagggctactacaaccaggccgagggctggaagtggggcggctgcagcgcagatgtgcgctatggcatcgacttcagccgccgctttgtggatgcccgggagatcaagaagaatgcccggcggctgatgaacctgcacaacaatgaagctggcaggaagggcctgctgggccagccccgggtgaccagcagccccctcttcccctag

SEQ ID NO: 230996 - DNA, 174 bp, Artificial Sequence
  derived and/or modified sequence
atgggcatcaatgaatgccagtaccagttccgcttcggccgctggaactgcagcgccctgggggagaagacagtgtttggccaggagctgcgggtgggcagccgggaggccgccttcacctacgccatcacagctgctggggtggcccatgctgtgacagctgcctgcagctag

SEQ ID NO: 230997 - DNA, 1050 bp, Artificial Sequence
  derived and/or modified sequence
atgcaccggaacttccggaagtggatcttctacgtgttcctgtgctttggcgtgctttatgtgaaacttggggccctgagcagcgtggtggcactgggagcaaatattatttgcaacaagattccaggcctggcaccccgccaacgggcaatctgccagagccgaccagacgcaattatagttataggggagggcgcccagatgggaatcaatgagtgccagtaccaatttcgcttcgggcggtggaactgttccgccctcggcgaaaaaactgtgttcggccaagaactgcgcgtcggctcgcgggaagctgccttcacgtatgccattacagctgccggtgtggcacacgctgtgacggcggcttgctcacagggcaatctgtccaattgcggctgcgacagagagaaacagggatactacaaccaggctgaaggctggaagtgggggggatgttcagccgacgtgcggtatggcatcgattttagccgccggttcgtagatgcaagggaaatcaagaagaacgcacggcgattgatgaacctgcacaacaacgaggcgggcaggaaagttctagaagacaggatgcagctcgaatgtaaatgccatggggtgtctggttcatgtacaacaaagacatgttggactacccttcccaaatttcgggaagtgggccacctgcttaaggagaaatataacgctgcggtacaggtcgaagtcgtacgagcttctagattacgacaacctacattcttgagaatcaagcaactgaggagctatcagaaacccatggagacagatctcgtgtacatagaaaaatccccaaattattgtgaagaggatgctgctacaggttccgtcgggacacagggacggttgtgcaatcggacctcacccggtgctgatggctgcgatacaatgtgttgtggaagagggtataatacacatcagtacacaaaagtctggcagtgcaactgtaaatttcactggtgctgtttcgtaaaatgcaatacttgcagcgaaagaaccgaagtcttcacatgcaaatag

SEQ ID NO: 230998 - DNA, 618 bp, Artificial Sequence
  derived and/or modified sequence
atgcaccggaacttccggaagtggatcttctacgtgttcctgtgcttcggcgttctgtatgttaaactcggcgcactttcctccgtggtagcccttggagctaatattatctgcaataaaatccccggcctcgcacctaggcagagggctatctgtcagtcgagacccgacgctatcattgtgataggagagggcgctcagatggggattaatgaatgccaataccagttcagatttggacggtggaactgcagcgctctgggcgagaagaccgtcttcggtcaggagctgagggtcggaagcagagaggccgcgtttacgtacgccatcacagccgccggagtcgcccatgccgtgacggctgcttgctcacaagggaacttaagcaactgcggttgcgaccgggaaaaacagggctattacaaccaggcagaggggtggaagtggggcggatgttcagccgacgttcgctatggcattgattttagtagacgattcgttgacgcacgagagatcaagaaaaacgcaaggagattgatgaacttgcacaacaatgaagcagggcggaaagggctcctcggacagccccgagttaccagcagccccctgtttccgtag

SEQ ID NO: 230999 - DNA, 174 bp, Artificial Sequence
  derived and/or modified sequence
atgggcatcaacgagtgccagtaccagttccggttcggccggtggaactgctcagccctgggggaaaaaaccgtctttggacaagagcttcgggtggggtcgagggaagccgcctttacatacgctattactgcagcgggcgtcgcccacgctgtgactgcagcctgtagttag

SEQ ID NO: 231000 - DNA, 1050 bp, Artificial Sequence
  derived and/or modified sequence
atgcacagaaattttcgcaagtggatcttttatgtgttcttgtgttttggagtcctatatgtgaagctcggggctctctcatctgttgtcgctctgggggcaaacatcatatgcaataaaattcccggtcttgcaccaagacagcgcgctatctgtcagagtagacccgacgccatcatagtgattggagagggagcacaaatgggaataaatgaatgtcagtatcagttccgctttggtcgttggaactgttccgctctaggggagaagaccgtgttcggccaggaattacgcgtgggaagtcgtgaagctgcgtttacttatgccataacggcagccggagtagcccacgctgtgactgctgcttgtagccagggcaatctatccaattgtggatgcgacagggaaaagcagggatattacaatcaggccgagggctggaagtggggagggtgttctgccgacgtgaggtacgggatcgacttttcacgtcggttcgtggacgccagagaaataaagaagaacgccagacggcttatgaatttgcacaataacgaagctgggaggaaggtgttagaagacaggatgcagcttgagtgtaagtgtcacggcgtgtccggttcatgcacgacaaagacttgctggaccacactgccgaagttccgcgaagtgggccatctcctgaaggagaagtacaacgctgcagtccaggtggaagtcgtgcgagccagccgactaaggcagcccacgtttctacgaattaagcagctccgcagctaccagaagcccatggaaactgacttggtgtatatcgaaaaatcacccaattactgcgaggaagacgctgccaccggaagcgttggtactcagggccgactatgcaatcgcaccagccccggtgcggatggatgcgataccatgtgttgcggtagagggtacaatacccaccagtacacaaaggtttggcagtgtaactgcaaattccactggtgttgtttcgttaagtgcaatacatgctcagaacggactgaggtctttacatgtaagtag

SEQ ID NO: 231001 - DNA, 618 bp, Artificial Sequence
  derived and/or modified sequence
atgcatagaaatttcaggaagtggattttttacgtgtttctctgttttggggttctgtacgtgaagctcggggctctgagtagcgtggtggcactcggggctaacatcatctgcaacaagatcccaggtctggcccctcgccagagggccatttgtcaatcccgacctgatgcaatcattgttataggagagggcgctcagatgggtatcaacgaatgccagtaccagtttcgctttggcaggtggaactgcagtgcgctgggggaaaaaacggtgttcgggcaggagctcagggttggatcccgcgaggccgcattcacatacgcaataaccgccgctggggtggcccatgccgtgactgcagcttgcagccagggaaacctctccaactgtggctgcgacagagagaagcagggatactacaatcaggcagaaggctggaaatggggaggctgctccgctgacgtgagatatggcattgactttagtcgaagatttgtggatgctcgcgagatcaaaaaaaacgctcgtagactgatgaaccttcacaataatgaggcgggacggaagggtctgctcgggcagccaagagtcaccagcagtcccttgttcccctag

SEQ ID NO: 231002 - DNA, 174 bp, Artificial Sequence
  derived and/or modified sequence
atggggatcaatgagtgccaatatcaatttcggttcggcagatggaactgcagcgcacttggagagaagaccgttttcggtcaggagctcagggtcggctccagagaggccgcttttacatatgccatcacagccgctggcgtggcgcatgctgttaccgccgcatgttcatag

SEQ ID NO: 231003 - DNA, 1050 bp, Artificial Sequence
  derived and/or modified sequence
atgcatcgtaatttcaggaagtggatcttctacgtttttctgtgttttggtgtactttatgttaagctcggagctctatcgagcgttgtcgcactgggcgcaaatatcatctgcaacaaaatccctggccttgcaccaaggcagcgagcaatttgccagtccagacccgacgcaattatagtgattggagagggcgctcagatgggaattaacgaatgtcaatatcagtttaggtttgggcgatggaattgctcggcgctcggagagaagaccgtgttcggccaggaattgcgagtcggctcacgtgaagccgctttcacctacgccatcaccgccgcgggggtggcccatgctgttaccgctgcgtgttcccaaggaaatctgagcaactgtggttgcgaccgcgaaaaacaaggttactacaatcaggcagagggttggaaatggggtggatgttccgcagacgttagatatggcattgatttctcgagaaggttcgtcgacgcccgtgaaattaagaaaaacgctaggagactgatgaatcttcacaacaacgaggcaggcaggaaggtgctggaggacagaatgcaacttgagtgtaagtgtcacggcgtgtctggcagctgtacaacaaaaacatgctggactacactgcccaaatttagagaggtagggcatttgctgaaagaaaagtacaacgccgccgtgcaagtggaggtggttcgagcaagccggctgcgccagccgacttttttgcggattaagcagctccgatcatatcaaaagcccatggagaccgaccttgtgtacatcgagaagagccccaactactgtgaggaagatgcagccacgggatctgtggggacccagggaaggctgtgtaaccgaacttcacctggcgctgacggttgcgacaccatgtgctgtggacgcgggtacaacactcaccaatataccaaggtgtggcaatgcaattgcaagttccattggtgctgcttcgtcaaatgcaacacctgttcggagagaactgaggtttttacatgcaaatag

SEQ ID NO: 231004 - DNA, 618 bp, Artificial Sequence
  derived and/or modified sequence
atgcatcgaaacttcagaaagtggattttctatgtctttctttgttttggtgtgctgtatgtgaagctgggagctttgagtagtgtggttgccctcggtgcgaacattatctgcaataagatacccggcttggccccgcgacagcgtgctatctgtcaatcgagacccgacgcaattatcgtcatcggtgagggggcccagatgggcattaatgagtgtcagtatcagttcaggttcggcagatggaactgtagtgccttgggtgaaaaaactgtgtttggccaagagttaagggttggcagcagagaggccgctttcacttacgccatcaccgctgctggagtagctcatgccgtcaccgccgcctgctcccaagggaatctttcgaactgcgggtgcgatcgcgaaaaacagggctactataatcaggccgaaggctggaagtgggggggctgcagcgcggacgttaggtacggcatcgatttttcccgccggtttgtggatgctcgcgagataaaaaaaaacgccagacgccttatgaacttgcataataatgaagcaggacgtaaaggcctgctaggtcagccccgcgtcacatcatcccccttgttcccttag

SEQ ID NO: 231005 - DNA, 174 bp, Artificial Sequence
  derived and/or modified sequence
atgggtatcaatgaatgccaatatcagtttagattcggtagatggaattgctctgcactgggcgagaaaacggtctttggtcaagagttgagagtgggatccagagaagcagcttttacatacgcaataacggcagccggagtggcccacgccgtgactgctgcttgctcctag

SEQ ID NO: 231006 - DNA, 1050 bp, Artificial Sequence
  derived and/or modified sequence
atgcacaggaatttcaggaagtggattttttatgtattcctctgcttcggagttctttacgtaaaacttggtgctctgtcgtccgtcgtggctctaggtgctaatatcatctgcaacaaaatacctggactggcccctcgccagagagctatttgccaaagccggcccgacgcgatcatcgttattggagaaggagcccagatggggattaacgagtgtcaataccaatttaggtttggccgatggaattgttccgctctcggtgagaagaccgtatttggacaggagttgagggtcggaagtagagaggcagcctttacttacgcaatcacagcagcaggtgtggcccacgcagtcactgctgcctgctcccagggtaacttgagtaattgcggctgtgatcgggagaagcaagggtattataaccaagcagaaggatggaaatggggggggtgttccgcagacgtcagatacgggatcgactttagtaggaggttcgtggacgccagggaaattaaaaaaaatgctagacgacttatgaatctgcacaataacgaggccgggcggaaagtgctggaagaccgtatgcagctcgagtgcaaatgtcacggagtgagtggatcatgcaccaccaagacctgctggactactctaccgaagtttcgagaagtcgggcatctactgaaggagaagtacaacgcagcagtccaggtcgaggttgtacgagcttcacgcctcagacaaccaacattccttaggattaagcagctccgctcgtatcagaaacctatggagacagacctggtttacatcgaaaagtcccccaactattgtgaggaagacgccgcaacaggatccgtaggaacgcagggaagattatgtaatagaacatcccccggcgctgatggctgtgacacaatgtgctgcggacgaggttacaatacacaccagtacacgaaggtttggcaatgcaactgtaaatttcactggtgttgctttgtcaaatgcaatacctgctctgagcggaccgaagtttttacatgtaaatag

SEQ ID NO: 231007 - DNA, 618 bp, Artificial Sequence
  derived and/or modified sequence
atgcatcggaacttccggaagtggattttttacgtgttcctctgttttggtgtcctgtacgtgaaactgggcgcattaagctctgttgtggctttaggagctaacatcatttgtaacaagattcctggactcgccccgcgccagcgcgcaatctgtcagagccggcccgacgcgattattgtaataggcgaaggcgcacagatgggaatcaacgagtgtcagtaccagttccgctttgggcggtggaattgctctgccctcggcgaaaagacagttttcggtcaggaactacgggtgggatcccgcgaggctgccttcacctatgcgatcactgcagctggggtggctcacgcagtaacggccgcctgctctcagggtaatttgagcaactgtggatgcgatcgggagaaacaggggtattacaatcaagccgaagggtggaaatggggggggtgtagcgctgacgtgcggtatggtatcgacttttcacgcagatttgtggacgcccgagagatcaagaaaaacgctcgaagactgatgaatctccataataatgaagcaggaagaaagggacttctcggtcagcccagggtaacttcaagccccctgttcccctag

SEQ ID NO: 231008 - DNA, 3919 bp, Artificial Sequence
  derived and/or modified sequence
attggccgccgcggcgctcggcgaggcgctcacggcctcaggcggctgcgcctagtgcaggctgcacccgcccgccagccgcgcccgggcccccggcccgcgcttgcaggggtccacggtcgctcaaccgggcttcgaggtcgcggcccccagcctgggtcaattccccgggctcacgcggcggtggcggcggcggcatcccgggctcaccatggtggcagcgcgcgccgagtgcccgcgcgtcgccggccgcccgagccgcagcgcgggctgagcgcagtctgcccgcagccccctggcccctgcccggccctgccgggcccgcgcgtcccctccggccgccgctgtctatggcgcagcccccctccctggatcatgcacagaaactttcgcaagtggattttctacgtgtttctctgctttggcgtcctgtacgtgaagctcggagcactgtcatccgtggtggccctgggagccaacatcatctgcaacaagattcctggcctagccccgcggcagcgtgccatctgccagagtcggcccgatgccatcattgtgattggggagggggcgcagatgggcatcaacgagtgccagtaccagttccgcttcggacgctggaactgctctgccctcggcgagaagaccgtcttcgggcaagagctccgagtagggagccgtgaggctgccttcacgtacgccatcaccgcggctggcgtggcgcacgccgtcaccgctgcctgcagccaagggaacctgagcaactgcggctgcgaccgcgagaagcagggctactacaaccaagccgagggctggaagtggggcggctgctcggccgacgtgcgttacggcatcgacttctcccggcgcttcgtggacgctcgggagatcaagaagaacgcgcggcgcctcatgaacctgcataacaatgaggccggcaggaaggttctagaggaccggatgcagctggagtgcaagtgccacggcgtgtctggctcctgcaccaccaaaacctgctggaccacgctgcccaagttccgagaggtgggccacctgctgaaggagaagtacaacgcggccgtgcaggtggaggtggtgcgggccagccgtctgcggcagcccaccttcctgcgcatcaaacagctgcgcagctatcagaagcccatggagacagacctggtgtacattgagaagtcgcccaactactgcgaggaggacgcggccacgggcagcgtgggcacgcagggccgtctctgcaaccgcacgtcgcccggcgcggacggctgtgacaccatgtgctgcggccgaggctacaacacccaccagtacaccaaggtgtggcagtgcaactgcaaattccactggtgctgcttcgtcaagtgcaacacctgcagcgagcgcaccgaggtcttcacctgcaagtgaggccaggcccggaggcggccgcgggcaccctggaacccggcggcattttgcacatccactcctcaccttccctgccttggtgctgccagcagcagacatagacgggtgcagaagcggggagctccaggtgcaggagggcaccggccggggcccacgccctctgcccgcctccctggggctccttcctgccacctcctcccatcacctcctgcggcagaacagcacccgtgacccacccagagagcaaggccaggggtcttggtgctccccgacggggcccggcaagttctctttcttctctctgggaaaatgaacgtccaggacacacctgtatcccagagagcaaagtgatgaggagactgagcgtccccagccccacctggcggcatggacacagaaaagctacgccggctggcctctccagaccagttcccaggctgggtctgccgctgggccctggggcggtggggacagatgttgacacaaattatttatgttttcttagtatcagaagaggattctcggcactaacacatagccagtcctaactccgtactctgtgtcagcccatcccctagacaccctctgtttcctttcccggccccacctggccggccctctgcccctgcagagctgaggcagcctggggttgatggggaccacgcggtgcctgcaggtcctagaagtgagctgggcaggggctcttcagaccacacagccctgaccgggccttggaggagagccatggacaggctcctccatgccgtctttccttcttttgaaaatcctatcaatggctgggcgcggtggctcacacctgtaatcccagcactttgggagaccgaggcaggtggatcacctgaggtcaggagttcgagaccagcctggccaacgtggtgaaaccctgtctctactaaaaatacaaaaattagctgggcgtggtggcgtgcacctgtaatcccagctactcaggaggctgagacaggacacttgcttgaacccgggaggtggaggttgcaatgagccaagattgtgccactgtattccaacttgggtgacagagcacgactctgtctcaaaaaaagaaaagaaaataatatcaagcaaatcaaaatatcacccacgtcaggttccaggagtccttcgttccctccctcatcctgtcaccctcccggcctggcacctccagtttacagagacccccttccccctggagccagcctgacccctgggacagtgctgccgcgggggtcaggcaggtggtgagtggtcagggatgtttgtcccacttgacagatgggaactctgaggcccagagtggcacaaggacctaccagagaccctgcagctgtgactggaggcttccacctttctcctgcccagcctggggctctggacctgggagaacacatcaggatgcccggggtggcagtaggtagctcccatgccttgaggcacttggctgctccctccaccccctgacagcctcattggggcctgcactcccctcggtgcctttgaggcttcgcctagccctgtcctggtccttttaccctgaccccagtgctgagaaaatctggatccagagctggacatgtcctttctggatgctcccacccctgtctctgaggagcatgagtgacagagggaggaacttgtccgaggccagagaggatggtctgcagctggctcctggtgcacccccactgcccacggcctggcccccatttagggtgtgttctcttggaagcccgtaggaatgtgttcttgagcagccgacaagccaagggcctgggctcagcctggggcaagtgggtccctcctgggctctggccctgtggtccagcccatgtgcctctaaccatgcctggacgctctgagtctccgggccaccgtgaatgccccaccctcagcctggccccatccccttaccttccccaagtcccagaacacacctgagtccataggcccggcagcctctgcaaggaacctggttaacttatgttgttatatagcgtcgaaatgtctatagtgtctttaaattattgtgacctacactgggtaccggagagggggatggctgcggcccccatccctcatcccccatcccatcccatccctcatctcatccctcatcccatcccccatcccatccctgaccccatcccccatcccatccctcatccctattccccatacccaccccccatcccatcccccatctcccgaaccaggctcctcctgcttcaacagacccttggggcccctgatgccaccgagacactcgcactgtcccttggctgccgggcaccccactgagcccctgcccaccccaaagtctgccagcaacaggccctttgcctgggtgagacgggggtcagggtggcccagatgggggtgatggcgaccaaggtgctgcgtccccacccttctgacggcagcctcccctggaggggagtgctcggcccaataaaagctggaatcggaaaagtga

SEQ ID NO: 231009 - DNA, 714 bp, Artificial Sequence
  derived and/or modified sequence
cgcgtcccctccggccgccgctgtctatggcgcagcccccctccctggatcatgcacagaaactttcgcaagtggattttctacgtgtttctctgctttggcgtcctgtacgtgaagctcggagcactgtcatccgtggtggccctgggagccaacatcatctgcaacaagattcctggcctagccccgcggcagcgtgccatctgccagagtcggcccgatgccatcattgtgattggggagggggcgcagatgggcatcaacgagtgccagtaccagttccgcttcggacgctggaactgctctgccctcggcgagaagaccgtcttcgggcaagagctccgagtagggagccgtgaggctgccttcacgtacgccatcaccgcggctggcgtggcgcacgccgtcaccgctgcctgcagccaagggaacctgagcaactgcggctgcgaccgcgagaagcagggctactacaaccaagccgagggctggaagtggggcggctgctcggccgacgtgcgttacggcatcgacttctcccggcgcttcgtggacgctcgggagatcaagaagaacgcgcggcgcctcatgaacctgcataacaatgaggccggcaggaagggcctacttggacaacccagggtgacctcctctccgttgtttccttgaccacatctgtaaaggccctacttccaaataaagtcacttgccgag

SEQ ID NO: 231010 - DNA, 521 bp, Artificial Sequence
  derived and/or modified sequence
gccgcgatctcctttagacagaatctgtctcggcttcgctcgaagtgggggtggagaaacggcgtgacggagagggggtgcggtgcacctcgcctggggcgcccaccgcccgctgctggccccgcgctcctcgcacctgcggggacccgggccccgccgcgccctgcgcgcctactgtgcgccgccggctgccccgaggcgagccccgtccaggccacagagcactgtcatccgtggtggccctgggagccaacatcatctgcaacaagattcctggcctagccccgcggcagcgtgccatctgccagagtcggcccgatgccatcattgtgattggggagggggcgcagatgggcatcaacgagtgccagtaccagttccgcttcggacgctggaactgctctgccctcggcgagaagaccgtcttcgggcaagagctccgagtagggagccgtgaggctgccttcacgtacgccatcaccgcggctggcgtggcgcacgccgtcaccgctgcctgcagc

SEQ ID NO: 231011 - RNA, 174 nt, Artificial Sequence
  derived and/or modified sequence
auggguaucaaugaaugccaauaucaguuuagauucgguagauggaauugcucugcacugggcgagaaaacggucuuuggucaagaguugagagugggauccagagaagcagcuuuuacauacgcaauaacggcagccggaguggcccacgccgugacugcugcuugcuccuag

SEQ ID NO: 231012 - protein, 924 aa, Artificial Sequence
  derived and/or modified sequence
MAWLRLQPLTSAFLHFGLVTFVLFLNGLRAEAGGSGDVPSTGQNNESCSGSSDCKEGVILPIWYPENPSLGDKIARVIVYFVALIYMFLGVSIIADRFMASIEVITSQEREVTIKKPNGETSTTTIRVWNETVSNLTLMALGSSAPEILLSLIEVCGHGFIAGDLGPSTIVGSAAFNMFIIIGICVYVIPDGETRKIKHLRVFFITAAWSIFAYIWLYMILAVFSPGVVQVWEGLLTLFFFPVCVLLAWVADKRLLFYKYMHKKYRTDKHRGIIIETEGDHPKGIEMDGKMMNSHFLDGNLVPLEGKEVDESRREMIRILKDLKQKHPEKDLDQLVEMANYYALSHQQKSRAFYRIQATRMMTGAGNILKKHAAEQAKKASSMSEVHTDEPEDFISKVFFDPCSYQCLENCGAVLLTVVRKGGDMSKTMYVDYKTEDGSANAGADYEFTEGTVVLKPGETQKEFSVGIIDDDIFEEDEHFFVRLSNVRIEEEQPEEGMPPAIFNSLPLPRAVLASPCVATVTILDDDHAGIFTFECDTIHVSESIGVMEVKVLRTSGARGTVIVPFRTVEGTAKGGGEDFEDTYGELEFKNDETVKTIRVKIVDEEEYERQENFFIALGEPKWMERGISALLLSPDRKLTMEEEEAKRIAEMGKPVLGEHPKLEVIIEESYEFKTTVDKLIKKTNLALVVGTHSWRDQFMEAITVSAAGDEDEDESGEERLPSCFDYVMHFLTVFWKVLFACVPPTEYCHGWACFAVSILIIGMLTAIIGDLASHFGCTIGLKDSVTAVVFVAFGTSVPDTFASKAAALQDVYADASIGNVTGSNAVNVFLGIGLAWSVAAIYWALQGQEFHVSAGTLAFSVTLFTIFAFVCISVLLYRRRPHLGGELGGPRGCKLATTWLFVSLWLLYILFATLEAYCYIKGF

SEQ ID NO: 231013 - DNA, 2775 bp, Artificial Sequence
  derived and/or modified sequence
atggcctggctgagactgcagcccctgaccagcgccttcctgcacttcggcctggtgaccttcgtgctgttcctgaacggcctgagagccgaggccggcggcagcggcgacgtgcccagcaccggccagaacaacgagagctgcagcggcagcagcgactgcaaggagggcgtgatcctgcccatctggtaccccgagaaccccagcctgggcgacaagatcgccagagtgatcgtgtacttcgtggccctgatctacatgttcctgggcgtgagcatcatcgccgacagattcatggccagcatcgaggtgatcaccagccaggagagagaggtgaccatcaagaagcccaacggcgagaccagcaccaccaccatcagagtgtggaacgagaccgtgagcaacctgaccctgatggccctgggcagcagcgcccccgagatcctgctgagcctgatcgaggtgtgcggccacggcttcatcgccggcgacctgggccccagcaccatcgtgggcagcgccgccttcaacatgttcatcatcatcggcatctgcgtgtacgtgatccccgacggcgagaccagaaagatcaagcacctgagagtgttcttcatcaccgccgcctggagcatcttcgcctacatctggctgtacatgatcctggccgtgttcagccccggcgtggtgcaggtgtgggagggcctgctgaccctgttcttcttccccgtgtgcgtgctgctggcctgggtggccgacaagagactgctgttctacaagtacatgcacaagaagtacagaaccgacaagcacagaggcatcatcatcgagaccgagggcgaccaccccaagggcatcgagatggacggcaagatgatgaacagccacttcctggacggcaacctggtgcccctggagggcaaggaggtggacgagagcagaagagagatgatcagaatcctgaaggacctgaagcagaagcaccccgagaaggacctggaccagctggtggagatggccaactactacgccctgagccaccagcagaagagcagagccttctacagaatccaggccaccagaatgatgaccggcgccggcaacatcctgaagaagcacgccgccgagcaggccaagaaggccagcagcatgagcgaggtgcacaccgacgagcccgaggacttcatcagcaaggtgttcttcgacccctgcagctaccagtgcctggagaactgcggcgccgtgctgctgaccgtggtgagaaagggcggcgacatgagcaagaccatgtacgtggactacaagaccgaggacggcagcgccaacgccggcgccgactacgagttcaccgagggcaccgtggtgctgaagcccggcgagacccagaaggagttcagcgtgggcatcatcgacgacgacatcttcgaggaggacgagcacttcttcgtgagactgagcaacgtgagaatcgaggaggagcagcccgaggagggcatgccccccgccatcttcaacagcctgcccctgcccagagccgtgctggccagcccctgcgtggccaccgtgaccatcctggacgacgaccacgccggcatcttcaccttcgagtgcgacaccatccacgtgagcgagagcatcggcgtgatggaggtgaaggtgctgagaaccagcggcgccagaggcaccgtgatcgtgcccttcagaaccgtggagggcaccgccaagggcggcggcgaggacttcgaggacacctacggcgagctggagttcaagaacgacgagaccgtgaagaccatcagagtgaagatcgtggacgaggaggagtacgagagacaggagaacttcttcatcgccctgggcgagcccaagtggatggagagaggcatcagcgccctgctgctgagccccgacagaaagctgaccatggaggaggaggaggccaagagaatcgccgagatgggcaagcccgtgctgggcgagcaccccaagctggaggtgatcatcgaggagagctacgagttcaagaccaccgtggacaagctgatcaagaagaccaacctggccctggtggtgggcacccacagctggagagaccagttcatggaggccatcaccgtgagcgccgccggcgacgaggacgaggacgagagcggcgaggagagactgcccagctgcttcgactacgtgatgcacttcctgaccgtgttctggaaggtgctgttcgcctgcgtgccccccaccgagtactgccacggctgggcctgcttcgccgtgagcatcctgatcatcggcatgctgaccgccatcatcggcgacctggccagccacttcggctgcaccatcggcctgaaggacagcgtgaccgccgtggtgttcgtggccttcggcaccagcgtgcccgacaccttcgccagcaaggccgccgccctgcaggacgtgtacgccgacgccagcatcggcaacgtgaccggcagcaacgccgtgaacgtgttcctgggcatcggcctggcctggagcgtggccgccatctactgggccctgcagggccaggagttccacgtgagcgccggcaccctggccttcagcgtgaccctgttcaccatcttcgccttcgtgtgcatcagcgtgctgctgtacagaagaagaccccacctgggcggcgagctgggcggccccagaggctgcaagctggccaccacctggctgttcgtgagcctgtggctgctgtacatcctgttcgccaccctggaggcctactgctacatcaagggcttctag

SEQ ID NO: 231014 - DNA, 2775 bp, Artificial Sequence
  derived and/or modified sequence
atggcatggctccgcttgcagcctctgactagcgccttcctccattttgggctcgttacgtttgtccttttcttaaatgggctgcgcgccgaggccggcgggtctggagacgttcccagcaccggccagaacaatgagagctgttccggctctagcgactgcaaggaaggcgttatcctccccatttggtaccccgaaaaccccagccttggcgataaaatcgcacgagtgatcgtgtacttcgtggccctcatctatatgtttctcggtgtcagcataatcgcggaccgtttcatggcttctattgaggtcattacctctcaggaacgagaagtaaccatcaaaaaaccaaacggcgaaacctctacgactaccatcagggtatggaacgagactgtcagcaacctgaccctgatggctttgggaagtagcgcccccgaaatactactcagcctgattgaggtctgtgggcatgggttcatcgccggcgatttgggccctagcacaatcgtgggttccgccgctttcaacatgttcatcattattggcatctgtgtctatgtaattccggacggggagaccaggaagataaagcacctgcgggtgttcttcattaccgcggcttggtccattttcgcttatatctggttgtacatgatactggcagtgttcagtccgggggtagtgcaggtctgggagggacttctcaccctttttttcttccccgtgtgcgtgctcctggcctgggtggcagacaaaagattacttttctataaatatatgcataagaaatatagaacggacaagcaccgcggcatcatcatcgagacagaaggcgaccaccctaaagggattgaaatggacggaaagatgatgaactcacattttttggatggcaacctggtccctctggaggggaaggaagtcgatgagtcacggcgcgagatgatcaggattctgaaagacctgaaacagaagcacccggaaaaggacttagatcagctggttgaaatggctaattattacgccctctctcaccaacagaagagtagggcattctaccgtattcaagctacacggatgatgaccggggccggaaatatactgaaaaagcacgctgctgagcaagcaaagaaggcatcaagcatgtccgaagtacatacggatgagcccgaggactttattagcaaggtgttttttgacccctgcagctaccagtgccttgagaactgcggcgcggtgctgcttacggtagtgcgcaaggggggcgatatgtcaaaaaccatgtacgtagattataagaccgaggacggttccgctaatgctggcgctgactacgaatttactgagggaactgtggtgctcaaacctggtgagacccagaaggagttctctgttgggatcattgacgacgacatttttgaggaagatgagcacttctttgtgcgcttgagtaatgtgcgtatcgaggaagaacagcccgaggagggcatgccacccgcaatctttaactctctgcccctacctcgggccgtattagcctcaccttgtgtggctacagtgaccatcctggacgatgatcatgctggtatattcacattcgagtgtgacactattcacgttagcgagtcaataggggtgatggaagtcaaggtcctcagaactagcggtgccaggggaactgtgatagtccccttccggactgttgaggggacggcgaagggaggtggggaagacttcgaagacacatacggggagctcgaattcaagaacgacgagaccgtaaaaacaatccgagtaaagattgtagatgaggaagagtatgaaaggcaggagaatttttttattgcactaggcgagcccaagtggatggagcgaggaatctcggccctactgctgtctcctgatcgaaaactgaccatggaggaagaggaagccaagagaatcgcagagatgggaaaaccagtgttaggcgagcatccaaaactcgaggtcatcatcgaagagagttacgagttcaaaacgacggtggacaagttgataaaaaagactaacctcgctctagtggttggaacacacagttggcgtgaccagttcatggaagcaatcacagtgtcagccgctggcgatgaggacgaggatgagagcggagaagagcggctgccaagctgctttgactacgtgatgcactttttgacagtattctggaaagtcctgttcgcctgtgtgcctccaaccgagtactgtcatggctgggcttgcttcgcagttagcatcttgatcattggcatgcttaccgccatcattggagacctggccagtcatttcggatgcacaattggcctcaaagattccgttaccgccgtcgtctttgtggcttttggcacatctgtgcccgacacctttgcaagtaaagccgcagccttgcaggacgtctacgccgacgcttccattggcaatgtgacaggctcaaacgctgtaaacgtttttctgggtattggcctggcttggagcgtcgcagctatttactgggcccttcagggccaggagttccacgtcagcgccggcacactggcctttagcgtgacactcttcacaattttcgcgtttgtgtgtatcagtgtcctcctataccgcaggcggcctcacttgggcggcgagctgggcgggccacgggggtgtaaattggccaccacatggctattcgttagcctgtggttgttgtacattctctttgccactttagaggcttattgctacataaaggggttttag

SEQ ID NO: 231015 - DNA, 2775 bp, Artificial Sequence
  derived and/or modified sequence
atggcctggctgcggctgcagcccctgaccagcgccttcctgcacttcggcctggtgacctttgtgctcttcctgaatggcctgcgggcagaggccggcggcagcggagatgtgcccagcacaggccagaacaatgaaagctgcagcggcagcagtgactgcaaggagggcgtcatcctgcccatctggtacccagagaaccccagcctgggggacaagatcgcccgggtcatcgtgtactttgtggccctgatctacatgttcctgggcgtgtccatcatcgctgaccgcttcatggccagcattgaggtgatcaccagccaggagcgggaggtgaccatcaagaagcccaacggggagaccagcaccaccaccatccgggtgtggaatgagaccgtgagcaacctgaccctgatggccctgggcagcagcgcccctgagatcctgctgagcctgattgaggtgtgtggccacggcttcatcgccggggacctgggccccagcaccatcgtgggcagcgctgccttcaacatgttcatcatcatcggcatctgtgtgtatgtgatcccagatggagagaccaggaagatcaagcacctgcgggtcttcttcatcacagctgcctggagcatctttgcctacatctggctgtacatgatcctggccgtgttcagccctggggtggtgcaggtgtgggagggcctgctgaccctcttcttcttccctgtgtgtgtgctgctggcctgggtggccgacaagaggctgctcttctacaagtacatgcacaagaagtacagaacagacaagcaccggggcatcatcattgaaacagaaggagaccaccccaagggcatcgagatggatggcaagatgatgaacagccacttcctggatggcaacctggtgcccctggagggcaaggaggtggatgagagcagaagagagatgatccgcatcctgaaggacctgaagcagaagcaccctgagaaggacctggaccagctggtggagatggccaactactatgccctgagccaccagcagaagagccgggccttctaccgcatccaggccaccaggatgatgactggagctggcaacatcctgaagaagcatgctgctgagcaggccaagaaggccagctccatgtctgaggtgcacacagatgagcctgaggacttcatcagcaaggtgttctttgacccctgcagctaccagtgcctggagaactgtggggctgtgctgctgactgtggtgaggaaaggaggagacatgagcaagaccatgtatgtggactacaagacagaagatggcagcgccaatgctggagctgactatgagttcacagagggcaccgtggtgctgaagccaggagagacccagaaggagttctctgtgggcatcattgatgatgacatctttgaggaggatgagcacttctttgtgcggctgagcaatgtgagaattgaggaggagcagcctgaggagggcatgcccccagccatcttcaacagcctgcccctgcccagggctgtgctggccagcccctgtgtggccaccgtgaccatcctggatgatgaccatgctggcatcttcacctttgaatgtgacaccatccacgtgtctgagagcattggagtgatggaggtgaaggtgctgcggaccagcggggcccggggcaccgtgattgtgcccttcagaacagtggagggcacagccaagggcggcggggaggactttgaggacacctacggggagctggagttcaagaatgatgagaccgtgaagaccatccgggtgaagatcgtggatgaggaggagtatgaaaggcaggagaacttcttcatcgccctgggggagcccaagtggatggagcggggcatcagcgccctgctgctgagcccagacaggaagctgaccatggaggaggaggaggccaagagaattgctgagatgggcaagcctgtgctgggggagcaccccaagctggaggtgatcatcgaggagagctatgagttcaagaccaccgtggacaagctgatcaagaagaccaacctggccctggtggtgggcacccacagctggagggaccagttcatggaggccatcaccgtgtctgctgctggagatgaagatgaagatgagagcggggaggagcggctgcccagctgctttgattatgtgatgcacttcctgactgtgttctggaaggtgctgtttgcctgtgtgcccccaacagagtactgccacggctgggcctgctttgctgtgtccatcctgatcatcggcatgctgacagccatcattggagacctggccagccacttcggctgcaccatcggcctgaaggacagcgtgacagctgtggtgtttgtggccttcggcacctctgtgcctgacacctttgccagcaaggctgctgccctgcaggatgtgtatgcagatgccagcattggaaatgtgacaggcagcaatgctgtgaatgtgttcctgggcatcggcctggcctggagcgtggccgccatctactgggccctgcagggccaggagttccacgtgtctgctggcaccctggccttctctgtgaccctcttcaccatctttgcctttgtgtgcatctctgtgctgctgtacagaagaagaccccacctgggcggggagctgggcggcccccggggctgcaagctggccaccacctggctgtttgtgtccctgtggctgctgtacatcctgtttgccaccctggaggcctactgctacatcaagggcttctag

SEQ ID NO: 231016 - DNA, 2775 bp, Artificial Sequence
  derived and/or modified sequence
atggcctggctgcggctgcagcccctgaccagcgccttcctgcactttggactggttaccttcgtattgttcctgaacggactcagggctgaggctggagggagcggagacgtgcctagcactgggcagaacaacgaaagttgcagcggatcttccgattgcaaggagggggtcatcctaccgatttggtatccggagaacccttctctgggggacaagatagctagggtgatcgtgtacttcgtggccctcatctacatgttccttggcgtctcaatcatagccgaccggttcatggctagcattgaggtgatcacctcacaagagcgtgaagttactattaagaaacccaacggcgagaccagtacgacgaccatcagggtgtggaatgaaacagtctccaacttgactctcatggcccttgggtctagcgctcccgaaatcctgctgtccttgatcgaagtgtgcggacatggattcattgcaggcgatctgggcccgagcaccatcgttgggagtgccgcctttaacatgtttatcattattggaatttgcgtgtacgtgatcccagacggcgaaactcgaaagataaagcacctgcgcgttttcttcattacagccgcgtggtcaattttcgcatacatttggctctatatgattctagcagtttttagtcctggcgttgtgcaagtttgggaaggactgctgacactgtttttctttcccgtatgtgtcctactggcctgggtggctgataagcgtctgctcttttacaagtacatgcataaaaagtatcgaaccgataaacaccggggtattatcatagagacagagggggatcatccgaagggaatcgagatggatggtaaaatgatgaactcccattttttggacggaaatctggtgcctttagaagggaaggaagttgatgagagtagacgcgaaatgatcaggatcctcaaagacctgaagcagaagcatcctgagaaggatctagatcaactggtggaaatggcgaactactatgctttgagtcaccaacagaaaagccgtgctttctaccgaatacaggcgaccaggatgatgaccggggcgggcaacatactgaagaagcatgcggctgaacaggccaagaaagcgtctagtatgtcagaagtgcatactgatgaaccagaggatttcatttcaaaagtgttttttgatccctgcagctatcagtgtctggagaactgcggagccgtgttgctgaccgttgtgagaaagggaggggatatgagtaaaacaatgtatgtggattataagaccgaagacggaagtgcgaacgccggcgctgactatgaattcaccgaggggacagtcgtcctgaagccaggtgagacgcagaaggaattcagcgtggggattattgacgacgatatcttcgaagaagacgagcatttttttgtcagactgtccaacgtgaggatcgaagaagaacagccagaggagggcatgcctcccgccattttcaactccctcccactgcctcgcgctgtcctggctagtccttgtgtagcaactgtgaccatcctcgacgatgaccacgcggggatctttacttttgagtgtgataccatccacgtgtcggaatcaatcggagtcatggaagtcaaggtgctgcgcacttccggggcccgcggaactgtcattgtgccttttaggaccgtggagggtaccgccaaaggcggcggcgaagacttcgaggatacctacggcgaattggagttcaagaacgatgaaaccgtgaaaaccattagggtgaagatcgtggacgaagaggagtatgagagacaggagaacttcttcatagctttgggagagccaaagtggatggagagaggcatatcagccctgctgttgagtcccgaccggaagttgacaatggaagaagaggaagctaaacgcattgctgaaatggggaagccagtcctgggtgagcacccaaaactggaggtgatcatcgaggaaagttatgaattcaagactactgtagataaactgatcaagaaaactaatctcgcgctggtggtcgggacccactcatggcgcgaccagttcatggaggcaatcacagtatctgctgccggcgatgaagacgaagatgagagtggggaggaaaggctcccttcatgtttcgattacgtgatgcactttcttactgttttctggaaggtgcttttcgcatgtgtaccccccactgagtactgccacgggtgggcatgcttcgcagttagcatcctgataattggcatgttgaccgccattataggagacctggcttcgcatttcgggtgcactattgggctgaaggattcagtgaccgcagttgtcttcgtggcatttggaacttctgttcccgataccttcgcttccaaggcagccgctttgcaagacgtctatgccgatgcttccattgggaacgtgacaggatcaaacgctgtgaatgtctttcttggcatcggcctcgcttggtctgtagctgcaatttactgggccctccaaggccaggagtttcacgtgtccgcaggcactctagcattctcagtgacactctttacaatattcgccttcgtctgcatttccgtgctgctctataggcgcagaccacacctggggggcgaactagggggcccacgcgggtgtaaactggctacaacgtggctctttgtttctctgtggttgctgtacatcctcttcgctaccctggaggcgtactgctatatcaagggattctag

SEQ ID NO: 231017 - DNA, 2775 bp, Artificial Sequence
  derived and/or modified sequence
atggcatggctgagactgcaacctttgactagcgcttttctacatttcgggctggtgacttttgtcctctttctcaatggcctgagagccgaagccggagggtccggcgacgtgccatccaccggtcagaataatgagtcctgctcagggagctctgattgcaaggagggcgtaatccttccgatctggtacccagagaacccctcccttggggataagattgcccgtgtgatagtgtatttcgtggcgctcatctacatgtttctgggagtgtctatcatagctgatcggtttatggctagcatcgaagtgataactagccaggagagagaggtgacaattaagaaacccaacggcgagacaagcactacaactattcgcgtgtggaacgaaacagtctctaatctgacccttatggcactggggagcagcgccccagaaatcctgctctccttgatcgaagtttgcggacatggctttattgcaggcgacctcggaccctctactatagtaggttccgctgccttcaacatgttcatcattatcggtatatgtgtgtatgtgattcctgatggagagacccgaaaaatcaagcatctcagggtattctttatcacagccgcatggagcatattcgcatatatctggctttacatgatcctggcagtattcagccccggagtagtccaagtttgggaaggactcttgactcttttcttctttcccgtatgcgtgcttctggcctgggtggccgataaaaggctgctcttctacaagtacatgcataaaaagtatcgcaccgataagcacaggggaataattatcgaaacagaaggcgaccatccgaaaggcatcgagatggatgggaagatgatgaatagtcactttttggatggcaatttggtccctctggagggaaaggaagtggatgaaagcagacgcgagatgatcagaatcctgaaggacctcaaacagaaacaccctgaaaaggatcttgatcaactggtggaaatggcgaattattacgccctgtctcaccagcagaagtctcgcgcattctacagaatccaagctacaagaatgatgaccggggcaggcaatatcttgaagaaacacgcagcagagcaggccaagaaggcttccagcatgagcgaggtgcatactgatgagcctgaagatttcattagcaaagtgttttttgatccctgctcataccagtgccttgaaaactgtggtgcggtattactgaccgtcgtgagaaaagggggagatatgtccaaaaccatgtatgtggactacaagaccgaggacggctcggcaaatgcaggagctgattacgagttcaccgaggggacagtggtcctgaaaccaggagagacccagaaagagttttcagtggggatcattgatgatgacatttttgaggaagacgaacacttcttcgtgaggctgagtaacgtgcgcatcgaagaggagcagcctgaggaggggatgccccctgcaatattcaattcccttcctcttcctagagccgttctggcgtcaccctgcgtagccacagtgaccatactcgatgatgatcacgcgggaatcttcacattcgaatgcgacacaattcatgtgtcagaatctatcggcgtcatggaggtgaaagtgttgcggacatcgggggctcgaggcactgtaattgtgcccttccgtacagtggaggggaccgcgaaaggaggcggagaggacttcgaggacacttatggggaattagaatttaaaaacgacgagaccgtgaagaccataagggtgaaaattgtcgatgaagaagaatatgagcgccaagaaaacttctttattgcccttggggagccaaagtggatggagcgcggtatctccgcccttctgctgagcccagatagaaagctgaccatggaggaggaagaagccaagaggattgctgagatgggtaagcctgtcctgggtgaacaccccaagctggaggttataatcgaagaatcctacgagtttaaaaccaccgtcgataaactcatcaagaaaaccaatcttgctctggttgtcgggacccatagttggagggaccagtttatggaagcaatcacagtgagtgccgcaggcgatgaggatgaagacgaatcaggagaagagagactgccctcttgtttcgactatgttatgcactttttgactgtcttctggaaggtgctgttcgcctgtgtccccccaacagagtattgtcatggatgggcatgtttcgctgtcagcattcttattatcggaatgctgaccgcaattatcggagatctggcgagccattttggctgtacaatcggattgaaggatagcgtgactgccgtggtgtttgtggcatttgggacgagtgttccagacacatttgcctccaaagcagccgctttgcaggacgtttatgccgatgcatcaatcggcaacgtaacggggtcaaatgctgttaacgtgtttttagggatcggcctggcctggtctgtggcagctatttactgggcactgcagggccaggagtttcatgtgtccgccggtacactcgccttctcggtgacactcttcactatcttcgctttcgtgtgtatttctgtgcttttgtaccggagaagaccacatcttgggggagaactgggaggccctaggggatgcaaactcgccactacctggttattcgtcagcctgtggctgctgtacatcctcttcgctacgctcgaggcctactgctatatcaaaggattctag

SEQ ID NO: 231018 - DNA, 2837 bp, Artificial Sequence
  derived and/or modified sequence
gtctctggcctatcaggaggacaactggtgctgcaatagaagccagtggctaagtctcgtgtatggcgtggttaaggttgcagcctctcacctctgccttcctccattttgggctggttacctttgtgctcttcctgaatggtcttcgagcagaggctggtggctcaggggacgtgccaagcacagggcagaacaatgagtcctgttcagggtcatcggactgcaaggagggtgtcatcctgccaatctggtacccggagaacccttcccttggggacaagattgccagggtcattgtctattttgtggccctgatatacatgttccttggggtgtccatcattgctgaccgcttcatggcatctattgaagtcatcacctctcaagagagggaggtgacaattaagaaacccaatggagaaaccagcacaaccactattcgggtctggaatgaaactgtctccaacctgacccttatggccctgggttcctctgctcctgagatactcctctctttaattgaggtgtgtggtcatgggttcattgctggtgatctgggaccttctaccattgtagggagtgcagccttcaacatgttcatcatcattggcatctgtgtctacgtgatcccagacggagagactcgcaagatcaagcatctacgagtcttcttcatcaccgctgcttggagtatctttgcctacatctggctctatatgattctggcagtcttctcccctggtgtggtccaggtttgggaaggcctcctcactctcttcttctttccagtgtgtgtccttctggcctgggtggcagataaacgactgctcttctacaaatacatgcacaaaaagtaccgcacagacaaacaccgaggaattatcatagagacagagggtgaccaccctaagggcattgagatggatgggaaaatgatgaattcccattttctagatgggaacctggtgcccctggaagggaaggaagtggatgagtcccgcagagagatgatccggattctcaaggatctgaagcaaaaacacccagagaaggacttagatcagctggtggagatggccaattactatgctctttcccaccaacagaagagccgtgccttctaccgtatccaagccactcgtatgatgactggtgcaggcaatatcctgaagaaacatgcagcagaacaagccaagaaggcctccagcatgagcgaggtgcacaccgatgagcctgaggactttatttccaaggtcttctttgacccatgttcttaccagtgcctggagaactgtggggctgtactcctgacagtggtgaggaaagggggagacatgtcaaagaccatgtatgtggactacaaaacagaggatggttctgccaatgcaggggctgactatgagttcacagagggcacggtggttctgaagccaggagagacccagaaggagttctccgtgggcataattgatgacgacatttttgaggaggatgaacacttctttgtaaggttgagcaatgtccgcatagaggaggagcagccagaggaggggatgcctccagcaatattcaacagtcttcccttgcctcgggctgtcctagcctccccttgtgtggccacagttaccatcttggatgatgaccatgcaggcatcttcacttttgaatgtgatactattcatgtcagtgagagtattggtgttatggaggtcaaggttctgcggacatcaggtgcccggggtacagtcatcgtcccctttaggacagtagaagggacagccaagggtggcggtgaggactttgaagacacatatggggagttggaattcaagaatgatgaaactgtgaaaaccataagggttaaaatagtagatgaggaggaatacgaaaggcaagagaatttcttcattgcccttggtgaaccgaaatggatggaacgtggaatatcagcgctcctgttatctccagacaggaagctgactatggaagaagaggaggccaagaggatagcagagatgggaaagccagtattgggtgaacaccccaaactagaagtcatcattgaagagtcctatgagttcaagactacggtggacaaactgatcaagaagacaaacctggccttggttgtggggacccattcctggagggaccagttcatggaggccatcaccgtcagtgcagcaggggatgaggatgaggatgaatccggggaggagaggctgccctcctgctttgactacgtcatgcacttcctgactgtcttctggaaggtgctgtttgcctgtgtgccccccacagagtactgccacggctgggcctgcttcgccgtctccatcctcatcattggcatgctcaccgccatcattggggacctggcctcgcacttcggctgcaccattggtctcaaagattcagtcacagctgttgttttcgtggcatttggcacctctgtcccagatacgtttgccagcaaagctgctgccctccaggatgtatatgcagacgcctccattggcaacgtgacgggcagcaacgccgtcaatgtcttcctgggcatcggcctggcctggtccgtggccgccatctactgggctctgcagggacaggagttccacgtgtcggccggcacactggccttctccgtcaccctcttcaccatctttgcatttgtctgcatcagcgtgctcttgtaccgaaggcggccgcacctgggaggggagcttggtggcccccgtggctgcaagctcgccacaacatggctctttgtgagcctgtggctcctctacatactctttgccacactagaggcctattgctacatcaaggggttctaa

SEQ ID NO: 231019 - protein, 351 aa, Artificial Sequence
  derived and/or modified sequence
MGNLFMLWAALGICCAAFSASAWSVNNFLITGPKAYLTYTTSVALGAQSGIEECKFQFAWERWNCPENALQLSTHNRLRSATRETSFIHAISSAGVMYIITKNCSMGDFENCGCDGSNNGKTGGHGWIWGGCSDNVEFGERISKLFVDSLEKGKDARALMNLHNNRAGRLAVRATMKRTCKCHGISGSCSIQTCWLQLAEFREMGDYLKAKYDQALKIEMDKRQLRAGNSAEGHWVPAEAFLPSAEAELIFLEESPDYCTCNSSLGIYGTEGRECLQNSHNTSRWERRSCGRLCTECGLQVEERKTEVISSCNCKFQWCCTVKCDQCRHVVSKYYCARSPGSAQSLGKGSA

SEQ ID NO: 231020 - DNA, 1498 bp, Artificial Sequence
  derived and/or modified sequence
gggcgatggggaacctgtttatgctctgggcagctctgggcatatgctgtgctgcattcagtgcctctgcctggtcagtgaacaatttcctgataacaggtcccaaggcctatctgacctacacgactagtgtggccttgggtgcccagagtggcatcgaggagtgcaagttccagtttgcttgggaacgctggaactgccctgaaaatgctcttcagctctccacccacaacaggctgagaagtgctaccagagagacttccttcatacatgctatcagctctgctggagtcatgtacatcatcaccaagaactgtagcatgggtgacttcgaaaactgtggctgtgatgggtcaaacaatggaaaaacaggaggccatggctggatctggggaggctgcagcgacaatgtggaatttggggaaaggatctccaaactctttgtggacagtttggagaaggggaaggatgccagagccctgatgaatcttcacaacaacagggccggcagactggcagtgagagccaccatgaaaaggacatgcaaatgtcatggcatctctgggagctgcagcatacagacatgctggctgcagctggctgaattccgggagatgggagactacctaaaggccaagtatgaccaggcgctgaaaattgaaatggataagcggcagctgagagctgggaacagcgccgagggccactgggtgcccgctgaggccttccttcctagcgcagaggcggaactgatctttttagaggaatcaccagattactgtacctgcaattccagcctgggcatctatggcacagagggtcgtgagtgcctacagaacagccacaacacatccaggtgggagcgacgtagctgtgggcgcctgtgcactgagtgtgggctgcaggtggaagagaggaaaactgaggtcataagcagctgtaactgcaaattccagtggtgctgtacggtcaagtgtgaccagtgtaggcatgtggtgagcaagtattactgcgcacgctccccaggcagtgcccagtccctgggtaagggcagtgcctgataataccccacacaagttcacttgattaattgcatcagtggaaggggacatagcttctctcttagagagaacagattggaaagcaatcggaaaattgcagttttggtctgtagtcctcatgatatctgctatcagtggggaaaatggaggcccaagattctacagcatattcctggcggggctgaaattggaacctgggcctcctgactttggcagacccccatttcatctttcctgcaaactactttcccatctttgtgcctgtacttatgcagctttctacagggagagtttggtttggggtctatatctagagggaccttcaaagtatttgttcctttaaatttcagaccatgtccaacccagctgtgctgctgggaatcaggagaatagaagcaaaaaacgaaagagttctgttcagacttctgaagagcagc

SEQ ID NO: 231021 - DNA, 1056 bp, Artificial Sequence
  derived and/or modified sequence
atgggtaatttgttcatgttgtgggctgccctgggaatttgttgtgcagcatttagcgccagcgcatggtctgtgaacaacttcctgattacagggccaaaggcctaccttacttacacaacctcagtcgcacttggagcccaaagcggaatcgaagagtgcaagtttcagtttgcttgggagcggtggaattgtccagagaatgctttgcagctgagcactcataatagacttcgcagcgctacacgggaaacctcttttattcacgccatttcatcggctggcgtgatgtatattattacaaaaaattgtagcatgggagacttcgaaaactgcggctgcgatggttcgaacaatgggaagacagggggacacgggtggatttggggcggatgcagtgataatgtagagttcggcgaaaggatctccaagctcttcgtcgattctcttgagaaaggaaaagatgccagggcgcttatgaatctacataacaatagggcaggacggctggccgttagggccaccatgaaaaggacttgcaagtgccacggaatctcaggtagctgtagtattcagacctgttggctgcagttagcagaatttcgcgagatgggagactacttgaaagctaagtatgatcaggctcttaagatagagatggacaaaagacagctgcgcgcaggaaacagcgcggaagggcattgggtccccgcagaagcctttctgccctccgctgaagctgagttaatttttcttgaggagagcccagactactgtacatgtaactcatctcttggcatttacggaacagaaggtcgcgagtgcctccaaaactcccataatacaagcagatgggagcgccgatcatgcggacgcctttgcaccgaatgtgggctccaggttgaggagagaaagaccgaagtcatttcatcctgcaactgtaaattccaatggtgttgtactgtgaaatgtgaccaatgccgccatgtcgtcagtaaatactactgcgctaggagccctggctcagcgcagtccttgggaaagggaagcgcttag

SEQ ID NO: 231022 - DNA, 1056 bp, Artificial Sequence
  derived and/or modified sequence
atgggaaatctgtttatgctttgggcagcactcggtatctgctgcgctgctttttctgcatccgcatggagtgtgaacaacttcctcattactggtcctaaagcttatctcacatacaccactagtgtggccctgggagcccaatcaggaatcgaggagtgtaaattccagtttgcctgggagcgctggaactgtcccgaaaacgccctgcagctgagtacacataataggttaaggtccgcaaccagagagacaagctttattcacgcaatatcttctgccggcgtgatgtacatcatcactaagaattgctccatgggcgacttcgagaattgcggctgcgatggctctaacaacggcaagacgggaggccacggctggatttgggggggctgttctgacaacgttgagttcggggagcgcatttcaaaactgttcgtcgatagcttagagaagggtaaggacgcacgcgctctgatgaacctccataacaatagagccggcagactggccgtgagggccactatgaaaagaacatgcaaatgccatggaataagtgggtcatgttctattcagacttgttggctccagttggcagagttccgcgaaatgggagactatctgaaggccaaatacgatcaagctctgaagattgagatggacaaacgtcagctgagagctggaaattctgccgaaggtcactgggttcccgctgaggcttttctcccgtcggcagaagcagagctgatcttcttggaagaatcccctgactactgcacatgcaactcatcgctcggcatctacgggactgaaggtcgggagtgcttgcagaacagccataatacctcaagatgggagcggagaagttgcggacgcttgtgtacggaatgtggactgcaagtggaggaacgaaaaactgaagttatatcgtcctgtaattgcaaatttcaatggtgttgcaccgtgaaatgtgatcaatgtcgccacgtcgtgtcaaaatactactgtgctcgttcacccgggtcagctcagtctctcggaaagggtagtgcctag

SEQ ID NO: 231023 - DNA, 1056 bp, Artificial Sequence
  derived and/or modified sequence
atggggaatctgttcatgttatgggctgccctggggatctgctgtgctgcttttagtgcatcggcttggagtgttaacaatttcctgattaccggcccaaaggcgtatcttacttatacgacatcagtggccctgggtgcacagagtgggatcgaagagtgtaagtttcagtttgcatgggaacgctggaattgccccgaaaacgccttacagctgtccacacataataggctgagaagcgccacccgcgaaacctccttcatacatgccatttcttcggcaggagtcatgtacatcattacgaagaattgttcaatgggggatttcgaaaactgtggatgcgatggatctaacaatgggaagaccggtggtcacgggtggatttggggtggatgttccgacaacgtcgagttcggagaacggatctccaagctgttcgtcgattccttggagaagggcaaagacgcacgtgccttaatgaacttgcataacaaccgagccggcaggctagcagtgagggcgactatgaagcgaacctgtaaatgtcacggaatcagcgggagctgtagcatacagacgtgttggctccagctggccgagttcagggaaatgggagattacttgaaagctaaatacgaccaggcccttaaaatcgagatggacaaacgacagctgcgcgctggcaattctgctgagggccactgggtaccagctgaggcattcttaccatccgccgaagccgaattgatctttcttgaggaatctccagattactgtacgtgcaactcttccctcggtatttacggaaccgagggccgcgagtgcttgcagaattctcataatacatccagatgggagaggcgtagttgcggcagattgtgcaccgaatgtggccttcaggttgaggaaagaaaaactgaagtgattagctcctgcaattgtaaatttcaatggtgttgtacagttaaatgtgaccaatgtagacacgtcgtgtctaagtattactgcgctcggagtccgggaagcgcccaaagtctcgggaaaggttccgcttag

SEQ ID NO: 231024 - DNA, 1056 bp, Artificial Sequence
  derived and/or modified sequence
atgggcaacctgttcatgctgtgggccgccctgggcatctgctgcgccgccttcagcgccagcgcctggagcgtgaacaacttcctgatcaccggccccaaggcctacctgacctacaccaccagcgtggccctgggcgcccagagcggcatcgaggagtgcaagttccagttcgcctgggagagatggaactgccccgagaacgccctgcagctgagcacccacaacagactgagaagcgccaccagagagaccagcttcatccacgccatcagcagcgccggcgtgatgtacatcatcaccaagaactgcagcatgggcgacttcgagaactgcggctgcgacggcagcaacaacggcaagaccggcggccacggctggatctggggcggctgcagcgacaacgtggagttcggcgagagaatcagcaagctgttcgtggacagcctggagaagggcaaggacgccagagccctgatgaacctgcacaacaacagagccggcagactggccgtgagagccaccatgaagagaacctgcaagtgccacggcatcagcggcagctgcagcatccagacctgctggctgcagctggccgagttcagagagatgggcgactacctgaaggccaagtacgaccaggccctgaagatcgagatggacaagagacagctgagagccggcaacagcgccgagggccactgggtgcccgccgaggccttcctgcccagcgccgaggccgagctgatcttcctggaggagagccccgactactgcacctgcaacagcagcctgggcatctacggcaccgagggcagagagtgcctgcagaacagccacaacaccagcagatgggagagaagaagctgcggcagactgtgcaccgagtgcggcctgcaggtggaggagagaaagaccgaggtgatcagcagctgcaactgcaagttccagtggtgctgcaccgtgaagtgcgaccagtgcagacacgtggtgagcaagtactactgcgccagaagccccggcagcgcccagagcctgggcaagggcagcgcctag

SEQ ID NO: 231025 - DNA, 1056 bp, Artificial Sequence
  derived and/or modified sequence
atggggaatctgttcatgctatgggcagccctggggatctgttgtgctgcattttctgcgtcggcatggagcgtcaataactttttaataaccggccccaaagcctacctgacctacactacctcagtcgcgctcggggcccaatccggaatcgaagaatgtaagtttcagtttgcttgggaaagatggaattgcccggaaaatgccctgcagctttcgacacataaccggctcagatcggcaacacgcgaaacctcctttatacatgccataagctccgcaggcgtgatgtatatcattaccaaaaattgtagcatgggcgacttcgagaattgtggctgcgacggttccaataacggcaagacgggcggtcatggatggatttggggaggctgctctgacaatgtcgaatttggggagcgcattagtaagctgttcgtcgactcactcgagaagggcaaagatgcaagagctctgatgaacctccacaacaaccgtgccggccgtttagccgtgagagctacaatgaagcgcacctgtaagtgccatggcatttcaggctcctgttctatacagacatgctggttgcagctggcagaatttcgtgaaatgggagactaccttaaagcgaagtatgaccaggccctgaaaatcgaaatggataagcggcagctcagggctggtaactcagcggagggacattgggtccccgccgaagcgttcctcccttccgccgaagcagagctcatctttctcgaggagtcgcccgattattgtacctgcaattctagcctgggaatatatggtaccgaggggcgcgaatgtctacagaatagtcacaataccagtaggtgggagaggaggtcttgcggacggttgtgcaccgagtgcggcctccaggtggaagaaaggaagactgaagtgatctccagctgcaattgtaagtttcagtggtgttgcactgtgaagtgcgatcagtgtcggcatgtggtctccaaatattattgcgcccggtcccccggctcagcacagagcttggggaaggggtctgcctag

SEQ ID NO: 231026 - DNA, 1056 bp, Artificial Sequence
  derived and/or modified sequence
atgggcaacctcttcatgctgtgggccgccctgggcatctgctgtgccgccttcagcgccagcgcctggagcgtgaacaacttcctgatcaccggccccaaggcctacctgacctacaccacctctgtggccctgggcgcccagagcggcatcgaggagtgcaagttccagtttgcctgggagcgctggaactgcccagaaaatgccctgcagctgagcacccacaaccggctgcggagcgccacccgggagaccagcttcatccacgccatcagcagcgctggggtgatgtacatcatcaccaagaactgcagcatgggagactttgagaactgtggctgtgatggcagcaacaacgggaagacaggaggccacggctggatctggggcggctgcagcgacaacgtggagtttggagagcgcatcagcaagctgtttgtggacagcctggagaagggcaaggatgcccgggccctgatgaacctgcacaacaacagagctggccgcctggccgtgcgggccaccatgaagaggacctgcaagtgccacggcatcagcggcagctgcagcatccagacctgctggctgcagctggccgagttccgggagatgggagactacctgaaggccaagtatgaccaggccctgaagattgagatggacaagaggcagctgcgggccggcaacagcgctgagggccactgggtgcctgctgaggccttcctgcccagcgctgaggccgagctgatcttcctggaggagagcccagactactgcacctgcaacagcagcctgggcatctacggcacagagggccgggagtgcctgcagaacagccacaacaccagccgctgggagaggaggagctgtggccgcctgtgcacagaatgtggcctgcaggtggaggagaggaagacagaggtgatcagcagctgcaactgcaagttccagtggtgctgcaccgtgaagtgtgaccagtgcagacatgtggtgtccaagtactactgtgcccggagccctggcagcgcccagagcctgggcaagggcagcgcctag

SEQ ID NO: 231027 - DNA, 1056 bp, Artificial Sequence
  derived and/or modified sequence
atgggcaacctgttcatgctgtgggccgccctgggcatctgctgcgccgccttctccgccagtgcatggagcgttaacaactttctaatcacaggaccaaaagcatacctgacttatacaactagcgtcgcgttaggcgctcagtctggaatcgaggagtgcaaattccagttcgcgtgggagcgttggaactgccccgaaaacgccctgcagctgtctacacataacagactgcgctcagccacccgtgagacctcatttatacacgccattagttccgcaggcgtcatgtatataattactaagaactgttcaatgggggattttgagaattgtgggtgtgatggaagcaacaacggaaaaactgggggtcacggatggatctggggtggatgttctgacaacgttgaattcggcgaaaggatctctaagctgttcgttgacagtttggaaaaaggaaaagacgccagagctctaatgaacttgcataataacagagccggtcgcctcgccgtgcgagccacgatgaagcgaacctgcaagtgtcatggtatctccgggagctgcagcattcaaacttgttggctccagctcgccgaattccgggagatgggtgactacctgaaagctaaatatgaccaggcgctcaagatcgaaatggacaaacgtcagctgagagctggaaactctgctgaaggacattgggtgcccgctgaagctttcctgccttctgccgaggccgagctgatctttctggaggagtcccccgactattgtacatgcaattcgtctctggggatttacggaaccgaaggacgcgagtgcctccagaactcccacaacacaagtaggtgggaacgccggagctgcggacggttgtgtacggaatgtggcctacaggtcgaggagcgtaagaccgaggttatcagcagttgcaactgcaaattccagtggtgctgtacggttaagtgcgaccagtgtagacacgttgtgtccaaatactattgtgcccgcagtcctggcagcgcccagtccttagggaaaggatccgcttag

SEQ ID NO: 231028 - DNA, 228 bp, Artificial Sequence
  derived and/or modified sequence
atgacacacgataagagctggcgcaggtgttcaatcagcggttccacaaaatgcagatgtgggagcaggatcgccggtcccaacgccctgggctccggaggttctcgctcatcatcctcaagctcacggagtatattaagtagtagcattctgtcctctagcataccgagtagttctagctcaagctcatccccgtccagttcccctagcagctctagccccagctag

SEQ ID NO: 231029 - RNA, 1056 nt, Artificial Sequence
  derived and/or modified sequence
augggaaaucuguuuaugcuuugggcagcacucgguaucugcugcgcugcuuuuucugcauccgcauggagugugaacaacuuccucauuacugguccuaaagcuuaucucacauacaccacuaguguggcccugggagcccaaucaggaaucgaggaguguaaauuccaguuugccugggagcgcuggaacugucccgaaaacgcccugcagcugaguacacauaauagguuaagguccgcaaccagagagacaagcuuuauucacgcaauaucuucugccggcgugauguacaucaucacuaagaauugcuccaugggcgacuucgagaauugcggcugcgauggcucuaacaacggcaagacgggaggccacggcuggauuugggggggcuguucugacaacguugaguucggggagcgcauuucaaaacuguucgucgauagcuuagagaaggguaaggacgcacgcgcucugaugaaccuccauaacaauagagccggcagacuggccgugagggccacuaugaaaagaacaugcaaaugccauggaauaagugggucauguucuauucagacuuguuggcuccaguuggcagaguuccgcgaaaugggagacuaucugaaggccaaauacgaucaagcucugaagauugagauggacaaacgucagcugagagcuggaaauucugccgaaggucacuggguucccgcugaggcuuuucucccgucggcagaagcagagcugaucuucuuggaagaauccccugacuacugcacaugcaacucaucgcucggcaucuacgggacugaaggucgggagugcuugcagaacagccauaauaccucaagaugggagcggagaaguugcggacgcuuguguacggaauguggacugcaaguggaggaacgaaaaacugaaguuauaucguccuguaauugcaaauuucaaugguguugcaccgugaaaugugaucaaugucgccacgucgugucaaaauacuacugugcucguucacccgggucagcucagucucucggaaaggguagugccuag

SEQ ID NO: 231030 - RNA, 1056 nt, Artificial Sequence
  derived and/or modified sequence
auggggaaucuguucauguuaugggcugcccuggggaucugcugugcugcuuuuagugcaucggcuuggaguguuaacaauuuccugauuaccggcccaaaggcguaucuuacuuauacgacaucaguggcccugggugcacagagugggaucgaagaguguaaguuucaguuugcaugggaacgcuggaauugccccgaaaacgccuuacagcuguccacacauaauaggcugagaagcgccacccgcgaaaccuccuucauacaugccauuucuucggcaggagucauguacaucauuacgaagaauuguucaaugggggauuucgaaaacuguggaugcgauggaucuaacaaugggaagaccgguggucacggguggauuugggguggauguuccgacaacgucgaguucggagaacggaucuccaagcuguucgucgauuccuuggagaagggcaaagacgcacgugccuuaaugaacuugcauaacaaccgagccggcaggcuagcagugagggcgacuaugaagcgaaccuguaaaugucacggaaucagcgggagcuguagcauacagacguguuggcuccagcuggccgaguucagggaaaugggagauuacuugaaagcuaaauacgaccaggcccuuaaaaucgagauggacaaacgacagcugcgcgcuggcaauucugcugagggccacuggguaccagcugaggcauucuuaccauccgccgaagccgaauugaucuuucuugaggaaucuccagauuacuguacgugcaacucuucccucgguauuuacggaaccgagggccgcgagugcuugcagaauucucauaauacauccagaugggagaggcguaguugcggcagauugugcaccgaauguggccuucagguugaggaaagaaaaacugaagugauuagcuccugcaauuguaaauuucaaugguguuguacaguuaaaugugaccaauguagacacgucgugucuaaguauuacugcgcucggaguccgggaagcgcccaaagucucgggaaagguuccgcuuag

SEQ ID NO: 231031 - protein, 326 aa, Artificial Sequence
  derived and/or modified sequence
MVDYYEVLGVQRHASPEDIKKAYRKLALKWHPDKNPENKEEAERKFKQVAEAYEVLSDAKKRDIYDKYGKEGLNGGGGGGSHFDSPFEFGFTFRNPDDVFREFFGGRDPFSFDFFEDPFEDFFGNRRGPRGSRSRGTGSFFSAFSGFPSFGSGFSSFDTGFTSFGSLGHGGLTSFSSTSFGGSGMGNFKSISTSTKMVNGRKITTKRIVENGQERVEVEEDGQLKSLTINGVADDDALAEERMRRGQNALPAQPAGLRPPKPPRPASLLRHAPHCLSEEEGEQDRPRAPGPWDPLASAAGLKEGGKRKKQKQREESKKKKSTKGNH

SEQ ID NO: 231032 - protein, 277 aa, Artificial Sequence
  derived and/or modified sequence
MPHPRILKRPKKRDIYDKYGKEGLNGGGGGGSHFDSPFEFGFTFRNPDDVFREFFGGRDPFSFDFFEDPFEDFFGNRRGPRGSRSRGTGSFFSAFSGFPSFGSGFSSFDTGFTSFGSLGHGGLTSFSSTSFGGSGMGNFKSISTSTKMVNGRKITTKRIVENGQERVEVEEDGQLKSLTINGVADDDALAEERMRRGQNALPAQPAGLRPPKPPRPASLLRHAPHCLSEEEGEQDRPRAPGPWDPLASAAGLKEGGKRKKQKQREESKKKKSTKGNH

SEQ ID NO: 231033 - DNA, 834 bp, Artificial Sequence
  derived and/or modified sequence
atgccacacccccgcattctcaaacggccaaagaagagggacatctacgataagtatggcaaggagggacttaacggagggggggggggtggcagccatttcgactccccattcgaattcggatttacttttagaaatccagatgacgtgttccgagagttctttggagggcgggaccctttctcgtttgatttcttcgaggacccattcgaagatttcttcggaaaccggcgcggcccccggggatcccggtccagaggcacagggtccttcttctccgcgttttctggtttccctagttttggctccggtttctctagcttcgacactggcttcacctcatttggctccctgggccatggcggactgacctcttttagctccaccagtttcggcggaagcgggatgggtaatttcaaaagcatcagtacctctacaaagatggtcaacggaaggaaaatcaccaccaagcgcatagtagaaaacggacaggagcgggtggaggtggaggaagacggtcagctgaaaagcctcaccatcaatggagtggccgatgacgacgctctcgcggaagagcggatgcgacgcgggcagaacgccctaccagcacagccggccggattaaggccgcctaaacccccaagacccgcctctctcctccgtcacgctccacattgcttgagcgaggaagagggcgaacaggatagaccaagagcacccggaccatgggatccgctcgccagtgctgccggcctgaaagagggcggaaaaaggaagaagcagaagcagcgggaggaatcaaagaagaagaaatctaccaaaggaaaccactag

SEQ ID NO: 231034 - DNA, 834 bp, Artificial Sequence
  derived and/or modified sequence
atgccccacccccgcatcctgaagaggcccaagaagagggacatctatgacaagtatggcaaggagggcctgaatggaggcggcggcggcggcagccactttgacagcccctttgaatttggcttcaccttcagaaatccagatgatgtgttccgggagttctttggaggccgggaccccttctcctttgacttctttgaggacccctttgaggacttcttcggcaacagaagaggcccccggggcagccgcagccggggcaccggcagcttcttcagcgccttcagcggcttccccagctttggaagtggcttcagcagctttgacaccggcttcaccagctttggcagcctgggccacggcggcctgaccagcttcagcagcaccagctttggaggcagcggcatgggcaacttcaagagcatcagcaccagcaccaagatggtgaatggaaggaagatcaccaccaagagaattgtggagaatggccaggagcgggtggaggtggaggaggatggccagctgaagagcctgaccatcaatggagtggctgatgatgatgccctggccgaggagaggatgagaagaggccagaatgccctgcctgcccagcctgctggcctgcggccccccaagccacccaggcctgccagcctgctgcggcatgccccccactgcctgtctgaggaggagggggagcaggaccggccccgggcccctggcccctgggaccccctggccagcgctgctggcctgaaggagggcggcaagaggaagaagcagaagcagcgggaggagagcaagaagaagaagagcaccaagggcaaccactag

SEQ ID NO: 231035 - DNA, 834 bp, Artificial Sequence
  derived and/or modified sequence
atgccccacccccggatcctgaagcggcccaagaagcgggacatctatgacaagtatgggaaagaagggctgaatggggggggaggcggaggaagtcactttgactccccgttcgagtttgggttcaccttcaggaatcccgatgacgtttttcgtgagtttttcggcggcagggaccccttctccttcgatttctttgaggacccgttcgaggacttcttcggcaataggcggggcccgcgcgggtctagaagcagggggacagggtcatttttttcagcttttagtgggttccccagcttcggcagtgggttctcctcatttgatactggtttcaccagcttcgggtctctgggacacggcggcctcacttcatttagcagtacgtcctttggaggaagtggcatgggaaactttaagagtatcagcactagcaccaagatggtcaacgggaggaagattacaaccaagagaatcgtggaaaatggccaggagcgcgttgaggtcgaggaggacgggcagctcaaatctttgaccataaatggtgtggctgatgacgacgcactggccgaagaaaggatgagacgcggtcagaacgccctgcccgctcagcccgccgggctgagaccaccgaaaccacctcgcccggcatcactcctccgacatgcgccccactgcctatctgaggaagagggagaacaggaccgtcccagagccccggggccctgggacccactggcgtcggcagcgggactgaaagagggaggtaagagaaagaagcagaaacaacgggaagaatccaagaagaaaaaatccaccaagggaaaccactag

SEQ ID NO: 231036 - DNA, 834 bp, Artificial Sequence
  derived and/or modified sequence
atgccacatcccagaatacttaaacgacctaagaagcgcgatatttacgataaatatgggaaagagggcttgaacgggggtggaggtggtggctctcacttcgattctccattcgaattcgggttcactttccggaacccagatgatgtgtttcgggagttctttggaggaagagatcccttttctttcgacttttttgaggaccctttcgaagatttttttggaaatcgtaggggcccacgaggttctcgatcgagaggcacgggctcttttttcagcgcttttagtggtttcccgtcttttggatctggcttctcaagttttgacacaggattcactagctttggctcactcggtcacgggggtctcacgtcctttagcagcacgtcttttggtggatccgggatgggcaatttcaaatcaatctcaacctccactaagatggtaaatgggcgaaaaattactactaagcgcatagtggaaaatggacaagaaagagtcgaagtggaagaagacggacaactgaagtccctgaccatcaatggcgtcgcagacgacgatgcccttgctgaagaacggatgcggcgtggccaaaacgcactccctgcacagcctgctggcctgaggcctccaaaaccacctcggccagcttctctgctgaggcatgcaccacattgccttagcgaggaagaaggagagcaagacaggcccagagcccctggcccatgggaccctctggctagtgctgcgggacttaaggagggcggtaaacggaaaaagcagaagcagagggaagaatctaagaagaagaagtcaactaaaggcaaccactag

SEQ ID NO: 231037 - DNA, 834 bp, Artificial Sequence
  derived and/or modified sequence
atgccccaccccagaatcctgaagagacccaagaagagagacatctacgacaagtacggcaaggagggcctgaacggcggcggcggcggcggcagccacttcgacagccccttcgagttcggcttcaccttcagaaaccccgacgacgtgttcagagagttcttcggcggcagagaccccttcagcttcgacttcttcgaggaccccttcgaggacttcttcggcaacagaagaggccccagaggcagcagaagcagaggcaccggcagcttcttcagcgccttcagcggcttccccagcttcggcagcggcttcagcagcttcgacaccggcttcaccagcttcggcagcctgggccacggcggcctgaccagcttcagcagcaccagcttcggcggcagcggcatgggcaacttcaagagcatcagcaccagcaccaagatggtgaacggcagaaagatcaccaccaagagaatcgtggagaacggccaggagagagtggaggtggaggaggacggccagctgaagagcctgaccatcaacggcgtggccgacgacgacgccctggccgaggagagaatgagaagaggccagaacgccctgcccgcccagcccgccggcctgagaccccccaagccccccagacccgccagcctgctgagacacgccccccactgcctgagcgaggaggagggcgagcaggacagacccagagcccccggcccctgggaccccctggccagcgccgccggcctgaaggagggcggcaagagaaagaagcagaagcagagagaggagagcaagaagaagaagagcaccaagggcaaccactag

SEQ ID NO: 231038 - DNA, 2180 bp, Artificial Sequence
  derived and/or modified sequence
ggagaaaggagagaaaggaaagcgcgaggagccgccgccaccaccagcgcagcagtcctggagctgtgaggagattcgggccgtcaccctgcctcccctgcgtcccgccaccggccgcttctgtcctcggacccattccaacaatctcgtaaaacatggtggattactatgaagttctaggcgtgcagagacatgcctcacccgaggatattaaaaaggcctaagaaacgggacatctatgacaaatatggcaaagaaggattaaatggtggaggaggaggtggaagtcattttgacagtccatttgaatttggcttcacattccgtaacccagatgatgtcttcagggaattttttggtggaagggacccattttcatttgacttctttgaagacccttttgaggacttctttgggaatcgaaggggtccccgaggaagcagaagccgagggacggggtcgtttttctctgcgttcagtggatttccgtcttttggaagtggattttcttcttttgatacaggatttacttcatttgggtcactaggtcacgggggcctcacttcattctcttccacgtcatttggtggtagtggcatgggcaacttcaaatcgatatcaacttcaactaaaatggttaatggcagaaaaatcactacaaagagaattgtcgagaacggtcaagaaagagtagaagttgaagaagatggccagttaaagtccttaacaataaatggtgtggccgacgacgatgccctcgctgaggagcgcatgcggagaggccagaacgccctgccagcccagcctgccggcctccgcccgccgaagccgccccggcctgcctcgctgctgagacacgcgcctcactgtctctctgaggaggagggcgagcaggaccgacctcgggcacccgggccctgggaccccctcgcgtccgcagcaggattgaaagaaggtggcaagaggaagaagcagaagcagagagaggagtcgaagaagaagaagtcgaccaaaggcaatcactagaccggacttgaggcacgcggtgcacccccagacgctggcgctccaccgtgctcggcatgcggtcgtgcacacgcgctaggtagcagcgtcggtcaggactgtctcgaggccacactcgctcggcaggattatgcgatcacggatcagtcagagcagggtcaggagacggggctgacggcacgggtggcggggacagacgtttgggacttggccgcgactctctgcttctctccagctctcaatctgctgcattttcctctagtgcttccggatcctcttcattcttttcggctactcaaccactccgcatgctgctggaatatttctggctttagaagtacaggagggcgcagatggctaactgagtaacattcatgaaatgaggctttctgtggcggcgtagtgtttggaattagaaggtaattcagtagagtgtaacttagagaatattgcaagtgacacattgaatcctgcccgtcagggcaccttttcctcagagcaatccggccacacgaatagaaggctgtcgtgaatcacatcagatgtaaaatcattccttctgtttactcttttaattttcatcctttgcaggtagtgcaaattcaacttcaaatatggtgtaggttttgctagattccatatttttttcttggatttttgctaattatttttagcaaaaaatttttgctcagtggcactctccctagtgtccatgggttagggccatgctggggaaaacgggccggtatttacacacgcgcaaaacacccagagacggcacaaggaggttgaactcatgtttcagttcgcgaacattgactccttacgaaagtcacttcattctaactagatgcgcccacttccggtcattatttcgtttgcatgatgtattgcttcttcacgttttgtttttattgagcacggagtagaattccagggctgccttgacttcttccctgcatgctccctcccagtgactttccttccctttcacatgaggatctgccgttcatgttgctttctcctttgtcctcttggacttgagggcattgtgaaaagctttgctgtgatttaaaaatgccagcaattttaatctagcagtgttgaagctgggaattttttggcgcaatccatgtagcagtgacccaggcttg

SEQ ID NO: 231039 - protein, 314 aa, Artificial Sequence
  derived and/or modified sequence
MASRSKRRAVESGVPQPPDPPVQRDEEEEKEVENEDEDDDDSDKEKDEEDEVIDEEVNIEFEAYSLSDNDYDGIKKLLQQLFLKAPVNTAELTDLLIQQNHIGSVIKQTDVSEDSNDDMDEDEVFGFISLLNLTERKGTQCVEQIQELVLRFCEKNCEKSMVEQLDKFLNDTTKPVGLLLSERFINVPPQIALPMYQQLQKELAGAHRTNKPCGKCYFYLLISKTFVEAGKNNSKKKPSNKKKAALMFANAEEEFFYEKAILKFNYSVQEESDTCLGGKWSFDDVPMTPLRTVMLIPGDKMNEIMDKLKEYLSV

SEQ ID NO: 231040 - protein, 292 aa, Artificial Sequence
  derived and/or modified sequence
MASRSKRRAVESGVPQPPDPPVQRDEEEEKEVENEDEDDDDSDKEKDEEDEVIDEEVNIEFEAYSLSDNDYDGIKKLLQQLFLKAPVNTAELTDLLIQQNHIGSVIKQTDVSEDSNDDMDEDEVFGFISLLNLTERKGTQCVEQIQELVLRFCEKNCEKSMVEQLDKFLNDTTKPVGLLLSERFINVPPQIALPMYQQLQKELAGAHRTNKPCGKCYFYLLISKTFVEAGKNNSKKKPSNKKKAALMFANAEEEFFYEKAILKFNYSVQEESDTCLGGKWSFDDWSVPPVLE

SEQ ID NO: 231041 - DNA, 945 bp, Artificial Sequence
  derived and/or modified sequence
atggcaagcaggtcaaaaaggagggccgtcgagtcaggtgttcctcagccccctgacccgcccgtgcagcgggacgaggaagaagagaaggaagttgagaatgaagatgaggacgatgatgactctgataaggagaaggacgaagaggatgaagtaattgatgaagaagtcaatattgagttcgaggcttactctctgtctgacaacgactacgatgggattaaaaaattactgcagcagctgtttctcaaagcacctgtcaacaccgcagaactaactgacctccttattcagcagaaccacattggttccgtgatcaaacagaccgatgtatctgaagatagcaacgacgacatggacgaggacgaagtgtttggctttatcagtttgctcaatctgaccgagcggaaaggcactcagtgtgtcgagcagatacaggagttggtcctccgcttctgtgagaaaaattgcgagaaatcgatggttgagcaactggacaaattcctcaatgatacgaccaaaccagttgggttgctgctaagtgagcgttttatcaacgtgcctccacagatcgctctccccatgtaccagcagcttcagaaggaactagccggcgcgcatcggaccaataagccttgtggcaagtgctacttctatctgcttatctctaagacttttgtcgaggcaggaaaaaacaatagtaaaaaaaaacccagcaacaaaaaaaaggcagctctcatgttcgcgaatgccgaagaggaatttttttacgaaaaagccattctgaagttcaattattccgtacaggaagagtccgatacctgcctgggggggaaatggagcttcgatgatgtgccgatgacccccttgcggacagtgatgttaattccaggggataaaatgaacgaaattatggataaactcaaagagtatctgtctgtgtag

SEQ ID NO: 231042 - DNA, 879 bp, Artificial Sequence
  derived and/or modified sequence
atggccagccgaagtaagcgcagagcggtggaatccggagtacctcagcctccagacccgccggtgcagagagatgaagaagaggagaaagaagtcgaaaacgaagatgaagacgatgatgactctgataaagagaaagatgaagaagatgaagttatcgatgaagaggtcaatattgaattcgaggcctacagtctcagcgataacgattatgacggcatcaaaaagttacttcagcagttatttctgaaagctcctgtgaacacagccgagttgacagatctgctgattcaacagaaccacataggttccgtaattaagcagacggacgtgtcagaggatagtaacgacgatatggacgaggatgaagtcttcggattcatcagtttgctcaacttgacggaaaggaagggcacccagtgcgtggaacagatacaggagcttgtgctgagattttgtgagaaaaattgtgaaaagagcatggtcgagcaactggataagtttcttaacgatacgaccaagccagttggcttactgctgtccgagcgatttatcaacgtgccacctcagatagccctgccaatgtatcagcagctacagaaggagctggctggcgcccataggacgaacaagccctgcggaaagtgttacttctatttgttgatctccaagacgttcgtcgaagccggcaaaaacaattcgaaaaagaagcccagcaataagaaaaaggcagcattgatgtttgcaaatgccgaggaagaatttttttatgagaaggccatcttaaagttcaattactccgttcaagaagaatccgacacttgtctgggtggaaagtggagcttcgacgattggagtgtccccccagtgctggagtag

SEQ ID NO: 231043 - DNA, 945 bp, Artificial Sequence
  derived and/or modified sequence
atggccagccgcagcaagagaagagctgtggagagcggcgtgccccagcccccagacccccctgtgcagagagatgaggaggaggagaaggaggtggagaatgaagatgaagatgatgatgacagcgacaaggagaaggatgaagaagatgaggtgattgatgaggaggtgaacattgaatttgaggcctacagcctgagtgacaatgactatgatggcatcaagaagctgctgcagcagctgttcctgaaggcccctgtgaacacagctgagctgacagacctgctgatccagcagaaccacatcggcagcgtcatcaagcagacagatgtgtctgaggacagcaatgatgacatggatgaagatgaggtgtttggcttcatcagcctgctgaacctgacagagaggaagggcacccagtgtgtggagcagatccaggagctggtgctgcgcttctgtgagaagaactgtgagaagtccatggtggagcagctggacaagttcctgaatgacaccaccaagcctgtgggcctgctgctgtctgagcgcttcatcaacgtgcccccccagatcgccctgcccatgtaccagcagctgcagaaggagctggccggggcccacaggaccaacaagccctgtgggaagtgctacttctacctgctgatcagcaagacctttgtggaggccggcaagaacaacagcaagaagaagcccagcaacaagaagaaggccgccctgatgtttgccaatgctgaggaggagttcttctatgagaaggccatcctgaagttcaactacagcgtgcaggaggagagtgacacctgcctgggcggcaagtggagctttgatgatgtgcccatgacccccctgaggacagtgatgctgatccctggggacaagatgaatgagatcatggacaagctgaaggagtacctgtctgtgtag

SEQ ID NO: 231044 - DNA, 879 bp, Artificial Sequence
  derived and/or modified sequence
atggccagccgcagcaagagaagagctgtggagagcggcgtgccccagcccccagacccccctgtgcagagagatgaggaggaggagaaggaggtggagaatgaagatgaagatgatgatgacagcgacaaggagaaggatgaagaagatgaggtgattgatgaggaggtgaacattgaatttgaggcctacagcctgagtgacaatgactatgatggcatcaagaagctgctgcagcagctgttcctgaaggcccctgtgaacacagctgagctgacagacctgctgatccagcagaaccacatcggcagcgtcatcaagcagacagatgtgtctgaggacagcaatgatgacatggatgaagatgaggtgtttggcttcatcagcctgctgaacctgacagagaggaagggcacccagtgtgtggagcagatccaggagctggtgctgcgcttctgtgagaagaactgtgagaagtccatggtggagcagctggacaagttcctgaatgacaccaccaagcctgtgggcctgctgctgtctgagcgcttcatcaacgtgcccccccagatcgccctgcccatgtaccagcagctgcagaaggagctggccggggcccacaggaccaacaagccctgtgggaagtgctacttctacctgctgatcagcaagacctttgtggaggccggcaagaacaacagcaagaagaagcccagcaacaagaagaaggccgccctgatgtttgccaatgctgaggaggagttcttctatgagaaggccatcctgaagttcaactacagcgtgcaggaggagagtgacacctgcctgggcggcaagtggagctttgatgactggagcgtgccccctgtgctggagtag

SEQ ID NO: 231045 - DNA, 945 bp, Artificial Sequence
  derived and/or modified sequence
atggccagccggagcaagcggcgggccgtggagagcggcgtgccccaacctccagatcccccagtgcagagggacgaggaggaagaaaaagaagtggagaatgaagatgaagacgacgatgatagtgacaaggaaaaggacgaggaagatgaggtaatcgatgaagaagtgaatattgagttcgaagcctactccctcagtgataatgactacgatggtatcaaaaaactcctgcaacagcttttcctcaaggcacccgtcaacaccgctgaactcacagatctcctcatccaacaaaaccacattggatccgtgatcaagcaaacagacgtctccgaagatagcaacgatgacatggacgaagacgaggtctttggcttcatcagcttgctcaacctcactgaaaggaaggggacccagtgtgtagaacagatccaggagcttgtgctgaggttctgtgagaagaactgtgagaagtctatggtggagcagctggataagtttctgaacgacacaaccaaaccggtcgggctgctgctgtccgaacgattcattaacgtccccccccagattgccctccccatgtatcagcagcttcagaaggaattggcgggagcccaccggaccaacaaaccctgtgggaaatgttacttctacctgctcatctccaagacatttgttgaggcaggcaagaacaacagcaaaaaaaagccttccaacaagaagaaggccgccttgatgttcgctaacgctgaggaggaattcttctatgaaaaggccattcttaaatttaattactccgtgcaggaggagagcgatacctgcctcggcggaaaatggtctttcgatgatgtgcctatgacccccctcaggacggtgatgttgatcccgggcgacaagatgaatgaaattatggacaaacttaaggaatacctatctgtttag

SEQ ID NO: 231046 - DNA, 879 bp, Artificial Sequence
  derived and/or modified sequence
atggccagccggagcaagcggcgggccgtggagagcggcgtgccccagcctccagaccctccagttcagagggatgaggaggaggagaaggaggtcgagaacgaagatgaagacgacgatgattccgacaaggagaaagacgaagaggatgaggtgattgatgaagaggtaaacattgagtttgaagcctattccttaagcgataacgactacgatgggatcaaaaaactgctgcagcagctgtttctgaaggcccccgtgaatacagccgagttgactgatctgcttatccaacaaaatcatatcgggagcgtaatcaagcagaccgatgtgagcgaggattccaacgatgacatggacgaggacgaggtgttcggcttcatctccctgctaaacctaacggaacggaagggaactcaatgtgtggaacaaattcaggagctcgtactgaggttctgtgagaagaactgcgaaaagtctatggtcgagcagctggataaatttctgaatgatacgactaaaccagtcggtcttttgttgtcagagcggtttattaatgtcccacctcagatcgctctgcctatgtatcagcagctccaaaaggaattagcaggagcccaccgtaccaacaaaccctgcggaaaatgttacttctacttgctgatatccaaaacatttgtggaagcagggaaaaacaacagcaagaagaagccctcaaacaagaaaaaggcggcactcatgttcgcaaatgccgaagaagagtttttctacgagaaggctatcctaaagtttaactattctgtgcaggaggaaagtgatacttgcctgggtggaaagtggtctttcgatgactggtccgtgccgcctgtcctggagtag

SEQ ID NO: 231047 - DNA, 945 bp, Artificial Sequence
  derived and/or modified sequence
atggcatccagaagtaagagaagggccgtggagagtggagtaccccagccccctgatccccctgtccagagagatgaggaagaggagaaggaagttgagaacgaagacgaagatgacgacgattccgataaggagaaggatgaggaagatgaggtgatcgacgaggaggtaaacattgaattcgaagcttacagtctatcagataacgactatgatggaattaaaaagctactacagcagctgttcctgaaagctccagtcaacactgcagagctgaccgatctgctaatccagcagaatcacattggctccgtcattaaacagaccgacgtgagcgaggatagtaacgatgacatggacgaagacgaggttttcggatttatctccctgctgaatcttacagagaggaaggggacccagtgcgtcgagcagatccaggagctggtacttcggttctgtgaaaagaattgtgagaagagcatggtggagcagttagacaagttcttaaatgatacaactaagccggtcggcctgttgctcagtgaacgattcatcaacgttcccccacaaattgcactccctatgtaccagcagctgcaaaaggagcttgcgggagcccatcgaacaaacaagccttgtgggaaatgttatttttaccttctgatttcaaaaacttttgtggaagccggtaagaataatagtaaaaagaaaccaagtaacaagaagaaggccgcactgatgttcgctaatgccgaagaggagtttttctacgagaaagccattctcaaattcaattactccgtgcaagaggaatctgacacttgtctgggtggcaaatggtcctttgatgatgtacctatgactccactacgcacagtaatgctgatccctggcgataaaatgaacgagatcatggataaactgaaagagtacttgtctgtctag

SEQ ID NO: 231048 - DNA, 879 bp, Artificial Sequence
  derived and/or modified sequence
atggccagcagaagcaaacgcagagctgtagagagtggcgtgccacagcctcccgatcctcccgttcagagggacgaagaagaagagaaagaggttgagaacgaagatgaagacgacgatgacagcgataaggagaaggacgaggaggacgaggtgatcgacgaggaagttaatatcgaatttgaagcatactctctctccgataacgattacgatggcattaagaagcttctccagcagctgtttttaaaagcccctgtgaatactgcggagctgacagacctgctaattcagcaaaaccacatcggaagcgtaatcaagcagacagacgtgtccgaggactccaacgatgacatggacgaagatgaggtattcgggtttatttccctcctaaacctaacggaacgtaagggtacacagtgcgtggagcagatccaggagcttgtattaagattttgcgagaaaaattgcgaaaagtcaatggtggagcagctcgacaagtttttgaatgatactaccaaaccagtgggtctgttgctgtcggagaggtttatcaacgtgccccctcagatcgccctgcccatgtaccagcagctgcaaaaagaattagcaggcgctcaccgaactaacaagccatgcgggaagtgctatttctacctacttatatccaagacattcgtagaagctgggaagaataatagcaagaagaaacccagtaataagaaaaaggcagcactaatgtttgccaatgcagaggaagagtttttctacgagaaggccatactgaaatttaattattctgtgcaggaggagtctgatacatgtctgggtgggaagtggagcttcgatgattggtcggtacctccagtcctggaatag

SEQ ID NO: 231049 - DNA, 1236 bp, Artificial Sequence
  derived and/or modified sequence
gtgagcggcaacatggcgtccaggtctaagcggcgtgccgtggaaagtggggttccgcagccgccggatcccccagtccagcgcgacgaggaagaggaaaaagaagtcgaaaatgaggatgaagacgatgatgacagtgacaaggaaaaggatgaagaggacgaggtcattgacgaggaagtgaatattgaatttgaagcttattccctatcagataatgattatgacggaattaagaaattactgcagcagctttttctaaaggctcctgtgaacactgcagaactaacagatctcttaattcaacagaaccatattgggagtgtgattaagcaaacggatgtttcagaagacagcaatgatgatatggatgaagatgaggtttttggtttcataagccttttaaatttaactgaaagaaagggtacccagtgtgttgaacaaattcaagagttggttctacgcttctgtgagaagaactgtgaaaagagcatggttgaacagctggacaagtttttaaatgacaccaccaagcctgtgggccttctcctaagtgaaagattcattaatgtccctccacagatcgctctgcccatgtaccagcagcttcagaaagaactggcgggggcacacagaaccaataagccatgtgggaagtgctacttttaccttctgattagtaagacatttgtggaagcaggaaaaaacaattccaaaaagaaacctagcaacaaaaagaaagctgcgttaatgtttgcaaatgcagaggaagaatttttctatgagaaggcaattctcaagttcaactactcagtgcaggaggagagcgacacttgtctgggaggcaaatggtcttttgatgacgtaccaatgacgcccttgcgaactgtgatgttaattccaggcgacaagatgaacgaaatcatggataaactgaaagaatatctatctgtctaacccatttccaatggacagtgatgggcttgtttttgtaaaattaccagaaaactcagtggagatttactgaaaaactcagactttattcagattaagttcctctacaaaaagtagggttctgtcccatgtgtctctgacacatttacaaaataccagttttttaaaattttggtcaaattatgagtggttgatttaaaaacttttccaagaagaagaaaagcatggagtagtaatttaaagaactcaataaaaacttctattttttattttaaaataata

SEQ ID NO: 231050 - DNA, 891 bp, Artificial Sequence
  derived and/or modified sequence
gtgagcggcaacatggcgtccaggtctaagcggcgtgccgtggaaagtggggttccgcagccgccggatcccccagtccagcgcgacgaggaagaggaaaaagaagtcgaaaatgaggatgaagacgatgatgacagtgacaaggaaaaggatgaagaggacgaggtcattgacgaggaagtgaatattgaatttgaagcttattccctatcagataatgattatgacggaattaagaaattactgcagcagctttttctaaaggctcctgtgaacactgcagaactaacagatctcttaattcaacagaaccatattgggagtgtgattaagcaaacggatgtttcagaagacagcaatgatgatatggatgaagatgaggtttttggtttcataagccttttaaatttaactgaaagaaagggtacccagtgtgttgaacaaattcaagagttggttctacgcttctgtgagaagaactgtgaaaagagcatggttgaacagctggacaagtttttaaatgacaccaccaagcctgtgggccttctcctaagtgaaagattcattaatgtccctccacagatcgctctgcccatgtaccagcagcttcagaaagaactggcgggggcacacagaaccaataagccatgtgggaagtgctacttttaccttctgattagtaagacatttgtggaagcaggaaaaaacaattccaaaaagaaacctagcaacaaaaagaaagctgcgttaatgtttgcaaatgcagaggaagaatttttctatgagaaggcaattctcaagttcaactactcagtgcaggaggagagcgacacttgtctgggaggcaaatggtcttttgatgactggtctgttcccccagtattagaataa

SEQ ID NO: 231051 - DNA, 945 bp, Artificial Sequence
  derived and/or modified sequence
atggccagcagaagcaagagaagagccgtggagagcggcgtgccccagccccccgacccccccgtgcagagagacgaggaggaggagaaggaggtggagaacgaggacgaggacgacgacgacagcgacaaggagaaggacgaggaggacgaggtgatcgacgaggaggtgaacatcgagttcgaggcctacagcctgagcgacaacgactacgacggcatcaagaagctgctgcagcagctgttcctgaaggcccccgtgaacaccgccgagctgaccgacctgctgatccagcagaaccacatcggcagcgtgatcaagcagaccgacgtgagcgaggacagcaacgacgacatggacgaggacgaggtgttcggcttcatcagcctgctgaacctgaccgagagaaagggcacccagtgcgtggagcagatccaggagctggtgctgagattctgcgagaagaactgcgagaagagcatggtggagcagctggacaagttcctgaacgacaccaccaagcccgtgggcctgctgctgagcgagagattcatcaacgtgcccccccagatcgccctgcccatgtaccagcagctgcagaaggagctggccggcgcccacagaaccaacaagccctgcggcaagtgctacttctacctgctgatcagcaagaccttcgtggaggccggcaagaacaacagcaagaagaagcccagcaacaagaagaaggccgccctgatgttcgccaacgccgaggaggagttcttctacgagaaggccatcctgaagttcaactacagcgtgcaggaggagagcgacacctgcctgggcggcaagtggagcttcgacgacgtgcccatgacccccctgagaaccgtgatgctgatccccggcgacaagatgaacgagatcatggacaagctgaaggagtacctgagcgtgtag

SEQ ID NO: 231052 - DNA, 879 bp, Artificial Sequence
  derived and/or modified sequence
atggccagcagaagcaagagaagagccgtggagagcggcgtgccccagccccccgacccccccgtgcagagagacgaggaggaggagaaggaggtggagaacgaggacgaggacgacgacgacagcgacaaggagaaggacgaggaggacgaggtgatcgacgaggaggtgaacatcgagttcgaggcctacagcctgagcgacaacgactacgacggcatcaagaagctgctgcagcagctgttcctgaaggcccccgtgaacaccgccgagctgaccgacctgctgatccagcagaaccacatcggcagcgtgatcaagcagaccgacgtgagcgaggacagcaacgacgacatggacgaggacgaggtgttcggcttcatcagcctgctgaacctgaccgagagaaagggcacccagtgcgtggagcagatccaggagctggtgctgagattctgcgagaagaactgcgagaagagcatggtggagcagctggacaagttcctgaacgacaccaccaagcccgtgggcctgctgctgagcgagagattcatcaacgtgcccccccagatcgccctgcccatgtaccagcagctgcagaaggagctggccggcgcccacagaaccaacaagccctgcggcaagtgctacttctacctgctgatcagcaagaccttcgtggaggccggcaagaacaacagcaagaagaagcccagcaacaagaagaaggccgccctgatgttcgccaacgccgaggaggagttcttctacgagaaggccatcctgaagttcaactacagcgtgcaggaggagagcgacacctgcctgggcggcaagtggagcttcgacgactggagcgtgccccccgtgctggagtag

SEQ ID NO: 231053 - protein, 292 aa, Artificial Sequence
  derived and/or modified sequence
MASRSKRRAVESGVPQPPDPPVQRDEEEEKEVENEDEDDDDSDKEKDEEDEVIDEEVNIEFEAYSLSDNDYDGIKKLLQQLFLKAPVNTAELTDLLIQQNHIGSVIKQTDVSEDSNDDMDEDEVFGFISLLNLTERKGTQCVEQIQELVLRFCEKNCEKSMVEQLDKFLNDTTKPVGLLLSERFINVPPQIALPMYQQLQKELAGAHRTNKPCGKCYFYLLISKTFVEAGKNNSKKKPSNKKKAALMFANAEEEFFYEEQGKPEVLGGPDTRRGLEPVPIQHNGWSVPPVLE

SEQ ID NO: 231054 - protein, 262 aa, Artificial Sequence
  derived and/or modified sequence
MASRSKRRAVESGVPQPPDPPVQRDEEEEKEVENEDEDDDDSDKEKDEEDEVIDEEVNIEFEAYSLSDNDYDGIKKLLQQLFLKAPVNTAELTDLLIQQNHIGSVIKGTQCVEQIQELVLRFCEKNCEKSMVEQLDKFLNDTTKPVGLLLSERFINVPPQIALPMYQQLQKELAGAHRTNKPCGKCYFYLLISKTFVEAGKNNSKKKPSNKKKAALMFANAEEEFFYEEQGKPEVLGGPDTRRGLEPVPIQHNGWSVPPVLE

SEQ ID NO: 231055 - DNA, 879 bp, Artificial Sequence
  derived and/or modified sequence
atggcatcgcgtagtaaacgtagagcggtcgagagtggcgtgccacaacccccagatcccccagtgcagcgggacgaggaggaggagaaagaagttgagaatgaggacgaggacgacgacgactctgacaaagagaaagacgaggaagatgaggtcatcgacgaagaggttaatatagagttcgaagcttacagtctatctgacaacgactacgatggaatcaagaaactgctgcaacagctgtttcttaaagctccggttaacaccgctgaattgaccgatctcctaattcaacagaatcacatcggctcagtgattaagcagaccgacgtttctgaagattcaaatgatgacatggacgaagatgaggtgttcggttttatttcactccttaatctgaccgagaggaaaggaacccagtgtgtggagcagattcaggagctcgtactgcgattctgtgaaaaaaactgtgaaaaatccatggtagagcagcttgacaaatttctgaacgataccaccaaacctgtggggctgctgctgtccgagagattcattaacgtacccccccagatcgccctcccgatgtatcagcaactgcagaaggaactggccggtgcccacaggaccaacaaaccttgcggtaaatgctacttctacctgctcatttctaagacgtttgtcgaagctggcaaaaacaattctaagaaaaagccttccaataaaaagaaagccgccctgatgtttgctaatgccgaggaagagttcttttatgaggagcagggaaaaccggaagtgcttggaggccccgacacccgcagggggctcgagcctgtaccaatacagcataatgggtggagcgtacctccagtgctcgaatag

SEQ ID NO: 231056 - DNA, 789 bp, Artificial Sequence
  derived and/or modified sequence
atggctagtcgctctaagagacgtgccgtagaaagtggcgtcccacaacccccagatcccccagtccagcgcgatgaggaggaggagaaagaggtagagaatgaagacgaagacgatgatgattctgacaaggagaaggacgaagaagacgaggtaattgatgaggaggtcaacatcgagtttgaagcatactccctgtcggataacgactacgatggcatcaaaaaactgcttcagcagctgtttctgaaggccccagtgaacacggcggaactaacggatctacttatccagcaaaatcacattggatccgtcatcaaaggcactcaatgtgtggaacagatccaggaattagtgctgaggttttgtgagaagaattgcgaaaagtccatggtcgaacagctcgacaaattcttgaatgacactaccaaaccagtgggactgctgctgtctgaaaggtttatcaacgtccctccacagatcgccctgccaatgtatcaacagttacagaaagagttggcaggcgcgcatcgcacaaacaaaccatgcggcaaatgttacttttacttactcatcagtaaaacattcgtggaggctggtaaaaacaactccaagaagaagccttccaataaaaaaaaggcagccctgatgtttgccaatgccgaggaggagtttttctacgaagagcaggggaaaccagaggtgctgggtggacccgatactagacggggtctggagccggtcccaattcaacacaatggatggtccgtgcctcctgtcctcgagtag

SEQ ID NO: 231057 - DNA, 879 bp, Artificial Sequence
  derived and/or modified sequence
atggccagccgcagcaagagaagagctgtggagagcggcgtgccccagcccccagacccccctgtgcagagagatgaggaggaggagaaggaggtggagaatgaagatgaagatgatgatgacagcgacaaggagaaggatgaagaagatgaggtgattgatgaggaggtgaacattgaatttgaggcctacagcctgagtgacaatgactatgatggcatcaagaagctgctgcagcagctgttcctgaaggcccctgtgaacacagctgagctgacagacctgctgatccagcagaaccacatcggcagcgtcatcaagcagacagatgtgtctgaggacagcaatgatgacatggatgaagatgaggtgtttggcttcatcagcctgctgaacctgacagagaggaagggcacccagtgtgtggagcagatccaggagctggtgctgcgcttctgtgagaagaactgtgagaagtccatggtggagcagctggacaagttcctgaatgacaccaccaagcctgtgggcctgctgctgtctgagcgcttcatcaacgtgcccccccagatcgccctgcccatgtaccagcagctgcagaaggagctggccggggcccacaggaccaacaagccctgtgggaagtgctacttctacctgctgatcagcaagacctttgtggaggccggcaagaacaacagcaagaagaagcccagcaacaagaagaaggccgccctgatgtttgccaatgctgaggaggagttcttctatgaggagcagggcaagccagaggtgctgggcggccctgacacccggcggggcctggagcctgtgcccatccagcacaacggctggagcgtgccccctgtgctggagtag

SEQ ID NO: 231058 - DNA, 789 bp, Artificial Sequence
  derived and/or modified sequence
atggccagccgcagcaagagaagagctgtggagagcggcgtgccccagcccccagacccccctgtgcagagagatgaggaggaggagaaggaggtggagaatgaagatgaagatgatgatgacagcgacaaggagaaggatgaagaagatgaggtgattgatgaggaggtgaacattgaatttgaggcctacagcctgagtgacaatgactatgatggcatcaagaagctgctgcagcagctgttcctgaaggcccctgtgaacacagctgagctgacagacctgctgatccagcagaaccacatcggcagcgtcatcaagggcacccagtgtgtggagcagatccaggagctggtgctgcgcttctgtgagaagaactgtgagaagtccatggtggagcagctggacaagttcctgaatgacaccaccaagcctgtgggcctgctgctgtctgagcgcttcatcaacgtgcccccccagatcgccctgcccatgtaccagcagctgcagaaggagctggccggggcccacaggaccaacaagccctgtgggaagtgctacttctacctgctgatcagcaagacctttgtggaggccggcaagaacaacagcaagaagaagcccagcaacaagaagaaggccgccctgatgtttgccaatgctgaggaggagttcttctatgaggagcagggcaagccagaggtgctgggcggccctgacacccggcggggcctggagcctgtgcccatccagcacaacggctggagcgtgccccctgtgctggagtag

SEQ ID NO: 231059 - DNA, 879 bp, Artificial Sequence
  derived and/or modified sequence
atggccagccggagcaagcggcgggccgtggagagcggcgtgccccaacccccagaccccccagtccagcgagatgaggaagaagagaaggaggtggaaaacgaagacgaggatgatgacgattcggacaaggaaaaggacgaagaggatgaggtgatcgacgaggaagtaaacatagaatttgaagcgtactctctgtcagacaatgattacgacggcataaaaaagttgctgcagcagctctttctgaaagcccctgtgaacaccgcagaactgaccgacctactaatccagcagaaccacatcgggagcgtcattaaacagaccgatgtgtctgaagatagcaacgatgatatggacgaagatgaagtgttcggctttatcagcctgttaaacctgactgaaaggaagggcacgcagtgcgttgagcaaatacaggaactagtgcttcgcttctgtgaaaagaattgtgagaaatcgatggtggagcagttggacaaattcctgaatgacacaacaaagcctgtaggccttcttctaagcgagaggttcataaatgttccaccacagatcgccctccccatgtatcagcaactgcaaaaggaactcgcgggggcccacaggaccaataaaccctgtgggaaatgttacttctacctgctgattagcaaaacttttgtggaggcaggaaagaacaatagtaaaaagaaaccatcaaataagaaaaaagctgcccttatgttcgcaaacgccgaagaagagttcttttatgaggaacaaggaaaaccggaagtgcttggaggacctgatacgcgtagggggctcgagcctgtcccaatacagcataatggctggagcgtgccccctgtcctggagtag

SEQ ID NO: 231060 - DNA, 789 bp, Artificial Sequence
  derived and/or modified sequence
atggccagccggagcaagcggcgggccgtggagagcggcgtgccccagccgccagatccaccggtgcagagggatgaagaggaggaaaaagaagttgagaatgaggatgaggacgatgatgactcggacaaggagaaggacgaagaagatgaagtaatcgatgaagaagtcaacatcgaatttgaagcatactccctcagcgacaacgactatgatggtatcaagaagttgcttcagcagctttttttaaaggcaccagttaacaccgccgaactgacagatctcctgatccagcagaaccatatagggtccgtcatcaagggcacgcagtgcgttgagcaaatccaggaattggtcctccgattctgcgagaagaactgtgaaaagtccatggtggaacaattggacaaattcctgaatgatacaacaaagccagtaggcttgctactgtccgagagatttataaacgtcccaccacagatagccttacccatgtaccagcaactgcagaaggaactggctggtgcccatcggacaaataagccgtgtgggaagtgttatttctaccttcttatctctaagaccttcgttgaagccggaaaaaacaactctaagaagaaaccttctaataagaaaaaagctgccctcatgtttgcgaatgctgaagaggaatttttttatgaggaacagggaaagccggaggttcttggaggcccagatacacgtcggggccttgagccggtcccaattcaacataatggttggtccgtgcctcctgtgttggagtag

SEQ ID NO: 231061 - DNA, 879 bp, Artificial Sequence
  derived and/or modified sequence
atggcatcgcggtcaaagcgcagggccgtcgagtcaggcgtgccgcagccaccagatccccctgtgcaaagggatgaagaggaggaaaaggaagtggagaatgaggacgaggacgatgatgattccgataaggaaaaagacgaagaggatgaagtgatagatgaggaggttaacatcgagtttgaggcttacagcctctcggacaacgactatgatggaatcaaaaagctcctgcaacagctgttcctaaaggcccctgtgaacacagccgagttaaccgacctgcttattcagcagaatcacattgggagcgtgatcaaacagacagacgtgagtgaagacagcaatgacgacatggatgaagatgaagtgtttgggtttattagtcttttgaacctcacagaacgcaagggcacacaatgcgttgaacaaattcaagaactggtcctccggttttgtgaaaaaaactgtgaaaagagtatggtcgagcagttggacaagtttttgaatgatacgacaaaacctgtgggactcttgctatctgagagattcattaatgtaccgccacagattgccctccccatgtaccagcagctacaaaaagagttggcgggagcccaccgaacgaacaagccctgcgggaagtgctacttctaccttctaatctctaaaaccttcgtggaagccggaaaaaacaatagtaagaagaagccttccaataaaaaaaaggcggcattgatgttcgcgaacgcagaggaagaatttttttacgaggaacaaggtaagccggaagtgctcggcggaccggacacccggcgagggctagaaccagtcccaatacagcataacggttggagcgtgcctcccgtgctcgaatag

SEQ ID NO: 231062 - DNA, 789 bp, Artificial Sequence
  derived and/or modified sequence
atggcctcccgatcgaagaggagagcagtggagtcaggggttccccagcctcccgatccccctgttcaacgggatgaagaggaagagaaggaagttgaaaacgaagatgaagatgacgacgactctgacaaggaaaaagatgaggaagacgaagtgatcgatgaagaggttaatatcgaattcgaggcttattcattgagcgacaacgattacgatggtattaaaaagctgctccaacagctgtttttgaaagccccagtcaacaccgccgaactgactgacctgttgatccaacagaatcacattggaagtgttattaaggggacgcagtgcgtggaacagatccaggagttagttctgagattttgtgagaagaactgtgaaaaaagcatggtggagcaactcgacaagttcctcaatgataccaccaagcccgttggactgcttctgtccgagagattcattaacgttccaccccaaatcgcactccccatgtaccagcaactccagaaagagctcgccggtgcccaccgcaccaataagccttgtggtaagtgttacttctatctgctgatcagtaagacatttgtggaagcaggcaaaaacaactcaaaaaagaagcccagcaataagaaaaaagccgctttaatgtttgctaacgcagaggaagagttcttttatgaggagcaggggaagccggaggtgctgggtggacccgacacccgacgtggtctcgagcctgttcccatacaacacaacggctggtctgtcccacccgtgctggaatag

SEQ ID NO: 231063 - DNA, 2338 bp, Artificial Sequence
  derived and/or modified sequence
gtgagcggcaacatggcgtccaggtctaagcggcgtgccgtggaaagtggggttccgcagccgccggatcccccagtccagcgcgacgaggaagaggaaaaagaagtcgaaaatgaggatgaagacgatgatgacagtgacaaggaaaaggatgaagaggacgaggtcattgacgaggaagtgaatattgaatttgaagcttattccctatcagataatgattatgacggaattaagaaattactgcagcagctttttctaaaggctcctgtgaacactgcagaactaacagatctcttaattcaacagaaccatattgggagtgtgattaagcaaacggatgtttcagaagacagcaatgatgatatggatgaagatgaggtttttggtttcataagccttttaaatttaactgaaagaaagggtacccagtgtgttgaacaaattcaagagttggttctacgcttctgtgagaagaactgtgaaaagagcatggttgaacagctggacaagtttttaaatgacaccaccaagcctgtgggccttctcctaagtgaaagattcattaatgtccctccacagatcgctctgcccatgtaccagcagcttcagaaagaactggcgggggcacacagaaccaataagccatgtgggaagtgctacttttaccttctgattagtaagacatttgtggaagcaggaaaaaacaattccaaaaagaaacctagcaacaaaaagaaagctgcgttaatgtttgcaaatgcagaggaagaatttttctatgaggagcagggaaaacctgaggtgcttggaggtccagacacaagaagaggattggaaccagttccgatacagcacaatggttggtctgttcccccagtattagaataaattaaaacatacaagccaggatgaatgaagccaataggaaataaaaaacaggcacacaacattatttggggaaaaacacctctagtgacacattttcttcatctgcactgattatttcagcaaaagaaatctagtatgttttcatacatctgatgtataaatttgctgaactttgagttagttttcttaagataatttttcatattaagaaaattttccttttctaacctattaaaatacctcactatcatttcaaaaggttaaatgagttgatcactatctctgctctgtgctcctcaaaatataatttcaaatggatccgatctaaatctatacctagtgcagatttgcaaaaaaagaaaaggaatagtcattaaggatacctgttaccatggctgcgattgttagcacttcatctacacagtcaaattcacaggacgctaagatagacttcgagagttgtggatcaagaggaaactctgacatgatgattccaaattcagaaagatttccatcattatccagtgctgccagataatctaagtcttccaatgcctgcatcaaactttctggtgctaggaaaggaaaaaaataataatttaagagtctcatatggctaagatggagaaacaggtactggacttttccctcctgcatgaaacaagcaaacaatggacaaaatatgtgaaacaacggtttgcaagccaccaaataccagggagtgaaggatagtgattcttgagagggcaaactcaggaggggagccctgtgattgtccagctcatgctccgaggagggtcccagctgcagtgtgcatgcggggggaacccaggtggagcctgccagcctccctgcagtaggaaaacaatgccagggatccagggagactaaggtggccggaactcgcggtcacagtactggagagagacacacagatctaagtcgggggccagagggagctccctcaactaggcagcacagccctactgatcagcgcatgtgtgtaaggaaccacctcaggccagagaaagagccatgtgagaagattagaaggaacagtggtgctgacacaggacctagggtagggcctgttcccaccaccctagctggaaaacctcatgatttatggggcactgggtagaaaacacaagtgagaaaccctagatgggcactgccacctgacacagctatacagcaggacctgaaaggatcacactgcatcctaggacaaagctcaaaagtacctctgggactacaaaaatattcagtgcccaagaaggtaaaatgtacaatgtctagcatccagtagagaggcatgaaaagcaggaaaatacattgcataatacagagaaaaattaatcacaactgacctggatctcagatgctagaaatagtagacaaagatgttatttcccagtgcaaataaagaaataaagatagcaagctg

SEQ ID NO: 231064 - DNA, 1379 bp, Artificial Sequence
  derived and/or modified sequence
gtgagcggcaacatggcgtccaggtctaagcggcgtgccgtggaaagtggggttccgcagccgccggatcccccagtccagcgcgacgaggaagaggaaaaagaagtcgaaaatgaggatgaagacgatgatgacagtgacaaggaaaaggatgaagaggacgaggtcattgacgaggaagtgaatattgaatttgaagcttattccctatcagataatgattatgacggaattaagaaattactgcagcagctttttctaaaggctcctgtgaacactgcagaactaacagatctcttaattcaacagaaccatattgggagtgtgattaagggtacccagtgtgttgaacaaattcaagagttggttctacgcttctgtgagaagaactgtgaaaagagcatggttgaacagctggacaagtttttaaatgacaccaccaagcctgtgggccttctcctaagtgaaagattcattaatgtccctccacagatcgctctgcccatgtaccagcagcttcagaaagaactggcgggggcacacagaaccaataagccatgtgggaagtgctacttttaccttctgattagtaagacatttgtggaagcaggaaaaaacaattccaaaaagaaacctagcaacaaaaagaaagctgcgttaatgtttgcaaatgcagaggaagaatttttctatgaggagcagggaaaacctgaggtgcttggaggtccagacacaagaagaggattggaaccagttccgatacagcacaatggttggtctgttcccccagtattagaataaattaaaacatacaagccaggatgaatgaagccaataggaaataaaaaacaggcacacaacattatttggggaaaaacacctctagtgacacattttcttcatctgcactgattatttcagcaaaagaaatctagtatgttttcatacatctgatgtataaatttgctgaactttgagttagttttcttaagataatttttcatattaagaaaattttccttttctaacctattaaaatacctcactatcatttcaaaaggttaaatgagttgatcactatctctgctctgtgctcctcaaaatataatttcaaatggatccgatctaaatctatacctagtgcagatttgcaaaaaaagaaaaggaatagtcattaaggatacctgttaccatggctgcgattgttagcacttcatctacacagtcaaattcacaggacgctaagatagacttcgagagttgtggatcaagaggaaactctgacatgatgattccaaattcagaaagatttccatcattatccagtgctgccagataatctaagtcttccaatgcctgcatcaaactttctggtgcta

SEQ ID NO: 231065 - DNA, 879 bp, Artificial Sequence
  derived and/or modified sequence
atggccagcagaagcaagagaagagccgtggagagcggcgtgccccagccccccgacccccccgtgcagagagacgaggaggaggagaaggaggtggagaacgaggacgaggacgacgacgacagcgacaaggagaaggacgaggaggacgaggtgatcgacgaggaggtgaacatcgagttcgaggcctacagcctgagcgacaacgactacgacggcatcaagaagctgctgcagcagctgttcctgaaggcccccgtgaacaccgccgagctgaccgacctgctgatccagcagaaccacatcggcagcgtgatcaagcagaccgacgtgagcgaggacagcaacgacgacatggacgaggacgaggtgttcggcttcatcagcctgctgaacctgaccgagagaaagggcacccagtgcgtggagcagatccaggagctggtgctgagattctgcgagaagaactgcgagaagagcatggtggagcagctggacaagttcctgaacgacaccaccaagcccgtgggcctgctgctgagcgagagattcatcaacgtgcccccccagatcgccctgcccatgtaccagcagctgcagaaggagctggccggcgcccacagaaccaacaagccctgcggcaagtgctacttctacctgctgatcagcaagaccttcgtggaggccggcaagaacaacagcaagaagaagcccagcaacaagaagaaggccgccctgatgttcgccaacgccgaggaggagttcttctacgaggagcagggcaagcccgaggtgctgggcggccccgacaccagaagaggcctggagcccgtgcccatccagcacaacggctggagcgtgccccccgtgctggagtag

SEQ ID NO: 231066 - DNA, 789 bp, Artificial Sequence
  derived and/or modified sequence
atggccagcagaagcaagagaagagccgtggagagcggcgtgccccagccccccgacccccccgtgcagagagacgaggaggaggagaaggaggtggagaacgaggacgaggacgacgacgacagcgacaaggagaaggacgaggaggacgaggtgatcgacgaggaggtgaacatcgagttcgaggcctacagcctgagcgacaacgactacgacggcatcaagaagctgctgcagcagctgttcctgaaggcccccgtgaacaccgccgagctgaccgacctgctgatccagcagaaccacatcggcagcgtgatcaagggcacccagtgcgtggagcagatccaggagctggtgctgagattctgcgagaagaactgcgagaagagcatggtggagcagctggacaagttcctgaacgacaccaccaagcccgtgggcctgctgctgagcgagagattcatcaacgtgcccccccagatcgccctgcccatgtaccagcagctgcagaaggagctggccggcgcccacagaaccaacaagccctgcggcaagtgctacttctacctgctgatcagcaagaccttcgtggaggccggcaagaacaacagcaagaagaagcccagcaacaagaagaaggccgccctgatgttcgccaacgccgaggaggagttcttctacgaggagcagggcaagcccgaggtgctgggcggccccgacaccagaagaggcctggagcccgtgcccatccagcacaacggctggagcgtgccccccgtgctggagtag

SEQ ID NO: 231067 - protein, 410 aa, Artificial Sequence
  derived and/or modified sequence
MQRLLFPPLRALKGRQYLPLLAPRAAPRAQCDCIRRPLRPGQYSTISEVALQSGRGTVSLPSKAAERVVGRWLLVCSGTVAGAVILGGVTRLTESGLSMVDWHLIKEMKPPTSQEEWEAEFQRYQQFPEFKILNHDMTLTEFKFIWYMEYSHRMWGRLVGLVYILPAAYFWRKGWLSRGMKGRVLALCGLVCFQGLLGWYMVKSGLEEKSDSHDIPRVSQYRLAAHLGSALVLYCASLWTSLSLLLPPHKLPETHQLLQLRRFAHGTAGLVFLTALSGAFVAGLDAGLVYNSFPKMGESWIPEDLFTFSPILRNVFENPTMVQFDHRILGITSVTAITVLYFLSRRIPLPRRTKMAAVTLLALAYTQVGLGISTLLMYVPTPLAATHQSGSLALLTGALWLMNELRRVPK

SEQ ID NO: 231068 - DNA, 1233 bp, Artificial Sequence
  derived and/or modified sequence
atgcaacggctcctattcccaccgctgagggcactgaagggtcgacaatacctgcccctcctcgcaccacgggccgctccacgggcacagtgcgattgtatcagaaggccacttagacctggacagtactccactatctcagaggttgctctgcagtcgggcaggggcactgtatccctgccttcaaaagccgccgaacgcgtggtggggcgctggctgctcgtctgtagtggcaccgtggccggcgccgtgatcctgggcggggttactagactgaccgagtccggtttgagcatggttgactggcatctcatcaaggaaatgaagccccctacctcccaggaggaatgggaagccgagttccaaagataccagcagttcccagagttcaagatcctgaatcatgacatgactctcacagagtttaagtttatctggtacatggaatactctcaccggatgtggggacggcttgtgggtctcgtgtatatcctcccagccgcttatttctggagaaaaggctggttgagcagggggatgaaggggcgagtcttggctctctgcggactggtctgtttccagggcctactggggtggtatatggtaaagtccggactggaggaaaaatctgattctcatgacattccccgcgtgagtcagtaccgtcttgcagcgcatctcggcagcgccttagtgctgtactgcgcaagcctttggactagcctttccctgctgctgccacctcacaagctgccggagacgcatcagttgttgcagctgaggcgcttcgcacacggcacagcagggctcgtgtttctcactgccctttccggcgcttttgtggccggcctggacgcaggactggtttacaatagttttccgaagatgggcgagtcatggatcccagaggacctgtttaccttctcccccatcctcaggaatgtcttcgaaaatcccactatggttcagtttgaccaccgcatcctcgggatcacgtcagtgactgcaatcacagtattatactttttgtctaggagaataccactgcctagacggacaaaaatggcggccgtcaccctactagcactagcctacacgcaggtcggactcggaatttctaccctgctcatgtacgtgccaacaccgcttgcggctacacatcagtctggtagtctcgcactgctgaccggcgcactttggcttatgaacgaactacggagagtccctaagtag

SEQ ID NO: 231069 - DNA, 1233 bp, Artificial Sequence
  derived and/or modified sequence
atgcagaggctgctcttcccccccctgcgggccctgaagggccggcagtacctgcccctgctggcccccagggctgccccccgggcccagtgtgactgcatcagaagacccctgcggcccggccagtacagcaccatcagcgaggtggccctgcagagcggccggggcaccgtgtccctgcccagcaaggctgctgagcgggtggtgggccgctggctgctggtgtgcagcggcaccgtggccggggctgtgatcctgggcggcgtgacccggctgacagaaagtggcctgtccatggtggactggcacctgatcaaggagatgaagccacccaccagccaggaggagtgggaggccgagttccagcgctaccagcagtttcctgagttcaagatcctgaaccacgacatgaccctgacagagttcaagttcatctggtacatggagtacagccacaggatgtggggccgcctggtgggcctggtgtacatcctgcctgctgcctacttctggaggaagggctggctgagccggggcatgaagggccgggtgctggccctgtgtggcctggtgtgcttccagggcctgctgggctggtacatggtgaagagcggcctggaggagaagagtgacagccatgacatcccccgggtgtcccagtaccgcctggccgcccacctgggcagcgccctggtgctgtactgtgccagcctgtggaccagcctgagcctgctgctgcccccccacaagctgcctgagacccaccagctgctgcagctgcggagatttgcccatggaacagctggcctggtgttcctgacagccctgagcggggcctttgtggccggcctggatgctggcctggtgtacaacagcttccccaagatgggagagagctggatcccagaagatctcttcaccttcagccccatcctgagaaatgtgtttgagaaccccaccatggtgcagtttgaccaccgcatcctgggcatcacctctgtgacagccatcaccgtgctgtacttcctgagccgccgcatccccctgcccaggaggaccaagatggctgctgtgaccctgctggccctggcctacacccaggtgggcctgggcatcagcaccctgctgatgtatgtgcccacccccctggccgccacccaccagagcggcagcctggccctgctgaccggggccctgtggctgatgaatgagctgcggcgggtgcccaagtag

SEQ ID NO: 231070 - DNA, 1233 bp, Artificial Sequence
  derived and/or modified sequence
atgcagcggctgctgttcccccccctgcgggccctgaagggccggcagtacctccctttgctggccccccgggccgctcctagggctcaatgtgactgcattcgaaggccactccgtcccggccagtattccacgatttcagaagtcgcactgcagtctgggaggggcacagtatcccttccttctaaagcggcggaacgagtagtcgggcgatggcttctggtctgttctgggacagtagctggggccgtgatactgggaggagttacacgactcacggagtctggtctctcaatggtggactggcacctgattaaggaaatgaaacctcccacaagccaagaggaatgggaagccgaattccaaagatatcagcagtttcccgagtttaaaattctgaatcacgacatgacattgaccgagtttaaattcatctggtacatggagtactcacaccgtatgtgggggagattagtgggccttgtgtatatcttgcctgcagcctacttctggcggaagggctggttaagtaggggaatgaagggcagggttcttgccctctgcgggctcgtgtgttttcaggggctgttgggctggtacatggttaagagcggccttgaggaaaagagcgattcacatgatataccccgtgtcagccagtaccgactggccgcgcatctgggaagcgcgctcgttctttactgtgccagcctgtggacctctttatcgttgcttttacccccccacaagttaccagagacacatcagctgcttcagctcagacggtttgcccatggcactgcaggcctcgttttcctgactgccctgtctggagcctttgttgcaggactggatgcagggcttgtctacaattcttttccaaagatgggcgaaagctggatcccggaagacctcttcacatttagtccaatccttcgcaacgtgtttgaaaaccccaccatggttcagtttgaccatagaatccttgggataacatccgtgaccgcgattactgttctgtattttctgtcaaggcggattccactgccaaggcgcacgaaaatggccgcagttacgttgctggctcttgcctacactcaggtcggccttggtatctctactcttttaatgtacgtcccaaccccccttgccgctacacatcagagtggtagcctggccctcttgacgggcgccctttggctcatgaacgaactgcgtagggtcccaaagtag

SEQ ID NO: 231071 - DNA, 1233 bp, Artificial Sequence
  derived and/or modified sequence
atgcagcgcctgttattcccgccattaagggcattgaagggcagacagtatttaccactactggcgcctcgcgctgcaccacgggcacaatgtgactgtattcggaggccgctgcggcctggacagtattcgaccatttccgaagttgcgctgcagagtgggcgtggcacggtgtctcttccttcaaaggccgcagagcgggttgtcggtcgctggttgttagtgtgcagcgggacggtggctggggctgtcatccttggaggcgtgactagactaaccgagtctggactctctatggtcgactggcacttaataaaggagatgaagcctcctacttcacaagaagaatgggaggccgaattccaaagataccagcagttcccagagtttaagatcctcaaccacgacatgaccctaacagaattcaaattcatttggtacatggaatactcgcataggatgtgggggaggctcgttggacttgtgtacatcctccccgcagcatacttttggagaaaggggtggttgagtcggggaatgaagggtagggtgctggccctgtgtggattggtgtgtttccaaggtctgctcggatggtatatggtcaaaagcgggctagaagagaagtcggattcacacgatatacctcgagtgtctcaataccgtctcgccgctcacctcggcagtgccctagtcctgtattgtgcctctttatggacttctctgtctctcctgctgccacctcacaaactccctgagacacaccagctcctgcagttgagacggttcgcccacggaactgctggtctggtgttcctaaccgctctgtcgggagctttcgtggctggactggacgcaggccttgtctacaattcgtttcctaaaatgggcgagagttggatccccgaagacctctttaccttttctcccatcctgcgcaatgtctttgaaaaccccacaatggtgcagtttgaccaccggatcctgggcatcacgtcagttacagctatcacggtgctttacttcctctcacggcgaataccgctcccgagaagaacaaagatggccgctgtgaccctattggcgctcgcatatacacaggtgggcctgggcatcagtaccctgctcatgtacgtgcccactcctctcgccgcaacccaccagagcggcagcctggccttgctcacaggcgcattgtggctaatgaatgagcttaggagggttcctaagtag

SEQ ID NO: 231072 - DNA, 1233 bp, Artificial Sequence
  derived and/or modified sequence
atgcagcgattattatttcctcccctgagggctcttaaggggcgacagtacctccctcttctggcacctagggccgcccctcgcgcgcagtgcgattgtatccgacggccgctccgtcccggtcaatactctacaatttctgaggtggccctccagtccggccgtggcaccgtgagtctcccctccaaggcagccgagagagtggtgggcagatggttgctagtctgctcagggacggtggctggcgctgtgattttaggaggagtaacgcggctgactgagtcaggcttatccatggttgattggcatttaatcaaggagatgaagcctccaacaagtcaagaagaatgggaagctgaattccaaagataccagcagtttccagagttcaagatcctgaaccatgatatgacccttacagagttcaagtttatctggtacatggaatactctcacagaatgtggggccggctggttgggctggtgtacattcttccagcagcttatttttggagaaaagggtggttaagtcgtggtatgaagggtcgagttctggctctttgtggattggtgtgctttcagggactccttggttggtacatggtgaaaagcgggctggaggagaagagtgactcccatgatatccctagggttagccagtaccgtctcgcggcacatctgggaagcgcccttgtgctctactgcgctagcctgtggacaagcttgtctctgctgttaccccctcataaactgcccgagacacatcagctgctccaacttcggcggttcgcccacggaactgctggtttggtgtttttaactgctctgtccggagccttcgtggctgggttggacgctggactggtgtataacagcttcccaaaaatgggcgaatcatggatccctgaagacttgtttactttttcacccattttgaggaatgttttcgaaaaccccactatggttcagtttgaccaccgaatattggggatcacttccgtgacagccattactgtgctgtacttcctgtcccggcggattcctttacctcggagaaccaaaatggctgctgttactttgctggctctcgcctacacgcaggtgggcttgggtatctccacgcttttgatgtacgtccctacgcccctcgctgccacccaccaaagcggctcactggctctgttaacgggcgccctatggctgatgaacgaacttagacgagtcccaaagtag

SEQ ID NO: 231073 - DNA, 1233 bp, Artificial Sequence
  derived and/or modified sequence
atgcagagactcctgtttccaccactgcgtgcactcaagggccggcaatatctgcctttgctcgctcctagggcagccccacgcgcccagtgcgattgcattcgccgaccattgagaccagggcagtactccacaatcagcgaggttgcattgcagtccggcagaggaacggtaagtttaccgagcaaggccgccgagcgagtggttggaaggtggcttctagtttgttccggtactgtcgcaggcgcggtgatattaggcggcgtcacaagacttactgagtcagggctttctatggtggattggcacttaatcaaagaaatgaaacctccaacttctcaagaagagtgggaagctgaattccaacggtaccagcaatttcctgagtttaaaattttgaaccatgacatgacgttgacagagttcaaattcatttggtacatggaatattctcataggatgtggggacgactggtaggactcgtgtacatcctgccggccgcatacttttggcgcaagggctggctttcacgaggaatgaagggtagagttctggctctctgtggactcgtgtgctttcagggcctcctcgggtggtatatggtaaagtcgggactggaagaaaaatccgatagtcatgacatcccccgtgtatctcaatacagactggccgcacatctcggatccgcattggtcttgtactgcgcctctctatggactagtttatctttgctactaccaccacataagctgcccgagacacaccagttgctacagctgagacgcttcgcacacggaacagccggcctggtgttcctgacagccctgtcgggtgcttttgtggctggcctagacgccgggttggtgtataattcttttcccaaaatgggtgaaagttggattcccgaagacctctttactttcagcccaatcctgcgcaacgtgtttgagaatccaacaatggtccagtttgaccaccgtatcctcggaatcacaagtgttaccgctatcactgtgctgtattttctttcgagaaggatccccttacctcgtcggacaaaaatggctgccgtaactctcctggccctagcctacactcaggtcgggctcggcatttcgaccctcctcatgtacgtcccaacccctctggccgccacccatcagtctggatcgctcgctctgctcacgggagcactgtggctcatgaacgaactgcgccgcgtaccaaaatag

SEQ ID NO: 231074 - DNA, 2356 bp, Artificial Sequence
  derived and/or modified sequence
agaccacagagccctgggttgtggaagaggtggctgttccctgtcatcagtatgcagcgattgctctttccgccgttgagggccttgaaggggaggcagtatctgccgctcctggctcctagggcagcgcctagagcacagtgtgattgcatcaggcgccctttgaggccagggcaatacagcaccatctctgaagtagctttgcaatctggaaggggtacagtgtcccttccctcaaaggctgctgagcgggtggtgggccgatggctcctggtctgcagtggaacagtggctggagcagttattcttggtggagtaactaggttgacagagtctggcctctcgatggtagattggcatttaataaaggagatgaagccacctacaagccaagaggaatgggaagcagaattccaaagataccagcaatttccagaatttaaaatcttgaatcatgatatgacactgacagaattcaagttcatctggtacatggagtactcacaccgaatgtggggtcgccttgtaggccttgtgtacatcctgcctgctgcctacttttggagaaagggctggctcagccgtggcatgaaaggacgtgttcttgccctctgtggcctcgtctgcttccagggtctgttgggatggtatatggtgaaaagtggactagaagaaaaatcagactcccatgacatccctcgggtcagtcagtaccgccttgctgcccacctgggatcagccctggttctttattgtgccagcttgtggacctcactgtcactgctactccctccgcacaagttgcctgaaacccaccaactcctacagttgagacgatttgctcatggaacagcaggtctggtgttccttacggccctctcaggggcttttgtggcagggctagatgctgggcttgtttataactcctttcccaaaatgggagaatcctggatcccggaggacctctttaccttctcccccatcctgaggaatgtttttgagaatcccaccatggtgcagtttgatcaccggattctgggaatcacttcagtcactgccattacagtgctctacttcctctctcggagaattccccttcctagaaggaccaagatggcagcagtgactctgctggctttggcgtatacacaggtgggcttgggcatcagcacgctgctgatgtatgtcccaactcctctggccgccactcaccagtcaggctccttggctttgctcactggtgctctttggctgatgaatgaactccgaagagtcccaaaatgattcttagaggaccagcctcctgggactgtgactgcttttgagagctcttcagagatcataagaacttgggcttttctacgagatgaccttgacataccaagtggtttccaaatggtcaacttacttaaaaatcttttcctgttttgagatagtcactggatcaagaatgcattaagtgtggttaccctaaatgttcccttttaaatctgcttttcatgttgaaaatcagttttaatgtagagaaagaaatgtctgccatttgctgcttaacaggctttgtgtcaggtttttcagtgttggcaagctcttggttctacgtggatgatttctacgtggatgttctcctgagtccttaattctgcctaaatagaatttctttatgatcttaacttcacttccattaggtgaagattgaaaggataggattgacatacccaaagtagccagctggtcttcagcaaaaaaaaaaaagctaatgtcttctaatatcctgattttcagaaatggggaaattgcagattttgacaagcttaatgtgtatatgtagcaaaatggtttttaagtacttggaaaaggaggtaatcgccaaatagttccatttttttttttttttttgagacagagtttcactcttgttgcccaggctggagtacaatggcgtgatctcagctcactctgcaacctccacttcccaggttcaagcgattctcatgcctcagcctcccgagtagctgggactacaggcacaagtcaccatgcctggctaattttgtatttttagtagagaaggggtttcaccacattggccgggctggtcttgaactcctgacctcaggtaatccgcccatctcggcttcccaaagtgctgagattacaggcatgggccaccacgcccagctagttcctcttttgataaggctgttaacattacaaggtcagagagaggaatggaatcgacagtataaattggttcctgagagggtttcctaacagctttgtaataagaaaaatatggccttgatggtgtagtgcatggacatctacccagataaacaaattgttgactgctgaa

SEQ ID NO: 231075 - DNA, 1233 bp, Artificial Sequence
  derived and/or modified sequence
atgcagagactgctgttcccccccctgagagccctgaagggcagacagtacctgcccctgctggcccccagagccgcccccagagcccagtgcgactgcatcagaagacccctgagacccggccagtacagcaccatcagcgaggtggccctgcagagcggcagaggcaccgtgagcctgcccagcaaggccgccgagagagtggtgggcagatggctgctggtgtgcagcggcaccgtggccggcgccgtgatcctgggcggcgtgaccagactgaccgagagcggcctgagcatggtggactggcacctgatcaaggagatgaagccccccaccagccaggaggagtgggaggccgagttccagagataccagcagttccccgagttcaagatcctgaaccacgacatgaccctgaccgagttcaagttcatctggtacatggagtacagccacagaatgtggggcagactggtgggcctggtgtacatcctgcccgccgcctacttctggagaaagggctggctgagcagaggcatgaagggcagagtgctggccctgtgcggcctggtgtgcttccagggcctgctgggctggtacatggtgaagagcggcctggaggagaagagcgacagccacgacatccccagagtgagccagtacagactggccgcccacctgggcagcgccctggtgctgtactgcgccagcctgtggaccagcctgagcctgctgctgcccccccacaagctgcccgagacccaccagctgctgcagctgagaagattcgcccacggcaccgccggcctggtgttcctgaccgccctgagcggcgccttcgtggccggcctggacgccggcctggtgtacaacagcttccccaagatgggcgagagctggatccccgaggacctgttcaccttcagccccatcctgagaaacgtgttcgagaaccccaccatggtgcagttcgaccacagaatcctgggcatcaccagcgtgaccgccatcaccgtgctgtacttcctgagcagaagaatccccctgcccagaagaaccaagatggccgccgtgaccctgctggccctggcctacacccaggtgggcctgggcatcagcaccctgctgatgtacgtgcccacccccctggccgccacccaccagagcggcagcctggccctgctgaccggcgccctgtggctgatgaacgagctgagaagagtgcccaagtag

SEQ ID NO: 231076 - protein, 334 aa, Artificial Sequence
  derived and/or modified sequence
MESAAALHFSRPASLLLLLLSLCALVSAQFIVVGPTDPILATVGENTTLRCHLSPEKNAEDMEVRWFRSQFSPAVFVYKGGRERTEEQMEEYRGRTTFVSKDISRGSVALVIHNITAQENGTYRCYFQEGRSYDEAILHLVVAGLGSKPLISMRGHEDGGIRLECISRGWYPKPLTVWRDPYGGVAPALKEVSMPDADGLFMVTTAVIIRDKSVRNMSCSINNTLLGQKKESVIFIPESFMPSVSPCAVALPIIVVILMIPIAVCIYWINKLQKEKKILSGEKEFERETREIALKELEKERVQKEEELQVKEKLQEELRWRRTFLHAELQFFSN

SEQ ID NO: 231077 - DNA, 1005 bp, Artificial Sequence
  derived and/or modified sequence
atggagtcagcagccgctctgcatttttcaagaccggcctctcttcttttgctactgttgtcattgtgtgccctcgtttcagcacagtttattgtggtgggcccaacagatccaatccttgctaccgtgggagagaataccactctacgctgccacctgtcccctgaaaagaacgctgaggacatggaagtgcggtggtttcgaagtcagttttcccccgctgtctttgtttacaaggggggaagggagcggaccgaggagcagatggaggagtaccgtggaaggacaacattcgtctcaaaggatattagtcggggttccgtcgctttggttatacataatatcaccgcgcaggagaatgggacctaccggtgctacttccaagagggacggagctatgacgaggcaattctccacctggtggtcgccggactgggctcaaaaccactgatttcgatgagggggcacgaggatggaggcatcaggctggagtgcatcagccggggctggtacccaaaaccattgaccgtatggcgcgacccttacgggggcgtggcccccgccctgaaggaggtgtccatgccggatgcagacggtctcttcatggttactactgccgtgatcatcagggacaaatcagttcgtaacatgtcttgttctatcaacaatactttgttgggccaaaagaaggagtcagtgatctttatacctgaatctttcatgcccagcgtgtctccatgcgccgtggcactccccataattgtggtaatcttaatgattcctattgcagtttgcatctactggattaataaactgcaaaaggaaaagaaaatcctgtcaggcgaaaaagagttcgagcgcgagacacgtgagattgccctgaaggagctcgaaaaggagcgagttcagaaggaggaggagctgcaggtcaaggagaagctacaagaggagttacgatggaggcgcacctttcttcacgccgaacttcagttctttagtaattag

SEQ ID NO: 231078 - DNA, 1005 bp, Artificial Sequence
  derived and/or modified sequence
atggagagcgctgctgccctgcacttcagcaggcctgccagcctgctgctgctgctgctgagcctgtgtgccctggtgtctgcccagttcatcgtggtgggccccacagaccccatcctggccaccgtgggggagaacaccaccctgcgctgccacctgagccctgagaagaatgctgaggacatggaggtgcgctggttccgcagccagttctccccagctgtgtttgtgtacaagggcggccgggagaggacagaggagcagatggaggagtaccggggccgcaccacctttgtgtccaaggacatcagccggggctctgtggccctggtgatccacaacatcacagcccaggagaatggcacctaccgctgctacttccaggagggccgctcctatgatgaggccatcctgcacctggtggtggccggcctgggcagcaagcccctcatctccatgaggggccatgaagatggcggcatccggctggagtgcatcagccggggctggtaccccaagcccctgactgtgtggagggacccctacggcggcgtggccccagccctgaaggaggtgtccatgccagatgctgatggcctcttcatggtgaccacagctgtgatcatccgggacaagtctgtgaggaacatgagctgcagcatcaacaacaccctgctgggccagaagaaggagagcgtcatcttcatccctgagagcttcatgcccagcgtgagcccctgtgctgtggccctgcccatcatcgtggtgatcctgatgatccccatcgctgtgtgcatctactggatcaacaagctgcagaaggagaagaagatcctgagcggggagaaggagtttgagcgggagacccgggagatcgccctgaaggagctggagaaggagcgggtgcagaaggaggaggagctgcaggtgaaggagaagctgcaggaggagctgcgctggaggaggaccttcctgcatgctgagctgcagttcttcagcaactag

SEQ ID NO: 231079 - DNA, 1005 bp, Artificial Sequence
  derived and/or modified sequence
atggagagcgccgccgccctgcacttcagccggcccgccagcctgctattgctgctgctcagcttgtgtgctctggtttcggcgcagtttatcgtcgtcggaccaaccgaccctatcctcgccaccgtgggcgaaaacacaaccctgaggtgccacctctcccctgagaaaaacgccgaagacatggaggtgcgatggttcagatcccagttttcccccgcagttttcgtgtacaagggaggtcgggaaaggacggaagaacaaatggaggaataccgcggacgcacaaccttcgtttccaaagatatctccagaggcagtgtggcactggtgatccacaacataacggcgcaggagaacgggacctaccggtgttatttccaagaagggcggagttatgacgaagctatactacaccttgtggtggcaggattgggttctaagcctttaatctctatgagagggcatgaggacggtgggattagactggagtgcatcagtagaggctggtatccaaagccgctgactgtctggcgggacccatatgggggagttgcacccgctttaaaggaagtgagtatgcctgacgccgacggtctgttcatggtgactacagccgtcatcatccgggacaaatccgttagaaatatgagctgcagcatcaacaacacacttctgggacaaaaaaaggaatccgtgattttcattcccgagtcttttatgccatccgtgagcccctgtgcagtggccctgcccataatcgtggtgattctcatgattccaattgccgtgtgcatttattggattaacaagttacagaaagaaaagaagattctttccggggaaaaggaatttgagcgagagaccagggagatcgcattgaaagagctggagaaggaacgagtgcaaaaggaggaggaactgcaggtgaaagagaaactacaggaagagctgcggtggcgccgcacattcctgcatgcagagctacagttcttttcgaattag

SEQ ID NO: 231080 - DNA, 1005 bp, Artificial Sequence
  derived and/or modified sequence
atggagagcgcagctgcccttcactttagcaggcccgcatcgctgctgcttctgctcctgtcactctgcgcccttgtgtcagcacagttcattgtcgttggtccgacagatccaattctcgctactgtcggagaaaatactaccttgcgctgtcatctgtcccctgagaagaacgctgaggatatggaggtccgctggtttcgcagccagttcagccccgcagtatttgtgtacaaagggggaagggaacgcacggaggagcagatggaggagtatcgcggacgcacgactttcgtttctaaagacatctcaagagggagtgtcgccctggtgattcacaacatcaccgcacaagaaaatggcacttatagatgttactttcaagaggggcgttcttatgacgaagccatcctgcacctagtcgtcgccggtttagggagtaagcccttgatttctatgaggggacacgaagacggaggtattcggctggagtgtatctcacgcggatggtatcccaagccccttacagtgtggagagacccttatggcggagtggccccagccctgaaggaggtaagcatgcctgacgccgacgggctgttcatggtgactacagccgtcatcatcagggataagtctgtacgcaatatgagctgcagcatcaataatacacttttgggccaaaagaaagagtcagtcatctttatacccgagtcattcatgccctccgtttccccctgcgccgtggccctgcccataatcgtggtcatactcatgatccctatcgccgtgtgcatctactggattaacaagctgcagaaggaaaaaaagattctctctggggagaaggaatttgaacgtgagacacgtgaaattgcactgaaagagctggagaaggagagggttcagaaggaggaggagctgcaggtgaaggagaagcttcaggaagagctgaggtggcggaggacctttctacacgccgaacttcagtttttttccaactag

SEQ ID NO: 231081 - DNA, 3113 bp, Artificial Sequence
  derived and/or modified sequence
cgtttcctgcatctccaaacatggcgacctaggagaaggggaagaacaattttttctcctcttttgggaaggtttgtgtctagtagtgcctgtgcccctgggcagattggagagaagagggacgactggagaatcgtcgagaaccagcggagaaaagaaaaagcaacgtttaattctagaaggcctcctgtccctgcctgctctgggtgctcatggaatcagctgctgccctgcacttctcccggccagcctccctcctcctcctcctcctcagcctgtgtgcactggtctcagcccagtttattgtcgtggggcccactgatcccatcttggccacggttggagaaaacactacgttacgctgccatctgtcacccgagaaaaatgctgaggacatggaggtgcggtggttccggtctcagttctcccccgcagtgtttgtgtataaaggtggcagagagagaacagaggagcagatggaggagtaccgaggaagaaccacctttgtgagcaaagacatcagcaggggcagcgtggccctggtcatacacaacatcacagcccaggaaaacggcacctaccgctgttacttccaagaaggcaggtcctacgatgaggccatcctgcacctcgtagtggcaggactaggctctaagcccctcatttcaatgaggggccatgaagacgggggcatccggctggagtgcatatctagagggtggtacccaaagcccctcacagtgtggagggacccctacggtggggttgcgcctgccctgaaagaggtctccatgcctgatgcagacggcctcttcatggtcaccacggctgtgatcatcagagacaagtctgtgaggaacatgtcctgctctatcaacaacaccctgctcggccagaagaaagaaagtgtcatttttattccagaatcctttatgcccagtgtgtctccctgtgcagtggccctgcctatcattgtggttattctgatgatacccattgccgtatgcatctattggatcaacaaactccaaaaggaaaaaaagattctgtcaggggaaaaggagtttgaacgggaaacaagagaaattgctctaaaggaactggagaaagaacgtgtgcaaaaagaggaagaacttcaagtaaaagagaaacttcaagaagaattgcgatggagaagaacattcttacatgctgagctccaattcttctcaaactgagagaactgcttctgtctctggagagacagaagtgcagcttcagtaattctcagtgtgtgagctgcctaggatcagagagccttcatggaagtggccactacgtggggatcccttcagagatatctgagacctctctggggatcaggaaccacacaatccccagggttcctgagaccccaggcctaaacctgagacttcctctgcagttgatgtggtcctggatccagacaccgctcatcccgatctcttcctgtcagaggaccggagaagtgtgagaaggtgccccttcaggcacctaggggagagcgtgcctgacaacccagagagattcgacagtcagccttgtgtcctaggccgggagagcttcgcttcagggaaacattactgggaggtggaggtggaaaacgtgattgagtggactgtgggggtctgtagagacagtgttgagaggaaaggggaggtcctgctgattcctcagaatggcttctggaccttggagatgcataaagggcaataccgggccgtgtcctcccctgataggattctccctttgaaggagtccctttgccgggtgggcgtcttcctggactatgaagctggagatgtctccttctacaacatgagggacagatcgcacatctacacatgtccccgttcagccttttccgtgcctgtgaggcccttcttcaggttggggtgtgaggacagccccatcttcatctgccctgcactcacaggagccaatggggtcacggtgcctgaagagggcctgacacttcacagagtggggacccaccagagcctatagaatcaattccttggtctcacagccatgtagacaagccctggtcatctcagcagccaccgcacaacacccctggtggaagacacgccctcctcccctctggtcacacaagagaacatcttccagctgcctctttcacacccactacagacctcagccccagttttctcctcctcactaggctgtgtttttagtagttcctttgcttgtaactatgggatgggatccaggcatagggaactagttgttacacagctcccagccaagaagaaagtgtgagaagttgatgggcagcaaacctgctgtttaacatcagggtgaccacattaagcccagtattccagttggcaccagaagatatggacttggaatgaggcctacagggttcaccaggatgtaagaggagagaggaatccacaggaccaccagagaggagagggaaccagatatgcagatcagagatagaggaagtggaaccagagagctgggagggaccaaggttgtaagggtggctaagtcccaccataacagctaaggggacctgggagatgatggctcatttccacccagccccaggatttccagagcgcacatccacaggcctggacctgggatgaagatgaatgaagaacatggatgcacgtggatgtagtttggctcaggtgtccctgcagttggcaaggagtcagtactcagtccctgagtgtggctgaaatttgaggtcctggctgagccaaggagtaatggaccagatctacctcagtattcaagttcagtggggacaccagtggcttcaaacttcctggtttcatgatatcttgagacgccttacaaatgatggaggattccaaagagtttttgtttatttgggttaatatttgttggtatttatggcatttgagattgaaactaagaaatgttttaatttattacctttacaacatttatttacattacatacatacatttacaacatttattaatttatattaaaatagcatgaataagccaattataggttaatataagtagaatgtttgtgaaaaataagtatggtatccaaagcaaaataaattttattgtgaagtgtg

SEQ ID NO: 231082 - DNA, 1005 bp, Artificial Sequence
  derived and/or modified sequence
atggagagcgccgccgccctgcacttcagcagacccgccagcctgctgctgctgctgctgagcctgtgcgccctggtgagcgcccagttcatcgtggtgggccccaccgaccccatcctggccaccgtgggcgagaacaccaccctgagatgccacctgagccccgagaagaacgccgaggacatggaggtgagatggttcagaagccagttcagccccgccgtgttcgtgtacaagggcggcagagagagaaccgaggagcagatggaggagtacagaggcagaaccaccttcgtgagcaaggacatcagcagaggcagcgtggccctggtgatccacaacatcaccgcccaggagaacggcacctacagatgctacttccaggagggcagaagctacgacgaggccatcctgcacctggtggtggccggcctgggcagcaagcccctgatcagcatgagaggccacgaggacggcggcatcagactggagtgcatcagcagaggctggtaccccaagcccctgaccgtgtggagagacccctacggcggcgtggcccccgccctgaaggaggtgagcatgcccgacgccgacggcctgttcatggtgaccaccgccgtgatcatcagagacaagagcgtgagaaacatgagctgcagcatcaacaacaccctgctgggccagaagaaggagagcgtgatcttcatccccgagagcttcatgcccagcgtgagcccctgcgccgtggccctgcccatcatcgtggtgatcctgatgatccccatcgccgtgtgcatctactggatcaacaagctgcagaaggagaagaagatcctgagcggcgagaaggagttcgagagagagaccagagagatcgccctgaaggagctggagaaggagagagtgcagaaggaggaggagctgcaggtgaaggagaagctgcaggaggagctgagatggagaagaaccttcctgcacgccgagctgcagttcttcagcaactag

SEQ ID NO: 231083 - protein, 559 aa, Artificial Sequence
  derived and/or modified sequence
MATATIALQVNGQQGGGSEPAAAAAVVAAGDKWKPPQGTDSIKMENGQSTAAKLGLPPLTPEQQEALQKAKKYAMEQSIKSVLVKQTIAHQQQQLTNLQMAAVTMGFGDPLSPLQSMAAQRQRALAIMCRVYVGSIYYELGEDTIRQAFAPFGPIKSIDMSWDSVTMKHKGFAFVEYEVPEAAQLALEQMNSVMLGGRNIKVGRPSNIGQAQPIIDQLAEEARAFNRIYVASVHQDLSDDDIKSVFEAFGKIKSCTLARDPTTGKHKGYGFIEYEKAQSSQDAVSSMNLFDLGGQYLRVGKAVTPPMPLLTPATPGGLPPAAAVAAAAATAKITAQEAVAGAAVLGTLGTPGLVSPALTLAQPLGTLPQAVMAAQAPGVITGVTPARPPIPVTIPSVGVVNPILASPPTLGLLEPKKEKEEEELFPESERPEMLSEQEHMSISGSSARHMVMQKLLRKQESTVMVLRNMVDPKDIDDDLEGEVTEECGKFGAVNRVIIYQEKQGEEEDAEIIVKIFVEFSIASETHKAIQALNGRWFAGRKVVAEVYDQERFDNSDLSA

SEQ ID NO: 231084 - DNA, 1680 bp, Artificial Sequence
  derived and/or modified sequence
atggccactgccacaatagctttgcaggtgaatgggcagcagggcggaggatccgagccggcggcagcagcagctgtcgtcgcggcaggcgataaatggaagccacctcagggcaccgactccatcaagatggaaaatggccagagcacagctgccaagttgggcctgccaccccttacacccgaacagcaagaagctctacagaaggcaaagaagtatgcgatggaacagtcgatcaagagcgttctcgtcaagcagaccattgcgcaccagcagcagcaacttaccaatctgcagatggctgcggtaacaatgggatttggggaccctttatcgcccctccagtcaatggcggctcagcggcagcgggctctcgcgatcatgtgccgcgtgtatgtcggatccatttattacgagctgggcgaagatacaattcggcaagcgtttgccccattcggtcctatcaagagtatcgatatgtcttgggatagcgttacaatgaaacataagggctttgcttttgtggagtacgaggtgcccgaagctgcccagctggcattagagcaaatgaactccgtcatgttgggtggtagaaatatcaaagtcggcaggccgagcaatatcggccaagcgcagccaatcattgaccaactggccgaggaggcacgagcatttaatcgaatttacgtcgcgtccgtgcaccaagatctgtcggatgatgacatcaagtcggtatttgaggcattcggaaaaatcaagtcctgtactctggctagagaccctaccactggcaaacacaaaggctacggatttatcgagtacgaaaaagctcaatcctcccaggatgctgtgagttctatgaatttgttcgacctgggcggtcagtatctgagagtgggaaaagcagtgaccccccccatgccgctgcttacgccggccacccccgggggtttaccacccgcggcggcagtagccgccgcggccgctacagcaaagatcactgctcaggaggctgtcgcgggagccgcagtgttgggcactctgggcacccctgggttggtctcacctgccctgaccttggcccagccactgggtaccctgccccaggcggtcatggctgctcaggcgcccggagtaatcacgggcgtgacccccgccagaccccctataccagtaacaattccgagcgtcggagtggtgaacccaatcctggcctctccccctacgttgggacttcttgagcctaagaaagagaaggaggaggaggagttattcccggagagtgaacggcccgaaatgcttagcgaacaggagcacatgagtatttctgggtcctctgcaagacacatggtcatgcagaagctgcttcgaaaacaagaatccacggtaatggtacttcggaatatggtcgatcctaaagacattgacgatgacctggaaggcgaggttacggaggaatgcggaaagtttggagccgtgaaccgtgtgattatttatcaggagaagcagggcgaagaggaggacgccgaaatcatagtaaagatcttcgtcgagttttccatagcttccgaaactcacaaagcaatccaggccctgaacgggaggtggtttgcagggcgaaaagtagtcgcagaagtatatgatcaggaacgctttgacaacagtgacctgtcagcatag

SEQ ID NO: 231085 - DNA, 1680 bp, Artificial Sequence
  derived and/or modified sequence
atggccacagccaccatcgccctgcaggtgaatggccagcagggcggcggcagcgagcctgctgctgctgctgctgtggtggccgccggggacaagtggaagccaccccagggcacagacagcatcaagatggagaatggccagagcacagctgccaagctgggcctgccccccctgaccccagagcagcaggaggccctgcagaaggccaagaagtatgccatggagcagagcatcaagtctgtgctggtgaagcagaccatcgcccaccagcagcagcagctgaccaacctgcagatggctgctgtgaccatgggctttggagaccccctgagccccctgcagagcatggccgcccagaggcagagggccctggccatcatgtgccgggtgtatgtgggcagcatctactatgagctgggggaggacaccatccggcaggcctttgcccccttcggccccatcaagagcattgacatgtcctgggacagcgtgaccatgaagcacaagggctttgcctttgtggagtatgaggtgcctgaggccgcccagctggccctggagcagatgaacagcgtgatgctgggcggcaggaacatcaaggtgggccggcccagcaacatcggccaggcccagcccatcatcgaccagctggccgaggaggcccgggccttcaaccgcatctacgtggcctctgtgcaccaggacctgagtgatgatgacatcaagtctgtgtttgaggccttcggcaagatcaagagctgcaccctggcccgggaccccaccaccgggaagcacaagggctacggcttcatcgagtatgagaaggcccagagcagccaggatgctgtgtcctccatgaacctgtttgacctgggcggccagtacctgcgggtgggcaaggctgtgaccccacccatgcccctgctgaccccagccaccccaggcggcctgcccccagctgctgctgtggccgctgctgctgccacagccaagatcacagcccaggaggccgtggccggggctgctgtgctgggcaccctgggcaccccaggcctggtgtccccagccctgaccctggcccagcccctgggcaccctgccccaggccgtgatggccgcccaggcccctggggtcatcactggagtgaccccagcccggccccccatccctgtgaccatccccagcgtgggcgtggtgaaccccatcctggccagcccccccaccctgggcctgctggagcccaagaaggagaaggaggaggaggagctgtttcctgagagcgagaggcctgagatgctgtctgagcaggagcacatgagcatcagcggcagcagcgcccggcacatggtgatgcagaagctgctgaggaagcaggagagcacagtgatggtgctgaggaacatggtggaccccaaggacattgatgatgacctggagggggaggtgacagaggagtgtgggaagtttggagctgtgaacagagtcatcatctaccaggagaagcagggcgaggaggaggatgctgagatcatcgtgaagatctttgtggagttcagcatcgccagcgagacccacaaggccatccaggccctgaatggccgctggtttgctggcaggaaggtggtggccgaggtgtatgaccaggagagatttgacaacagcgacctgagcgcctag

SEQ ID NO: 231086 - DNA, 2412 bp, Artificial Sequence
  derived and/or modified sequence
gggtcatcggttccctggaaggagaaaaagctgccaattgaacggggcctcccggtcccagggatgtcgcgacgcggggacgacgcatctcacgacgtcagcctgaaacacgcgggcctttcatcacccgagactcctccagcccaggagggccccgctctttcgcctgcctcctgggggagagcctctggacgacgcacgcgacagcgttttctccaaaaaaggcagagaagagaagcgtagcagtggccgcaagggcgacgggcggcgaagggtactacgcacgcccgcgtcggccacgcggagagatacgcccgactcgagtcccgcggcgcacgcccctagacgcccgaggtgcgcgggccacgcccctcgcccggccaagagcacgccccttccgtcgcccctcccgggggcgtttaccgttcctccccgccccggaagcgcgttcttacctccttcctcgcgagagttccgtgcaccggcacccagatcgcgcgagacagcggaaggagcaagagtgggaggcgcgcgcggaggccgcgacggacgcaagatggcgacggcgaccatagctctccaggtcaatggccagcaaggaggggggtccgagccggcggcggcggcggcagtggtggcagcgggagacaaatggaaacctccacagggcacagactccatcaagatggagaacgggcagagcacagccgccaagctggggctgcctcccctgacgcccgagcagcaggaggcccttcagaaggccaagaagtacgccatggagcagagcatcaagagtgtgctggtgaagcagaccatcgcgcaccagcagcagcagctcaccaacctgcagatggcagcagtgacaatgggctttggagatcctctctcacctttgcaatcgatggcggctcagcggcagcgggcgctggccatcatgtgccgcgtctacgtgggctctatctactatgagctgggggaggacaccatccgccaggcctttgccccctttggccccatcaagagcatcgacatgtcctgggactccgtcaccatgaagcacaagggctttgccttcgtggagtatgaggtccccgaagctgcacagctggccttggagcagatgaactcggtgatgctggggggcaggaacatcaaggtgggcagacccagcaacatagggcaggcccagcccatcatagaccagttggctgaggaggcacgggccttcaaccgcatctacgtggcctctgtgcaccaggacctctcagacgatgacatcaagagcgtgtttgaggcctttggcaagatcaagtcctgcacactggcccgggaccccacaactggcaagcacaagggctacggcttcattgagtacgagaaggcccagtcgtcccaagatgctgtgtcttccatgaacctctttgacctgggtggccagtacttgcgggtgggcaaggctgtcacaccgcccatgcccctactcacaccagccacgcctggaggcctcccacctgccgctgctgtggcagctgctgcagccactgccaagatcacagctcaggaagcagtggccggagcagcggtgctgggtaccctgggcacacctggactggtgtccccagcactgaccctggcccagcccctgggcactttgccccaggctgtcatggctgcccaggcacctggagtcatcacaggtgtgaccccagcccgtcctcctatcccggtcaccatcccctcggtgggagtggtgaaccccatcctggccagccctccaacgctgggtctcctggagcccaagaaggagaaggaagaagaggagctgtttcccgagtcagagcggccagagatgctgagcgagcaggagcacatgagcatctcgggcagtagcgcccgacacatggtgatgcagaagctgctccgcaagcaggagtctacagtgatggttctgcgcaacatggtggaccccaaggacatcgatgatgacctggaaggggaggtgacagaggagtgtggcaagttcggggccgtgaaccgcgtcatcatctaccaagagaaacaaggcgaggaggaggatgcagaaatcattgtcaagatctttgtggagttttccatagcctctgagactcataaggccatccaggccctcaatggccgctggtttgctggccgcaaggtggtggctgaagtgtacgaccaggagcgttttgataacagtgacctctctgcgtgacagtggtccctctccccggacttgcacttgttccttgtttcctctgggttttatagtgatacagtggtgtccccggggccaggcgcgctctgcccagcccagcctacagtgcggataaaggtgcggatgctgctggccctgaacgtccgtgtgtctgccgtcggtcctgtcaccga

SEQ ID NO: 231087 - DNA, 1680 bp, Artificial Sequence
  derived and/or modified sequence
atggccaccgccaccatcgccctgcaggtgaacggccagcagggcgggggatcagagcccgcggccgctgccgcagttgtggccgccggcgacaagtggaagccgccacagggcaccgatagcataaaaatggagaatgggcagagcacagctgctaaacttggactgcctccactcacccccgagcagcaagaggccctgcaaaaagcaaagaagtatgcgatggagcaatccattaagagcgtgctcgttaaacagaccattgctcaccagcagcaacaactgactaacctccaaatggccgccgtgaccatggggttcggggatccactgtctcctctgcagagcatggccgcacagcgccagcgtgccctcgcaatcatgtgccgcgtttacgtaggcagtatatactatgaactcggtgaggataccattcgacaggccttcgctccatttggcccgatcaagtctatcgacatgagctgggactccgtgacaatgaaacataagggatttgccttcgtagagtatgaggtcccagaagcggctcaactggccttagagcagatgaatagtgtgatgttgggcggacgaaatatcaaagtggggcgccctagcaacataggacaagctcaacccatcatcgaccaactagcagaggaagccagggccttcaataggatctacgtcgcctcagtccaccaggacctgagtgatgatgatatcaaatcagtctttgaggcattcggtaagatcaaaagttgtacactggctagggaccctaccacaggcaagcacaaagggtacggctttatcgaatacgagaaagcccagtcatcgcaagacgccgtgtcttccatgaacctttttgacctcggtggtcagtacctgagggtgggcaaagcagtaacccctcccatgcccctgctgactccagcaacccccggtggcctcccaccagctgctgctgtggccgccgccgcagcaacggctaagataaccgctcaagaagctgtggcaggggctgctgtgctcggtaccctcggaacccctggcctcgtgtcccctgctctaactctcgcacagcctctcggcacgctgccgcaagccgtgatggccgctcaggcgccaggcgtgatcacaggcgtcactcccgcaaggcccccaattcccgtgacgatcccctcagtgggagtcgtgaacccaatcttagcatcacctcccacattaggactactggaacccaagaaggagaaggaggaagaggagttgtttcccgagtctgaaaggccggaaatgctgtccgagcaggaacacatgtcaatttctggtagcagcgcacggcacatggttatgcaaaagctgctgcgcaagcaggaatcaacagtaatggtgctgcgtaatatggtagatccgaaggacattgacgacgatctggagggtgaagtcacggaagaatgtgggaaattcggcgcggtgaaccgggttattatttaccaagaaaaacagggggaagaggaagatgccgagatcatcgttaaaatcttcgtcgaattctctatcgcgagtgagacccataaggcaatacaggccctgaacggaaggtggttcgcaggtcggaaagtggtcgccgaggtctacgatcaagagaggtttgataatagcgacctgtccgcatag

SEQ ID NO: 231088 - DNA, 1680 bp, Artificial Sequence
  derived and/or modified sequence
atggctaccgccactatcgcactgcaggttaacggccagcaagggggtggttccgaaccggctgcagcagccgcagtcgtggccgcaggggacaaatggaagccacctcaaggaacagacagcatcaagatggagaacgggcagtctacagccgctaaactcggcctgccccctctgacaccggaacagcaggaggccctacagaaagctaaaaaatacgcaatggaacagtcaataaaatcggttctggtgaagcagacaatcgctcatcagcaacagcaattgacaaatctgcagatggccgctgtaaccatgggctttggtgatccccttagtccgctgcagtcgatggcagcacagcgacagcgtgccctggctatcatgtgccgcgtatacgtcgggagtatctactacgaacttggagaggacacgatcagacaagccttcgcgccttttggtcctattaagtctattgatatgtcatgggacagtgtgaccatgaaacacaaggggtttgcatttgtggagtacgaagttccagaggctgcccaattagctctagagcagatgaactcagtgatgctggggggaagaaatattaaggtgggccgaccatcaaatatcggacaagcccagccaataatagaccagctcgccgaagaggctagagccttcaaccgaatctatgttgccagtgtccatcaggatctgtccgatgacgacattaagtctgtatttgaggcatttgggaaaataaagagttgtaccctcgctagagacccaaccaccgggaagcataagggatacggcttcattgagtatgagaaagcccaaagttctcaggatgccgtctctagtatgaacctctttgacctgggaggacagtatttgagggtgggcaaagcagtcacccctcctatgccgctgcttacaccagcaacaccgggtggcctgccccctgccgcagccgtcgcagccgctgcggcaactgccaagataaccgcacaagaagccgtagccggagctgctgtgctcggaaccctcgggaccccaggactggtctcacctgcactgacattagcacagcccctaggcaccctcccgcaggctgtaatggccgcacaagctccgggagtgatcacaggagtaacccccgcaaggccccctatccccgtgactatcccttccgtcggggttgttaatcccatccttgcgtccccccctaccctgggattgcttgagccaaagaaggagaaggaagaggaagagttattccctgagtcagagaggcccgaaatgttaagcgaacaggagcatatgtccattagcggatcttccgcacgtcacatggtaatgcaaaaattactgcgaaagcaggaatccacagtaatggtgctccgtaatatggtggacccaaaagatatcgacgatgacctggagggtgaggttactgaagaatgcggcaagtttggtgctgtcaaccgggtcatcatttaccaggagaagcaaggtgaggaagaagatgctgagatcatcgtcaaaatatttgttgagttctctatcgcgtccgagacccacaaggccattcaggccctaaacggtcggtggttcgccggacgcaaggttgtggccgaggtctatgaccaagagcggttcgacaattccgacctgagtgcatag

SEQ ID NO: 231089 - DNA, 1680 bp, Artificial Sequence
  derived and/or modified sequence
atggccaccgccaccatcgccctgcaggtgaacggccagcagggcggcggcagcgagcccgccgccgccgccgccgtggtggccgccggcgacaagtggaagcccccccagggcaccgacagcatcaagatggagaacggccagagcaccgccgccaagctgggcctgccccccctgacccccgagcagcaggaggccctgcagaaggccaagaagtacgccatggagcagagcatcaagagcgtgctggtgaagcagaccatcgcccaccagcagcagcagctgaccaacctgcagatggccgccgtgaccatgggcttcggcgaccccctgagccccctgcagagcatggccgcccagagacagagagccctggccatcatgtgcagagtgtacgtgggcagcatctactacgagctgggcgaggacaccatcagacaggccttcgcccccttcggccccatcaagagcatcgacatgagctgggacagcgtgaccatgaagcacaagggcttcgccttcgtggagtacgaggtgcccgaggccgcccagctggccctggagcagatgaacagcgtgatgctgggcggcagaaacatcaaggtgggcagacccagcaacatcggccaggcccagcccatcatcgaccagctggccgaggaggccagagccttcaacagaatctacgtggccagcgtgcaccaggacctgagcgacgacgacatcaagagcgtgttcgaggccttcggcaagatcaagagctgcaccctggccagagaccccaccaccggcaagcacaagggctacggcttcatcgagtacgagaaggcccagagcagccaggacgccgtgagcagcatgaacctgttcgacctgggcggccagtacctgagagtgggcaaggccgtgaccccccccatgcccctgctgacccccgccacccccggcggcctgccccccgccgccgccgtggccgccgccgccgccaccgccaagatcaccgcccaggaggccgtggccggcgccgccgtgctgggcaccctgggcacccccggcctggtgagccccgccctgaccctggcccagcccctgggcaccctgccccaggccgtgatggccgcccaggcccccggcgtgatcaccggcgtgacccccgccagaccccccatccccgtgaccatccccagcgtgggcgtggtgaaccccatcctggccagcccccccaccctgggcctgctggagcccaagaaggagaaggaggaggaggagctgttccccgagagcgagagacccgagatgctgagcgagcaggagcacatgagcatcagcggcagcagcgccagacacatggtgatgcagaagctgctgagaaagcaggagagcaccgtgatggtgctgagaaacatggtggaccccaaggacatcgacgacgacctggagggcgaggtgaccgaggagtgcggcaagttcggcgccgtgaacagagtgatcatctaccaggagaagcagggcgaggaggaggacgccgagatcatcgtgaagatcttcgtggagttcagcatcgccagcgagacccacaaggccatccaggccctgaacggcagatggttcgccggcagaaaggtggtggccgaggtgtacgaccaggagagattcgacaacagcgacctgagcgcctag

SEQ ID NO: 231090 - DNA, 1680 bp, Artificial Sequence
  derived and/or modified sequence
atggcaactgccaccatcgcccttcaggtgaacggccaacagggtggcggtagcgagcctgccgctgccgcagccgttgtcgccgccggagataagtggaagcccccccaaggtaccgacagtatcaagatggaaaacggccaaagcaccgctgcaaaactggggctgcctcccctgacacctgaacagcaggaggctcttcaaaaggccaagaagtacgcaatggagcagtccattaagtctgtccttgtcaaacagaccatagcgcaccagcagcagcagctgactaatttgcaaatggctgccgtgacaatggggtttggggatcctcttagtcccctgcaatcaatggccgcccagaggcagcgtgcactggcgataatgtgcagggtatatgtgggcagcatctattatgaactgggggaggacaccattcggcaggcctttgcaccttttggcccaataaaaagcattgacatgtcatgggacagtgttacgatgaaacataaggggtttgcttttgtcgaatacgaggtgcctgaagcagcacagctggccctggagcaaatgaacagcgtcatgctgggcggaagaaacattaaagtgggaagaccttccaatattggtcaggcacagcctatcattgaccaattggcagaggaggcacgagctttcaacaggatctacgtggcatcagtgcaccaagatctcagcgacgacgacatcaagtctgtgtttgaggcttttggtaagatcaaatcatgcaccctggcgagagaccccacgaccggtaagcacaaggggtacggctttatagagtatgagaaagcccagagttcccaggacgctgtcagttcaatgaatctgtttgatctcgggggtcagtatcttagagtgggaaaagcagtcacaccccctatgcctctcttgacaccagctaccccaggaggcctaccgccagcagccgcagttgccgccgcagcggccaccgctaaaattacagcacaggaagcggtggccggagcggctgtgctggggaccctaggaacccctggattggtgtctcccgcgctgacgctggcccagcctctggggacactgcctcaagccgtaatggcagcccaggccccgggagttatcacaggtgtcactcctgcgagaccaccaatccccgtgaccatccccagcgtgggagtggtgaaccccatccttgccagtccgccgactcttggcctcctggaaccaaagaaagaaaaggaggaagaggaattattcccagagagcgaacgccctgaaatgctgtctgaacaggagcatatgtctattagtggaagttccgctcgacatatggtcatgcaaaagctgttgcgaaaacaagagtcgacggttatggttctcaggaacatggttgaccctaaagatattgatgacgacttagagggagaggtcaccgaagagtgcggtaaatttggtgctgtgaatcgtgtgattatctaccaggagaagcagggggaggaggaagacgcagagatcatcgttaagatatttgttgaattttcgatagcaagcgagactcacaaggcaatccaggccctcaatgggcgctggtttgcggggcgcaaggtagtggctgaggtttatgaccaggaacggtttgacaacagtgatctgtccgcttag

SEQ ID NO: 231091 - DNA, 1680 bp, Artificial Sequence
  derived and/or modified sequence
atggccaccgccaccatcgccctgcaggtgaacggccagcagggcgggggttctgaaccagccgcagcggccgcagttgtagccgcaggcgataaatggaagcccccccagggcactgacagcattaagatggaaaatggccagagtaccgccgcaaaacttggactacccccgctcacaccagagcagcaggaagccttgcagaaagcaaaaaaatatgccatggaacagagcattaagagcgtcctggttaaacagaccattgcgcaccagcagcagcagctgacgaatcttcagatggcagcggtgaccatggggttcggagatccgttgtcacctctacagtcaatggctgcccagcgacagcgggccttggctattatgtgtcgtgtgtacgttggtagcatttactatgagctcggagaggacactatacggcaggctttcgccccatttggacccattaaatctatagacatgtcctgggattcagtgaccatgaagcataagggatttgcttttgtggaatatgaagtaccagaggccgcacagttggctctagaacaaatgaactccgtgatgttgggcggaagaaacataaaggttggacgtccttccaacattgggcaggctcagcctattatagaccaacttgcagaggaagcgcgggcttttaatcgaatctatgttgcatcagtgcatcaagacctaagcgatgacgacatcaaaagcgtctttgaggcattcgggaagatcaagtcttgcacccttgccagggatcccaccaccggcaaacataaaggatacggcttcattgagtatgagaaggctcagagcagccaggacgcggtttctagtatgaatttattcgacctgggaggacagtatctgcgagtgggaaaggctgtgacacctccaatgccccttctcacacccgcaactcccgggggtctcccgcctgcagcggcagtggcggcagctgcggctaccgcgaagattaccgctcaggaggctgtcgcaggcgcagccgtgctgggtacactgggcacacccggcttagtttcccccgctctaactttagctcagcctctgggtacccttccccaggccgttatggctgcccaagctcccggggtgattacgggtgtgacaccagctcgccctccgattcccgtgacaatccctagcgtgggtgtcgtgaacccaatcctcgcaagcccgcctaccctcgggttgctggaacccaaaaaggagaaggaagaagaagaactgttccctgaatccgaaagacctgaaatgctgtctgaacaggaacacatgtcaatttctggctcttctgccagacatatggtgatgcagaagctccttaggaaacaagaaagtactgtgatggttctgagaaacatggtggatccgaaagatattgatgacgatctggagggggaggtgactgaggaatgtgggaagtttggcgcagtcaaccgggttattatttatcaggaaaagcagggggaggaagaggacgcagagattatcgttaagatcttcgtagaattctctatcgctagcgaaacacacaaagccattcaagccctaaatggcaggtggtttgccggccgaaaggttgtcgccgaagtgtacgatcaggagaggtttgataatagcgatctgtccgcgtag

SEQ ID NO: 231092 - DNA, 1680 bp, Artificial Sequence
  derived and/or modified sequence
atggcgaccgccaccatcgccctgcaagtcaatggtcaacaaggcggaggctctgagcccgctgccgcagcggctgtggtcgctgcgggagataagtggaaaccgccacaaggcactgactccattaaaatggagaatgggcaaagcactgctgccaagttaggtctgccacccttgactcccgaacagcaggaagctctccagaaggcaaagaagtatgctatggaacagagtattaaatcagttcttgtgaaacagactatagcacatcagcagcagcaacttaccaacttgcagatggccgctgtcaccatgggttttggcgaccctttgtcccctctgcaatctatggcggctcagaggcagcgagcgctggctatcatgtgtcgggtgtacgtgggatccatttactacgagttgggcgaagataccattcgccaagccttcgccccatttggcccaatcaaatctatcgacatgtcctgggattctgtcactatgaagcataagggcttcgccttcgttgagtacgaggtcccagaagcggcacagctggcactggaacaaatgaattccgtcatgttaggaggacgaaatatcaaagttggcaggccttccaatattggacaagcccaaccaatcatcgaccagctggccgaggaagcaagggcttttaacaggatctatgtggcctccgttcaccaggacctgtcagatgacgacattaaaagtgtcttcgaagcgtttggcaagattaagagctgtacactggctcgagacccaactacaggaaaacacaagggctacggcttcattgaatacgagaaagcccaaagctcacaggacgcagtcagctcaatgaatctattcgatcttggaggccagtacctccgggtaggaaaagcggtcacccccccaatgcccttgctgactcctgcgacaccaggaggcctgcccccagcagcagctgttgcagcagctgccgctaccgccaagatcacggcacaggaagccgttgccggagctgcagttttggggacattaggaactcctgggctggtcagtcctgccctcacattagcccagccattaggaaccctgccacaggccgtgatggccgcacaagctccaggcgtgatcaccggggtcaccccagcgagacctccaattcctgttacaataccgagtgttggcgtcgtaaaccctattttagcctcgcctcctacgctcggcctcctagaacccaaaaaggaaaaggaagaggaagagctctttccagagagtgaacgccctgagatgctgtcagaacaggagcacatgagtatttcaggctctagcgcgcgacacatggtgatgcagaagcttctgaggaagcaggaatccacggtgatggttctccggaacatggtcgaccccaaagatatcgacgatgatctggagggcgaggtgactgaagaatgcggtaagtttggcgctgtcaatcgggtgattatctaccaggaaaaacagggcgaggaggaagacgcggaaataatagtgaaaatctttgttgaattctccatcgcttccgagactcacaaagcaattcaggcgcttaacggcaggtggtttgccggtcgcaaagtcgtcgcagaggtctacgaccaggaacgttttgacaactcagacctgtctgcttag

SEQ ID NO: 231093 - protein, 835 aa, Artificial Sequence
  derived and/or modified sequence
MGGRVFLAFCVWLTLPGAETQDSRGCARWCPQNSSCVNATACRCNPGFSSFSEIITTPTETCDDINECATPSKVSCGKFSDCWNTEGSYDCVCSPGYEPVSGAKTFKNESENTCQDVDECQQNPRLCKSYGTCVNTLGSYTCQCLPGFKFIPEDPKVCTDVNECTSGQNPCHSSTHCLNNVGSYQCRCRPGWQPIPGSPNGPNNTVCEDVDECSSGQHQCDSSTVCFNTVGSYSCRCRPGWKPRHGIPNNQKDTVCEDMTFSTWTPPPGVHSQTLSRFFDKVQDLGRDSKTSSAEVTIQNVIKLVDELMEAPGDVEALAPPVRHLIATQLLSNLEDIMRILAKSLPKGPFTYISPSNTELTLMIQERGDKNVTMGQSSARMKLNWAVAAGAEDPGPAVAGILSIQNMTTLLANASLNLHSKKQAELEEIYESSIRGVQLRRLSAVNSIFLSHNNTKELNSPILFAFSHLESSDGEAGRDPPAKDVMPGPRQELLCAFWKSDSDRGGHWATEGCQVLGSKNGSTTCQCSHLSSFAILMAHYDVEDWKLTLITRVGLALSLFCLLLCILTFLLVRPIQGSRTTIHLHLCICLFVGSTIFLAGIENEGGQVGLRCRLVAGLLHYCFLAAFCWMSLEGLELYFLVVRVFQGQGLSTRWLCLIGYGVPLLIVGVSAAIYSKGYGRPRYCWLDFEQGFLWSFLGPVTFIILCNAVIFVTTVWKLTQKFSEINPDMKKLKKARALTITAIAQLFLLGCTWVFGLFIFDDRSLVLTYVFTILNCLQGAFLYLLHCLLNKKVREEYRKWACLVAGGSKYSEFTSTTSGTGHNQTRALRASESGI

SEQ ID NO: 231094 - DNA, 2508 bp, Artificial Sequence
  derived and/or modified sequence
atgggaggtcgggtgttcctagccttctgtgtttggctgacactgcctggcgcggaaacccaggattcaaggggctgcgctaggtggtgccctcagaatagctcatgtgttaacgctaccgcatgtagatgtaatccagggttctctagctttagtgaaatcatcacgactccgaccgaaacttgtgatgatataaacgagtgtgcgacgcctagcaaggtgagctgcggaaagtttagtgactgctggaacacggagggctcttacgattgtgtgtgcagtcctgggtacgagccagtgtccggcgctaaaacttttaaaaatgagtcagagaacacctgtcaggatgtagacgagtgccaacagaacccgcgtttatgcaaatcttacggcacatgtgttaataccctaggttcctacacatgtcagtgcctaccggggttcaaattcattcctgaggatcccaaggtatgtactgatgtgaacgagtgtacatctggtcagaatccttgccactccagtactcactgcctcaacaacgtgggttcataccagtgccgatgtaggcctggctggcaacccataccagggtcacccaacggacctaacaacaccgtgtgtgaggacgttgacgagtgtagttctggccagcaccagtgtgactcgtccaccgtttgtttcaacaccgtaggcagctattcgtgtagatgtcgtcccggttggaaaccccgccacgggattccaaataatcagaaagacacagtgtgcgaagacatgacctttagtacttggacccctccccctggcgttcactcacagactttgtcacgcttttttgacaaggtccaggatcttggccgtgactcgaagaccagcagtgctgaggttacaatccagaacgtgattaagctggtagatgagctcatggaggccccgggcgacgttgaagcccttgctccacctgtacggcatctcatagctactcagctactgagcaatctcgaggatattatgaggatacttgcaaaaagcttgcccaaggggccattcacctacatttctccatctaataccgagctgacactcatgatccaggaacgcggcgataaaaacgtcacaatggggcagtcttccgctcgcatgaaactcaattgggctgtcgctgccggggcggaggatcccggccccgccgtggccggaatcctgagcatccagaatatgacaactctgctcgccaatgcttctttaaatctccattctaagaagcaggctgagctcgaggagatttacgaaagctccataagaggagtgcaattgagacgacttagcgctgtaaattctatctttctctctcacaataataccaaggagttaaatagtcccatcctgttcgctttctctcatttagagtcttccgatggggaagccggcagggaccctccagctaaagatgttatgcctgggcctcggcaggagctcttatgtgccttttggaagtccgatagcgatagaggtggtcattgggctacagaagggtgccaggttttgggtagtaaaaacgggtccaccacatgtcaatgctcgcatctgtccagcttcgctattctgatggcgcattacgatgtggaagattggaagctgactctcattacccgtgtggggctggccctgtcgctgttctgcctgttgctatgtatcttgacgtttctcctcgtgcggccaattcagggatctaggactacgatccatctgcatttgtgcatctgtttattcgtgggaagcacaattttcctggcagggatcgaaaacgaaggcggtcaggtgggcctacgatgtcggctcgtagcaggcctccttcattactgttttctggcggccttctgctggatgtccctcgaaggattagagctctactttctcgtagttagggtcttccagggacaaggcctctccacgcgctggctgtgtctgatcggatacggagttccattactcatcgtgggtgttagcgcggcgatatactctaagggctacgggcgaccaagatattgttggctggatttcgagcaggggtttctgtggtctttcctcggccctgtgacttttatcatcctgtgcaatgcagttatcttcgtaactacagtgtggaaactaacccaaaaattctctgaaatcaatcccgatatgaagaaactaaaaaaagccagagctctgacaataactgccatcgctcagctgtttctcctaggatgcacctgggtatttgggctctttatctttgatgatcggtcactggttctgacctatgtgttcacaattctgaactgcctacagggggcttttctctaccttttacactgtctattgaacaaaaaagtacgggaggaatacaggaaatgggcgtgcctggtggctggaggctcaaaatatagcgagtttacttctactacaagtggcactggacacaaccagactcgggctctgagggcttcagagtccgggatttag

SEQ ID NO: 231095 - DNA, 2508 bp, Artificial Sequence
  derived and/or modified sequence
atgggcggccgggtcttcctggccttctgtgtgtggctgaccctgcccggggctgagacccaggacagccggggctgtgcccgctggtgcccccagaacagcagctgtgtgaatgccacagcctgccgctgcaaccctggcttcagcagcttcagcgagatcatcaccacccccacagagacctgtgatgacatcaatgaatgtgccacccccagcaaggtgtcctgtgggaagttcagtgactgctggaacacagagggcagctatgactgtgtgtgcagccctggctatgagcctgtgtctggggccaagaccttcaagaatgaaagtgagaacacctgccaggatgtggatgagtgccagcagaacccccggctgtgcaagagctatggcacctgtgtgaacaccctgggcagctacacctgccagtgcctgcccggcttcaagttcatccctgaggaccccaaggtgtgcacagatgtgaatgaatgtaccagcggccagaacccctgccacagcagcacccactgcctgaacaacgtgggcagctaccagtgccgctgccggcccggctggcagcccatccctggcagccccaacggccccaacaacacagtgtgtgaagatgtggatgagtgcagcagcggccagcaccagtgtgacagcagcacagtgtgcttcaacacagtgggcagctacagctgccgctgcaggcctggctggaagcccaggcatggcatccccaacaaccagaaggacacagtgtgtgaggacatgaccttcagcacctggaccccacctcctggggtgcacagccagaccctgagccgcttctttgacaaggtgcaggacctgggccgggacagcaagaccagcagcgctgaggtgaccatccagaatgtcatcaagctggtggatgagctgatggaggcccctggagatgtggaggccctggcccctcctgtgcgccacctgattgccacccagctgctgagcaacctggaggacatcatgaggatcctggccaagagcctgcccaagggccccttcacctacatcagccccagcaacacagagctgaccctgatgatccaggagcggggggacaagaatgtgaccatgggccagagcagcgccaggatgaagctgaactgggccgtggccgccggggctgaggaccccggccctgctgtggccggcatcctgagcatccagaacatgaccaccctgctggccaatgccagcctgaacctgcacagcaagaagcaggccgagctggaggagatctatgagagcagcatccggggcgtgcagctgcggcggctgtctgctgtgaacagcatcttcctgagccacaacaacaccaaggagctgaacagccccatcctgtttgccttcagccacctggagagcagtgatggagaggccggccgggaccccccagccaaggatgtgatgcctggcccccggcaggagctgctgtgtgccttctggaagagtgacagcgacagaggaggccactgggccacagagggctgccaggtgctgggcagcaagaatggcagcaccacctgccagtgcagccacctgagcagctttgccatcctgatggcccactatgatgtggaggactggaagctgaccctcatcaccagggtgggcctggccctgagcctcttctgcctgctgctgtgcatcctgaccttcctgctggtgcggcccatccagggcagcaggaccaccatccacctgcacctgtgcatctgcctgtttgtgggcagcaccatcttcctggccggcattgaaaatgaaggaggccaggtgggcctgcgctgccgcctggtggccggcctgctgcactactgcttcctggccgccttctgctggatgagcctggagggcctggagctgtacttcctggtggtgcgggtcttccagggccagggcctgagcacccgctggctgtgcctgattggctacggcgtgcccctgctgattgtgggcgtgtctgctgccatctacagcaagggctacggccggccccgctactgctggctggactttgagcagggcttcctgtggagcttcctgggccctgtgaccttcatcatcctgtgcaatgctgtgatctttgtgaccaccgtgtggaagctgacccagaagttcagcgagatcaacccagacatgaagaagctgaagaaggcccgggccctgaccatcacagccatcgcccagctgttcctgctgggctgcacctgggtgtttggcctcttcatctttgatgacaggagcctggtgctgacctacgtgttcaccatcctgaactgcctgcagggcgccttcctgtacctgctgcactgcctgctgaacaagaaggtgcgggaggagtacaggaagtgggcctgcctggtggccggcggcagcaagtacagcgagttcaccagcaccaccagcggcaccggccacaaccagacccgggccctgcgggccagcgagagcggcatctag

SEQ ID NO: 231096 - DNA, 2508 bp, Artificial Sequence
  derived and/or modified sequence
atgggcggccgggtgttcctggccttctgcgtgtggctgaccctgccaggtgctgagacacaggattcaagaggttgcgctaggtggtgtccacagaactcttcatgcgtgaacgcgaccgcatgcagatgtaaccccggcttttccagcttcagtgaaatcataacaacacctacggagacttgcgatgatattaatgaatgtgctacacctagcaaagtgagctgcggaaaattcagtgactgttggaacacggagggatcatatgattgcgtgtgcagccccggatacgagcctgtctccggcgcaaaaacgtttaagaacgagtctgaaaacacctgtcaagacgtcgatgagtgccaacagaatccacgtctgtgtaaatcctacgggacatgcgtgaacacgctgggatcgtacacatgccaatgtctaccaggttttaagtttatcccagaggatcccaaggtgtgcaccgacgtgaacgagtgtaccagcgggcagaatccatgccactccagtactcactgtcttaataacgtgggatcctaccagtgtcgctgccgccccggctggcagcccattcccggctcacctaacggtcctaataataccgtgtgtgaagacgtggacgagtgttctagtggacagcatcagtgcgactctagtacagtttgcttcaacaccgtgggtagctattcttgccgctgtcgtccagggtggaaaccgagacatgggataccaaacaaccagaaggacactgtgtgcgaggatatgaccttttctacctggaccccgccccccggcgtgcattctcagacactgtcccgctttttcgataaggtgcaggacctgggaagagactctaagaccagctccgcagaagtgaccatccaaaacgtcatcaaactggttgacgagcttatggaagctcctggagacgtggaagccctggcgccccccgtacgacatcttatcgctacccaattgctcagtaatcttgaagatatcatgagaatcctggcgaaatctctccccaagggcccattcacgtacatctccccatccaacacagagttgacactgatgatccaggagaggggtgataagaatgtgacaatggggcagagttccgcccggatgaaactcaattgggctgttgctgccggggcggaggacccaggcccggcagtagccgggatcctgtcaatccagaatatgaccaccctgctagccaacgctagcctgaacctacactccaaaaaacaggctgagctggaggaaatatacgaaagttccattagaggcgtgcaacttcggcgcttgagcgccgtgaatagtatattcttgagccacaacaacactaaagagttgaacagtccaattttgttcgcattctctcacctggaaagcagtgacggagaggcaggcagagatccacccgctaaggatgtcatgcctggcccgcgccaagagctgctgtgtgcattctggaagagtgatagcgaccgtggcggccactgggcaaccgagggttgtcaggttctgggctctaagaatggatccacaacctgtcagtgttcacatctcagcagcttcgccatcctgatggcccactacgacgtggaggactggaagctgacgctgattaccagagtaggactcgctctatccctgttctgccttcttctctgtatcctcacgtttctgctggtgaggcctatacagggtagtcggacaactatccatctgcatttatgcatatgcctatttgtgggcagtactatctttctggccggaatcgaaaacgagggtggccaggtgggcttaaggtgccgactcgtggccggcttgctgcattattgtttcttggcagctttctgttggatgagtttagaagggctggagctctactttctggtggtgcgcgtgtttcaaggacaggggctttccacccgatggctgtgtctcattggttatggcgtcccactgctgattgtaggggtatcggctgctatttattccaaaggctacgggagaccccgttactgctggctagatttcgaacagggttttctgtggtctttcctgggccctgtgacctttattatcctgtgcaacgcagtcatcttcgttacaaccgtttggaagctcacccagaagttttcagagataaatccagacatgaaaaagttgaagaaagctcgagcgttaaccattacggcaatagcccagttgttcctgctgggctgtacatgggtgttcggcttgtttatctttgatgatcgcagcctggtgctaacctacgttttcactattctgaactgtctacaaggagcattcttatatctcctacattgcttgttgaacaagaaggtgcgggaagaatatagaaagtgggcctgccttgtggctggcggaagcaagtatagtgagtttacaagcaccacttctgggaccgggcataatcagacccgcgctttgagggcttccgaatcgggcatctag

SEQ ID NO: 231097 - DNA, 2508 bp, Artificial Sequence
  derived and/or modified sequence
atgggaggtagagtgtttctcgccttttgcgtatggctgaccctgccgggtgctgagacacaggatagcagaggctgcgcacgctggtgtccccagaactcttcctgtgttaatgctacggcctgcaggtgcaaccccggattttcgtccttttctgaaattataaccacaccaacggaaacctgcgatgatattaacgaatgtgccaccccctccaaggtgtcatgtgggaaattctcagattgttggaataccgagggctcttatgattgtgtgtgttcacctgggtatgagccggtgtcaggagctaaaacctttaaaaatgaatcagaaaacacctgtcaagacgtggacgaatgccaacagaatccacggctgtgtaaatcctatggaacctgtgttaatacactcgggagctatacctgtcagtgcctgcccggattcaaattcatccctgaggatcctaaagtctgtaccgatgtgaatgagtgcacctcaggtcagaacccctgccatagttccacgcactgtctgaacaacgtcggcagctatcagtgtcgctgcaggcctggctggcagcctattcccggatctccaaacgggccaaacaacactgtgtgtgaagacgtggacgaatgcagcagcgggcaacaccaatgcgatagctctactgtgtgtttcaacaccgtggggagttacagttgccggtgccgtcccggatggaaacccaggcacgggatcccgaacaaccagaaagataccgtgtgcgaagacatgacattttcaacatggacgccaccgccaggggtgcactctcaaacactgagtaggttcttcgataaggtgcaggatctaggccgagatagcaaaacgtctagcgcagaagtaactatacaaaacgtcatcaagttggtggacgagcttatggaggccccaggagacgtggaggcccttgcaccccctgtgaggcacctgatagctactcagctgctcagtaacctggaagatattatgaggatcttggccaagtccctaccgaaagggcctttcacgtatatctccccttcaaacactgaactaaccctcatgattcaagagcggggagataaaaacgtcacgatgggtcagagctctgctagaatgaagctgaactgggccgtcgccgctggagctgaggatccaggaccggcagtagccggtatactgtccatacaaaatatgaccacactgcttgccaatgcgtctttaaacctgcattccaaaaagcaggcggagttagaagagatctacgagtcttcaatccgcggagtccagttacggaggctgagcgcagttaactccatttttctttcacataataatactaaggaactgaatagtcctatcctattcgcattctcccatctcgagtcaagcgacggagaagccggtagagatcctccggcaaaggacgtcatgccgggtccgagacaggaactactttgcgcattctggaagtctgacagcgatcggggtgggcattgggctacagaagggtgccaagtgcttgggtccaagaacggctccaccacatgtcaatgttcacatctaagtagctttgcaattttgatggcccactatgatgtcgaagattggaagttgactctgattaccagggttggcttggctcttagtctgttttgtttgctgctgtgcatcctcacgtttctcctggttcggccaatccagggaagcagaacaacaatccatctacatttgtgtatctgtctgttcgtcggctccacaattttcctggcgggaattgaaaatgaggggggacaggtaggcctgaggtgccgattggtggcgggtctcctgcattactgttttttggctgcattctgctggatgagcctggagggcctcgaattgtactttcttgtggtgcgcgtcttccaggggcaaggcctgtccacacggtggctgtgcttgattgggtatggcgtgcctctgctgattgttggtgtcagcgctgcaatttattccaaaggttatggaagacctagatactgttggttagactttgagcaaggctttctttggagtttcttaggtcctgtgacctttattatcctgtgtaatgctgtcatctttgtcacaacagtatggaagttaactcagaagttcagtgagataaatcccgatatgaaaaaacttaagaaggcacgagcactgacaattaccgccatagcgcagttatttctccttgggtgtacctgggtcttcggtctgttcattttcgatgacaggtcgttggttctgacctacgtgttcacaatactcaattgtttgcaaggcgctttcctgtacctgcttcactgtctgcttaataagaaagttcgcgaggagtatcgcaagtgggcttgtctggttgctgggggaagtaaatattcggagttcacttcaaccacctctggcacaggccacaaccaaacccgcgctctcagagcctccgagtctggtatctag

SEQ ID NO: 231098 - DNA, 3229 bp, Artificial Sequence
  derived and/or modified sequence
cgccccccctccttcataaagtcctggcctcgggacagcctgcacagctgcctagcctgtggagacgggacagccctgtcccactcactctttcccctgccgctcctgccggcagctccaaccatgggaggccgcgtctttctcgcattctgtgtctggctgactctgccgggagctgaaacccaggactccaggggctgtgcccggtggtgccctcagaactcctcgtgtgtcaatgccaccgcctgtcgctgcaatccagggttcagctctttttctgagatcatcaccaccccgacggagacttgtgacgacatcaacgagtgtgcaacaccgtcgaaagtgtcatgcggaaaattctcggactgctggaacacagaggggagctacgactgcgtgtgcagcccgggatatgagcctgtttctggggcaaaaacattcaagaatgagagcgagaacacctgtcaagatgtggacgaatgtcagcagaacccaaggctctgtaaaagctacggcacctgcgtcaacacccttggcagctatacctgccagtgcctgcctggcttcaagttcatacctgaggatccgaaggtctgcacagatgtgaatgaatgcacctccggacaaaacccgtgccacagctccacccactgcctcaacaacgtgggcagctatcagtgccgctgccgcccgggctggcaaccgattccggggtcccccaatggcccaaacaataccgtctgtgaagatgtggacgagtgcagctccgggcagcatcagtgtgacagctccaccgtctgcttcaacaccgtgggttcatacagctgccgctgccgcccaggctggaagcccagacacggaatcccgaataaccaaaaggacactgtctgtgaagatatgactttctccacctggaccccgccccctggagtccacagccagacgctttcccgattcttcgacaaagtccaggacctgggcagagactccaagacaagctcagccgaggtcaccatccagaatgtcatcaaattggtggatgaactgatggaagctcctggagacgtagaggccctggcgccacctgtccggcacctcatagccacccagctgctctcaaaccttgaagatatcatgaggatcctggccaagagcctgcctaaaggccccttcacctacatttccccttcgaacacagagctgaccctgatgatccaggagcggggggacaagaacgtcactatgggtcagagcagcgcacgcatgaagctgaattgggctgtggcagctggagccgaggatccaggccccgccgtggcgggcatcctctccatccagaacatgacgacattgctggccaatgcctccttgaacctgcattccaagaagcaagccgaactggaggagatatatgaaagcagcatccgtggtgtccaactcagacgcctctctgccgtcaactccatctttctgagccacaacaacaccaaggaactcaactcccccatccttttcgccttctcccaccttgagtcctccgatggggaggcgggaagagaccctcctgccaaggacgtgatgcctgggccacggcaggagctgctctgtgccttctggaagagtgacagcgacaggggagggcactgggccaccgagggctgccaggtgctgggcagcaagaacggcagcaccacctgccaatgcagccacctgagcagctttgcgatccttatggctcattatgacgtggaggactggaagctgaccctgatcaccagggtgggactggcgctgtcactcttctgcctgctgctgtgcatcctcactttcctgctggtgcggcccatccagggctcgcgcaccaccatacacctgcacctctgcatctgcctcttcgtgggctccaccatcttcctggccggcatcgagaacgaaggcggccaggtggggctgcgctgccgcctggtggccgggctgctgcactactgtttcctggccgccttctgctggatgagcctcgaaggcctggagctctactttcttgtggtgcgcgtgttccaaggccagggcctgagtacgcgctggctctgcctgatcggctatggcgtgcccctgctcatcgtgggcgtctcggctgccatctacagcaagggctacggccgccccagatactgctggttggactttgagcagggcttcctctggagcttcttgggacctgtgaccttcatcattttgtgcaatgctgtcattttcgtgactaccgtctggaagctcactcagaagttttctgaaatcaatccagacatgaagaaattaaagaaggcgagggcgctgaccatcacggccatcgcgcagctcttcctgttgggctgcacctgggtctttggcctgttcatcttcgacgatcggagcttggtgctgacctatgtgtttaccatcctcaactgcctgcagggcgccttcctctacctgctgcactgcctgctcaacaagaaggttcgggaagaataccggaagtgggcctgcctagttgctggggggagcaagtactcagaattcacctccaccacgtctggcactggccacaatcagacccgggccctcagggcatcagagtccggcatatgaaggcgcatggttctggacggcccagcagctcctgtggccacagcagctttgtacacgaagaccatccatcctcccttcgtccaccactctactccctccaccctccctccctgatcccgtgtgccaccaggagggagtggcagctatagtctggcaccaaagtccaggacacccagtggggtggagtcggagccactggtcctgctgctggctgcctctctgctccaccttgtgacccagggtggggacaggggctggcccagggctgcaatgcagcatgttgccctggcacctgtggccagtactcgggacagactaagggcgcttgtcccatcctggacttttcctctcatgtctttgctgcagaactgaagagactaggcgctggggctcagcttccctcttaagctaagactgatgtcagaggccccatggcgaggccccttggggccactgcctgaggctcacggtacagaggcctgccctgcctggccgggcaggaggttctcactgttgtgaaggttgtagacgttgtgtaatgtgtttttatctgttaaaatttttcagtgttgacacttaaaattaaacacatgcatac

SEQ ID NO: 231099 - DNA, 2508 bp, Artificial Sequence
  derived and/or modified sequence
atgggcggcagagtgttcctggccttctgcgtgtggctgaccctgcccggcgccgagacccaggacagcagaggctgcgccagatggtgcccccagaacagcagctgcgtgaacgccaccgcctgcagatgcaaccccggcttcagcagcttcagcgagatcatcaccacccccaccgagacctgcgacgacatcaacgagtgcgccacccccagcaaggtgagctgcggcaagttcagcgactgctggaacaccgagggcagctacgactgcgtgtgcagccccggctacgagcccgtgagcggcgccaagaccttcaagaacgagagcgagaacacctgccaggacgtggacgagtgccagcagaaccccagactgtgcaagagctacggcacctgcgtgaacaccctgggcagctacacctgccagtgcctgcccggcttcaagttcatccccgaggaccccaaggtgtgcaccgacgtgaacgagtgcaccagcggccagaacccctgccacagcagcacccactgcctgaacaacgtgggcagctaccagtgcagatgcagacccggctggcagcccatccccggcagccccaacggccccaacaacaccgtgtgcgaggacgtggacgagtgcagcagcggccagcaccagtgcgacagcagcaccgtgtgcttcaacaccgtgggcagctacagctgcagatgcagacccggctggaagcccagacacggcatccccaacaaccagaaggacaccgtgtgcgaggacatgaccttcagcacctggacccccccccccggcgtgcacagccagaccctgagcagattcttcgacaaggtgcaggacctgggcagagacagcaagaccagcagcgccgaggtgaccatccagaacgtgatcaagctggtggacgagctgatggaggcccccggcgacgtggaggccctggccccccccgtgagacacctgatcgccacccagctgctgagcaacctggaggacatcatgagaatcctggccaagagcctgcccaagggccccttcacctacatcagccccagcaacaccgagctgaccctgatgatccaggagagaggcgacaagaacgtgaccatgggccagagcagcgccagaatgaagctgaactgggccgtggccgccggcgccgaggaccccggccccgccgtggccggcatcctgagcatccagaacatgaccaccctgctggccaacgccagcctgaacctgcacagcaagaagcaggccgagctggaggagatctacgagagcagcatcagaggcgtgcagctgagaagactgagcgccgtgaacagcatcttcctgagccacaacaacaccaaggagctgaacagccccatcctgttcgccttcagccacctggagagcagcgacggcgaggccggcagagacccccccgccaaggacgtgatgcccggccccagacaggagctgctgtgcgccttctggaagagcgacagcgacagaggcggccactgggccaccgagggctgccaggtgctgggcagcaagaacggcagcaccacctgccagtgcagccacctgagcagcttcgccatcctgatggcccactacgacgtggaggactggaagctgaccctgatcaccagagtgggcctggccctgagcctgttctgcctgctgctgtgcatcctgaccttcctgctggtgagacccatccagggcagcagaaccaccatccacctgcacctgtgcatctgcctgttcgtgggcagcaccatcttcctggccggcatcgagaacgagggcggccaggtgggcctgagatgcagactggtggccggcctgctgcactactgcttcctggccgccttctgctggatgagcctggagggcctggagctgtacttcctggtggtgagagtgttccagggccagggcctgagcaccagatggctgtgcctgatcggctacggcgtgcccctgctgatcgtgggcgtgagcgccgccatctacagcaagggctacggcagacccagatactgctggctggacttcgagcagggcttcctgtggagcttcctgggccccgtgaccttcatcatcctgtgcaacgccgtgatcttcgtgaccaccgtgtggaagctgacccagaagttcagcgagatcaaccccgacatgaagaagctgaagaaggccagagccctgaccatcaccgccatcgcccagctgttcctgctgggctgcacctgggtgttcggcctgttcatcttcgacgacagaagcctggtgctgacctacgtgttcaccatcctgaactgcctgcagggcgccttcctgtacctgctgcactgcctgctgaacaagaaggtgagagaggagtacagaaagtgggcctgcctggtggccggcggcagcaagtacagcgagttcaccagcaccaccagcggcaccggccacaaccagaccagagccctgagagccagcgagagcggcatctag

SEQ ID NO: 231100 - DNA, 1431 bp, Artificial Sequence
  derived and/or modified sequence
atgagtactcagcggctgaggaatgaggactaccacgattactcttccaccgacgtctcccccgaggagagtccaagtgaaggtctcaataatctttcttcacccggttcgtatcagagattcggacaaagcaattcaacaacctggtttcagacgctgatccatcttcttaaaggcaatattggtactggcctgctgggcttgccactggccgtgaagaacgctggcatcgtaatgggacccatatccttgttgattatcggtattgtggccgtacattgcatgggtattctggttaaatgcgcccaccatttctgccgccgattgaacaagtcttttgtagattacggggacactgtgatgtacggtctggaaagcagcccgtgctcatggctccgcaaccatgctcactggggtagaagagtagtggatttctttctcatcgtcacacagttgggattctgttgcgtttatttcgtcttcctcgccgacaacttcaagcaggtaattgaagcagcgaacggaacaaccaataattgtcacaataatgagaccgtgattcttactccaacaatggacagtaggttgtacatgctttcattccttccattcctcgtgcttcttgtatttatcagaaacctgagggctctatcaatcttcagtcttcttgctaatattactatgcttgtgagtctggttatgatatatcagttcattgtgcaaaggatccccgacccatctcacctgcctctcgttgctccgtggaagacctaccctttgttcttcggcactgctatttttagctttgagggaattggtatggttcttcccctcgagaacaagatgaaggaccccagaaaattccccctcatcctgtacctaggcatggtaattgtgaccattctctacatctcattgggctgcctggggtatttgcaatttggtgccaacatacagggatccatcacattaaaccttcctaactgttggctgtaccaaagcgtcaaactgctatacagcatcggaattttcttcacttatgctctgcagttttacgtgccagctgagatcatcatcccattctttgtcagtcgcgctcccgagcactgcgagcttgtcgtggacttgtttgtgaggactgtgcttgtctgcttgacctgtattctggccattctgatacccagactggacttggttatctccttagtggggtccgtgtccagttccgctttggccctaatcattccacccttgctggaagttacaaccttctattctgaaggtatgtcacctcttacaattttcaaggatgccttaattagtattttggggtttgttggtttcgtggtcgggacctacgaggccttgtatgaactgattcagcccagtaacgccccaattttcatcaacagcacttgcgctttcatatag

SEQ ID NO: 231101 - DNA, 1431 bp, Artificial Sequence
  derived and/or modified sequence
atgtccacacagagattgcggaacgaagattaccacgactattcatccaccgacgtgtctcccgaggaatcaccgagcgagggtctgaataacctctcatctccaggctcttaccagcgatttgggcagtctaatagtactacgtggtttcagacactcattcacctgttaaaaggcaacattgggacaggactactgggactccccctggccgtaaagaacgcaggcatagtgatggggcctatcagtctgctgatcataggcatagtagctgtgcattgcatgggaattttagtgaaatgcgcacatcatttctgcagaagacttaataaaagctttgtggactacggggatacagtgatgtacggtctcgaatcgagcccatgttcctggctccggaaccacgctcattggggccgaagggtggtcgactttttcttgatcgtaacacaactgggtttttgctgcgtatattttgtatttcttgccgacaacttcaagcaagtcatagaggcagctaacggaactactaacaattgtcacaataacgagactgtgatcctcacaccaaccatggacagcagactgtatatgcttagctttctgcccttcttggttctcctcgtatttattcgcaacttgcgcgccttgagcatcttctccctcctggctaacattacaatgttggtcagcctcgtcatgatctatcagtttatagtgcagagaattcccgacccaagccatctcccactggtggcaccctggaaaacataccctctgttttttggaaccgcgatcttcagcttcgagggcattggcatggtgctgccactcgagaacaagatgaaggatccgagaaaattcccattaatcctgtatctgggcatggtcattgttacaattctgtatatttcactggggtgcctgggataccttcaatttggagctaatattcagggatcaatcacgcttaatttacctaactgctggctgtaccagtcagttaagctcctttatagcattggcatattttttacttatgccctgcaattttacgtacccgctgaaatcatcatccctttcttcgtgtcccgcgcccctgaacactgtgagttggtggtagacctgttcgtgagaacagtactggtctgccttacgtgcattctcgcaatcctaatccctcggctcgacctagtgataagcctagtgggcagcgtgagtagctcagccctggccttaattattccccctctgctggaagtcacgaccttctattccgaggggatgtctcccctgacaatttttaaggatgccctcatttctattctcgggtttgtcgggttcgtcgtagggacgtatgaggcactctacgagctgattcagccttctaatgcacctatctttatcaactcaacctgcgcattcatttag

SEQ ID NO: 231102 - DNA, 1431 bp, Artificial Sequence
  derived and/or modified sequence
atgagcacccagaggctgagaaatgaagactaccatgactacagcagcacagatgtgtccccagaggagagccccagcgagggcctgaacaacctgagcagccctggcagctaccagagatttggccagagcaacagcaccacctggttccagaccctcatccacctgctgaagggcaacattggaacaggcctgctgggcctgcccctggccgtgaagaatgccggcatcgtgatgggccccatcagcctgctgatcattggaattgtggccgtgcactgcatgggcatcctggtgaagtgtgcccaccacttctgccggcggctgaacaagagctttgtggactatggagacacagtgatgtatggcctggagagcagcccctgctcctggctgagaaatcatgcccactggggccggcgggtggtggacttcttcctgattgtgacccagctgggcttctgctgcgtgtactttgtgttcctggccgacaacttcaagcaggtgattgaggccgccaacggcaccaccaacaactgccacaacaatgaaacagtcatcctgacccccaccatggacagccggctgtacatgctgtccttcctgcccttcctggtgctgctggtgttcatccggaacctgcgggccctgagcatcttcagcctgctggccaacatcaccatgctggtgtccctggtgatgatctaccagttcatcgtgcagaggatcccagaccccagccacctgcccctggtggccccctggaagacctaccccctcttcttcggcacagccatcttctcctttgagggcatcggcatggtgctgcccctggagaacaagatgaaggaccccaggaagttccccctcatcctgtacctgggcatggtgattgtgaccatcctgtacatcagcctgggctgcctgggctacctgcagtttggagccaacatccagggcagcatcaccctgaacctgcccaactgctggctgtaccagagcgtgaagctgctgtacagcatcggcatcttcttcacctacgccctgcagttctacgtgcctgctgagatcatcatccccttctttgtgtcccgggcccctgagcactgtgagctggtggtggacctgtttgtgaggacagtgctggtgtgcctgacctgcatcctggccatcctgatcccccggctggacctggtgatcagcctggtgggctctgtgagcagcagcgccctggccctgatcatcccccccctgctggaggtgaccaccttctacagcgagggcatgagccccctgaccatcttcaaggatgccctgatcagcatcctgggctttgtgggctttgtggtgggcacctatgaggccctgtatgagctgatccagcccagcaatgcccccatcttcatcaacagcacctgtgccttcatctag

SEQ ID NO: 231103 - DNA, 1431 bp, Artificial Sequence
  derived and/or modified sequence
atgagcacccagcggctgcggaacgaggactaccacgactacagctccactgacgtgtccccagaggagtctcctagtgaaggactgaacaatttgagttcccctggcagttatcaaaggtttggacagtcaaattcaaccacttggtttcagactctgattcatctcctcaaagggaatattggaacaggtctgctgggactcccactggcagtgaagaatgccggaattgttatgggccctattagcttgctcatcattggcatcgtggcagtgcactgcatgggcatcctggtaaagtgtgcccaccacttctgtcgtcgcctcaacaagtcttttgtggattacggcgacactgtgatgtatggtttagaatctagcccctgctcctggttacgtaaccacgctcactggggccggagagttgtggacttctttctcattgtgacccagttgggtttttgctgtgtgtactttgtttttctggctgataacttcaaacaagtgatcgaggcggcaaatggtacaactaacaactgccacaacaacgaaactgtgatcttgacgccaactatggattcacggctgtacatgctatctttcctgcctttcctggttttgctggtctttattaggaacctgcgagcattgtcgatctttagcttactggccaacattaccatgctggtttccttggtgatgatctatcagtttatagtgcagcgcatccccgatccgagccaccttccattagtggctccatggaagacctatcccttgttctttgggaccgccatcttcagctttgagggaattggtatggtcctgcctttagagaataaaatgaaagaccctcgtaaatttcccctgattttgtatcttggaatggtcatagttacaattctctatatttccctgggttgcctcgggtacctccagttcggggccaacatacaagggtctatcacactgaacttacctaactgttggctttaccagtctgtcaagttgctatattccatcggcattttttttacctacgcactgcagttttacgtaccagcagagattatcatcccatttttcgtgtcaagggctccagaacattgcgagctggtggtggacctgtttgtgagaaccgtactggtgtgtctgacatgcatcttggccattctgatccccagactcgacctggttatctcccttgttggcagtgtatcttcctctgccctcgcgctcattatcccgccactgctggaggtgacaacattctactccgaaggaatgtcccccctcacgatttttaaggacgccttgatttcaattttggggtttgttggtttcgtggtaggaacatacgaggctctatatgaacttatccagccatcaaatgctccaattttcatcaacagtacttgtgccttcatatag

SEQ ID NO: 231104 - DNA, 1431 bp, Artificial Sequence
  derived and/or modified sequence
atgagcacccagcggctgcggaacgaggactaccacgactacagctccaccgacgtgagcccagaagaaagtccctcagagggcctgaataatctaagcagccccggcagctatcagcggttcgggcagagcaactcaactacatggtttcaaacacttatccacttgctgaaaggcaacatcggcaccgggcttctcggattacccttagctgtcaagaatgccgggattgtgatgggcccaatttcactgcttataattggaatcgttgccgtccactgcatgggtattctggttaagtgtgcccaccacttctgccgccgactgaacaaaagctttgttgattacggcgacacagtcatgtatgggctcgagtcttccccctgtagttggctccgaaaccatgcacactggggccgaagagtcgttgattttttcctgatcgtgacgcagctggggttttgctgcgtctactttgtttttctcgctgacaactttaagcaggtcattgaagctgcgaatggaacaaccaataactgccacaacaacgagactgtaattctgaccccaaccatggatagcagactgtatatgctgtcctttctcccgttccttgtgctgctcgtcttcattagaaacctccgagcattgtcgatattcagtttgctggccaatatcactatgttggtgtcactcgtgatgatctaccagtttatcgtgcagcgtatcccggacccttcccacttgcctctggtggctccatggaagacttatcctctattcttcggaaccgcaatcttttcattcgaaggcataggaatggtcctgcccctggagaataagatgaaggatccccgaaaattccccctcattctgtacctcgggatggtgatcgtgaccatcttatatatctctctcggatgtttgggctacctccagtttggcgcaaatattcaggggtccatcacgctgaatctgccaaactgctggctctatcagtcagtgaagctcctttacagcattggaattttcttcacttacgccttgcaattttacgtgccagcggagatcatcatcccgtttttcgtatccagggcccctgagcactgcgaacttgtagtagacctgtttgtaagaacagtgctggtgtgcctaacttgtatactcgccatcttgattccacggttggatttagtgatcagccttgttggctccgtgtcatccagcgccttagccttgatcattccacctctcctagaggtcactacattttatagtgagggcatgtctccattgactatcttcaaggacgccctgatctctatccttggatttgtagggttcgtcgtcgggacttacgaagctttatacgagctaattcagccctccaacgcccctattttcattaactccacgtgcgcctttatttag

SEQ ID NO: 231105 - DNA, 1431 bp, Artificial Sequence
  derived and/or modified sequence
atgtccacccagcggctgagaaacgaggattaccatgattacagtagcacagacgtcagccctgaagagagcccttcagaaggactgaacaacctctcaagccctgggtcctatcagcgatttgggcagtctaactcaacaacctggtttcagacactcatccatctactcaaagggaacattggaacgggactcctagggctcccgctcgcagtgaagaatgctggcattgttatgggacccatcagcctgttgatcatagggatcgtggcagtccactgtatggggattcttgtgaagtgcgcccaccacttttgtaggagacttaataaatcattcgtcgattatggcgacaccgtcatgtacggcctggaaagcagtccctgcagctggcttcggaaccatgcacattggggacgccgtgttgtagacttctttttgattgtaacacagcttggattttgctgtgtgtatttcgtctttctggcagataacttcaaacaggtgatagaggcagccaacgggaccacaaacaactgccataacaacgagaccgtgattctcactcccacaatggatagccgcctctacatgttgagctttcttccctttcttgtgttgctggtgttcatcaggaatcttcgagcactgtccatctttagtctgctggccaacattacaatgctggtgagtctcgttatgatctaccagttcatcgtgcagcgtatccctgatccttcacacctccccctcgtcgctccttggaagacctaccccctgttcttcggcaccgccatcttttcctttgaagggataggcatggtgttaccactggagaataagatgaaggacccgagaaagtttcccttgattctctatcttgggatggtgattgtcaccattctttacatctctcttggctgccttggctatctgcagttcggcgcaaatatccagggatcaattactctcaacctccccaattgctggctgtaccagtccgtcaagcttctgtatagtataggcatcttcttcacctatgcccttcagttctatgtgcctgctgagatcataatccctttctttgtcagtagggctcccgaacattgcgaactagtggtagatctctttgtccggaccgtcctggtgtgtctgacgtgtatcctggcaatactcatccccagattagaccttgtgatatctttagtgggctccgtgtccagcagtgcactcgctcttatcattccgcctctccttgaggtgacaactttctatagcgaagggatgtcccctctcaccatattcaaggacgcactcatttcgatcctggggtttgtcggtttcgtcgtagggacttatgaagccttgtatgagctgatccagccttctaacgccccaatctttatcaacagtacttgtgccttcatttag

SEQ ID NO: 231106 - DNA, 1431 bp, Artificial Sequence
  derived and/or modified sequence
atgtcaactcagcgactgaggaacgaagactatcatgattattcctccacagatgtctcacccgaagaaagtcctagcgaggggctgaataatctaagcagccctggctcataccagcgtttcggacaaagcaattcaaccacatggttccaaacattgattcaccttctgaaaggcaatatcggcactggtctgctcgggctccctctcgccgtgaagaacgctggaattgtcatgggtcctatttccctgcttatcatcggcatcgtggcggtgcactgtatgggaatcctcgtcaagtgtgctcaccacttctgccgaaggctcaacaaatcatttgttgattacggggacactgtcatgtacgggctggagtctagcccatgttcttggctgcgcaatcacgctcattgggggaggagggtggtggattttttcctgatagtgactcagctgggtttctgctgcgtctacttcgtgtttctggcggacaattttaagcaggtgattgaagcagctaacggaaccactaataactgtcacaacaatgaaacggttatcctcactcctaccatggactcccggctgtacatgttgagcttcctgccattccttgttctgctggtcttcatccgcaacttaagagccctgtccatctttagtctactcgcgaacattactatgctagtctcgttggtcatgatttatcaattcattgtccagcgcatccctgacccttcacatctgcctctggtcgcaccttggaaaacgtaccctctcttcttcggaaccgctatattctcgttcgagggcataggcatggtgctcccactggagaacaaaatgaaggaccccaggaaatttccacttatcctgtatcttgggatggtgatcgtgaccatcctgtatatatctctgggttgcctcggctatcttcagtttggcgcaaatatccaagggagcattaccttgaatctgccgaattgttggctttaccagtccgtgaaactgctttatagtattgggatattctttacatacgccctacaattctatgtgcctgccgaaattatcatccccttctttgtgagccgggctcctgagcactgcgaattggtggtggacttattcgttcgaaccgtacttgtttgccttacctgcatcttggccattcttatcccgcgactggacctggttatttccctcgtcggatccgtgtcttcttccgccttggcactcattattccacctttacttgaagtaacaaccttctactctgaggggatgtccccattgacgatttttaaggacgccctgatatccattctagggttcgtagggttcgttgtcggcacgtacgaggcgctttatgaactgatccagccatccaacgctccgatcttcatcaactcaacctgtgccttcatttag

SEQ ID NO: 231107 - DNA, 1431 bp, Artificial Sequence
  derived and/or modified sequence
atgagcacccagagactgagaaacgaggactaccacgactacagcagcaccgacgtgagccccgaggagagccccagcgagggcctgaacaacctgagcagccccggcagctaccagagattcggccagagcaacagcaccacctggttccagaccctgatccacctgctgaagggcaacatcggcaccggcctgctgggcctgcccctggccgtgaagaacgccggcatcgtgatgggccccatcagcctgctgatcatcggcatcgtggccgtgcactgcatgggcatcctggtgaagtgcgcccaccacttctgcagaagactgaacaagagcttcgtggactacggcgacaccgtgatgtacggcctggagagcagcccctgcagctggctgagaaaccacgcccactggggcagaagagtggtggacttcttcctgatcgtgacccagctgggcttctgctgcgtgtacttcgtgttcctggccgacaacttcaagcaggtgatcgaggccgccaacggcaccaccaacaactgccacaacaacgagaccgtgatcctgacccccaccatggacagcagactgtacatgctgagcttcctgcccttcctggtgctgctggtgttcatcagaaacctgagagccctgagcatcttcagcctgctggccaacatcaccatgctggtgagcctggtgatgatctaccagttcatcgtgcagagaatccccgaccccagccacctgcccctggtggccccctggaagacctaccccctgttcttcggcaccgccatcttcagcttcgagggcatcggcatggtgctgcccctggagaacaagatgaaggaccccagaaagttccccctgatcctgtacctgggcatggtgatcgtgaccatcctgtacatcagcctgggctgcctgggctacctgcagttcggcgccaacatccagggcagcatcaccctgaacctgcccaactgctggctgtaccagagcgtgaagctgctgtacagcatcggcatcttcttcacctacgccctgcagttctacgtgcccgccgagatcatcatccccttcttcgtgagcagagcccccgagcactgcgagctggtggtggacctgttcgtgagaaccgtgctggtgtgcctgacctgcatcctggccatcctgatccccagactggacctggtgatcagcctggtgggcagcgtgagcagcagcgccctggccctgatcatcccccccctgctggaggtgaccaccttctacagcgagggcatgagccccctgaccatcttcaaggacgccctgatcagcatcctgggcttcgtgggcttcgtggtgggcacctacgaggccctgtacgagctgatccagcccagcaacgcccccatcttcatcaacagcacctgcgccttcatctag

SEQ ID NO: 231108 - protein, 678 aa, Artificial Sequence
  derived and/or modified sequence
MAWTARDRGALGLLLLGLCLCAAQRGPPGEQGPPGPPGPPGVPGIDGIDGDRGPKGPPGPPGPAGEPGKPGAPGKPGTPGADGLTGPDGSPGSIGSKGQKGEPGVPGSRGFPGRGIPGPPGPPGTAGLPGELGRVGPVGDPGRRGPPGPPGPPGPRGTIGFHDGDPLCPNACPPGRSGYPGLPGMRGHKGAKGEIGEPGRQGHKGEEGDQGELGEVGAQGPPGAQGLRGITGIVGDKGEKGARGLDGEPGPQGLPGAPGDQGQRGPPGEAGPKGDRGAEGARGIPGLPGPKGDTGLPGVDGRDGIPGMPGTKGEPGKPGPPGDAGLQGLPGVPGIPGAKGVAGEKGSTGAPGKPGQMGNSGKPGQQGPPGEVGPRGPQGLPGSRGELGPVGSPGLPGKLGSLGSPGLPGLPGPPGLPGMKGDRGVVGEPGPKGEQGASGEEGEAGERGELGDIGLPGPKGSAGNPGEPGLRGPEGSRGLPGVEGPRGPPGPRGVQGEQGATGLPGVQGPPGRAPTDQHIKQVCMRVIQEHFAEMAASLKRPDSGATGLPGRPGPPGPPGPPGENGFPGQMGIRGLPGIKGPPGALGLRGPKGDLGEKGERGPPGRGPNGLPGAIGLPGDPGPASYGRNGRDGERGPPGVAGIPGVPGPPGPPGLPGFCEPASCTMQAGQRAFNKGPDP

SEQ ID NO: 231109 - protein, 678 aa, Artificial Sequence
  derived and/or modified sequence
MAWTARDRGALGLLLLGLCLCAAQRGPPGEQGPPGPPGPPGVPGIDGIDGDRGPKGPPGPPGPAGEPGKPGAPGKPGTPGADGLTGPDGSPGSIGSKGQKGEPGVPGSRGFPGKILPLLQGPPGTAGLPGELGRVGPVGDPGRRGPPGPPGPPGPRGTIGFHDGDPLCPNACPPGRSGYPGLPGMRGHKGAKGEIGEPGRQGHKGEEGDQGELGEVGAQGPPGAQGLRGITGIVGDKGEKGARGLDGEPGPQGLPGAPGDQGQRGPPGEAGPKGDRGAEGARGIPGLPGPKGDTGLPGVDGRDGIPGMPGTKGEPGKPGPPGDAGLQGLPGVPGIPGAKGVAGEKGSTGAPGKPGQMGNSGKPGQQGPPGEVGPRGPQGLPGSRGELGPVGSPGLPGKLGSLGSPGLPGLPGPPGLPGMKGDRGVVGEPGPKGEQGASGEEGEAGERGELGDIGLPGPKGSAGNPGEPGLRGPEGSRGLPGVEGPRGPPGPRGVQGEQGATGLPGVQGPPGRAPTDQHIKQVCMRVIQEHFAEMAASLKRPDSGATGLPGRPGPPGPPGPPGENGFPGQMGIRGLPGIKGPPGALGLRGPKGDLGEKGERGPPGRGPNGLPGAIGLPGDPGPASYGRNGRDGERGPPGVAGIPGVPGPPGPPGLPGFCEPASCTMQAGQRAFNKGPDP

SEQ ID NO: 231110 - DNA, 2037 bp, Artificial Sequence
  derived and/or modified sequence
atggcctggaccgccagagacagaggcgccctgggcctgctgctgctgggcctgtgcctgtgcgccgcccagagaggcccccccggcgagcagggcccccccggcccccccggcccccccggcgtgcccggcatcgacggcatcgacggcgacagaggccccaagggcccccccggcccccccggccccgccggcgagcccggcaagcccggcgcccccggcaagcccggcacccccggcgccgacggcctgaccggccccgacggcagccccggcagcatcggcagcaagggccagaagggcgagcccggcgtgcccggcagcagaggcttccccggcagaggcatccccggcccccccggcccccccggcaccgccggcctgcccggcgagctgggcagagtgggccccgtgggcgaccccggcagaagaggcccccccggcccccccggcccccccggccccagaggcaccatcggcttccacgacggcgaccccctgtgccccaacgcctgcccccccggcagaagcggctaccccggcctgcccggcatgagaggccacaagggcgccaagggcgagatcggcgagcccggcagacagggccacaagggcgaggagggcgaccagggcgagctgggcgaggtgggcgcccagggcccccccggcgcccagggcctgagaggcatcaccggcatcgtgggcgacaagggcgagaagggcgccagaggcctggacggcgagcccggcccccagggcctgcccggcgcccccggcgaccagggccagagaggcccccccggcgaggccggccccaagggcgacagaggcgccgagggcgccagaggcatccccggcctgcccggccccaagggcgacaccggcctgcccggcgtggacggcagagacggcatccccggcatgcccggcaccaagggcgagcccggcaagcccggcccccccggcgacgccggcctgcagggcctgcccggcgtgcccggcatccccggcgccaagggcgtggccggcgagaagggcagcaccggcgcccccggcaagcccggccagatgggcaacagcggcaagcccggccagcagggcccccccggcgaggtgggccccagaggcccccagggcctgcccggcagcagaggcgagctgggccccgtgggcagccccggcctgcccggcaagctgggcagcctgggcagccccggcctgcccggcctgcccggcccccccggcctgcccggcatgaagggcgacagaggcgtggtgggcgagcccggccccaagggcgagcagggcgccagcggcgaggagggcgaggccggcgagagaggcgagctgggcgacatcggcctgcccggccccaagggcagcgccggcaaccccggcgagcccggcctgagaggccccgagggcagcagaggcctgcccggcgtggagggccccagaggcccccccggccccagaggcgtgcagggcgagcagggcgccaccggcctgcccggcgtgcagggcccccccggcagagcccccaccgaccagcacatcaagcaggtgtgcatgagagtgatccaggagcacttcgccgagatggccgccagcctgaagagacccgacagcggcgccaccggcctgcccggcagacccggcccccccggcccccccggcccccccggcgagaacggcttccccggccagatgggcatcagaggcctgcccggcatcaagggcccccccggcgccctgggcctgagaggccccaagggcgacctgggcgagaagggcgagagaggcccccccggcagaggccccaacggcctgcccggcgccatcggcctgcccggcgaccccggccccgccagctacggcagaaacggcagagacggcgagagaggcccccccggcgtggccggcatccccggcgtgcccggcccccccggcccccccggcctgcccggcttctgcgagcccgccagctgcaccatgcaggccggccagagagccttcaacaagggccccgacccctag

SEQ ID NO: 231111 - DNA, 2037 bp, Artificial Sequence
  derived and/or modified sequence
atggcctggaccgccagagacagaggcgccctgggcctgctgctgctgggcctgtgcctgtgcgccgcccagagaggcccccccggcgagcagggcccccccggcccccccggcccccccggcgtgcccggcatcgacggcatcgacggcgacagaggccccaagggcccccccggcccccccggccccgccggcgagcccggcaagcccggcgcccccggcaagcccggcacccccggcgccgacggcctgaccggccccgacggcagccccggcagcatcggcagcaagggccagaagggcgagcccggcgtgcccggcagcagaggcttccccggcaagatcctgcccctgctgcagggcccccccggcaccgccggcctgcccggcgagctgggcagagtgggccccgtgggcgaccccggcagaagaggcccccccggcccccccggcccccccggccccagaggcaccatcggcttccacgacggcgaccccctgtgccccaacgcctgcccccccggcagaagcggctaccccggcctgcccggcatgagaggccacaagggcgccaagggcgagatcggcgagcccggcagacagggccacaagggcgaggagggcgaccagggcgagctgggcgaggtgggcgcccagggcccccccggcgcccagggcctgagaggcatcaccggcatcgtgggcgacaagggcgagaagggcgccagaggcctggacggcgagcccggcccccagggcctgcccggcgcccccggcgaccagggccagagaggcccccccggcgaggccggccccaagggcgacagaggcgccgagggcgccagaggcatccccggcctgcccggccccaagggcgacaccggcctgcccggcgtggacggcagagacggcatccccggcatgcccggcaccaagggcgagcccggcaagcccggcccccccggcgacgccggcctgcagggcctgcccggcgtgcccggcatccccggcgccaagggcgtggccggcgagaagggcagcaccggcgcccccggcaagcccggccagatgggcaacagcggcaagcccggccagcagggcccccccggcgaggtgggccccagaggcccccagggcctgcccggcagcagaggcgagctgggccccgtgggcagccccggcctgcccggcaagctgggcagcctgggcagccccggcctgcccggcctgcccggcccccccggcctgcccggcatgaagggcgacagaggcgtggtgggcgagcccggccccaagggcgagcagggcgccagcggcgaggagggcgaggccggcgagagaggcgagctgggcgacatcggcctgcccggccccaagggcagcgccggcaaccccggcgagcccggcctgagaggccccgagggcagcagaggcctgcccggcgtggagggccccagaggcccccccggccccagaggcgtgcagggcgagcagggcgccaccggcctgcccggcgtgcagggcccccccggcagagcccccaccgaccagcacatcaagcaggtgtgcatgagagtgatccaggagcacttcgccgagatggccgccagcctgaagagacccgacagcggcgccaccggcctgcccggcagacccggcccccccggcccccccggcccccccggcgagaacggcttccccggccagatgggcatcagaggcctgcccggcatcaagggcccccccggcgccctgggcctgagaggccccaagggcgacctgggcgagaagggcgagagaggcccccccggcagaggccccaacggcctgcccggcgccatcggcctgcccggcgaccccggccccgccagctacggcagaaacggcagagacggcgagagaggcccccccggcgtggccggcatccccggcgtgcccggcccccccggcccccccggcctgcccggcttctgcgagcccgccagctgcaccatgcaggccggccagagagccttcaacaagggccccgacccctag

SEQ ID NO: 231112 - DNA, 2037 bp, Artificial Sequence
  derived and/or modified sequence
atggcgtggactgctagagataggggtgccctgggattgcttctgcttggtctttgcctgtgcgcagctcagaggggacctcctggcgagcaggggccccctggcccgccaggaccacctggtgtgccagggatagacggcattgacggcgatcggggcccgaaaggcccaccgggacccccaggaccagcaggtgaacctggcaagccaggggcccccggcaagccaggtacgcccggtgcagacggactaaccggacctgatggctcaccaggctccatcggatcaaagggccaaaagggtgagcctggagtgccaggtagccgggggtttcctgggagagggattccagggccccccggcccacccggcacagccgggttgcctggcgaactgggcagagttggacctgtcggtgacccagggcggagaggtccccccggaccgcccggtccgcccggaccccggggcacaataggctttcacgatggggatccactatgcccgaacgcctgtccacccgggcgatccggatacccaggtctccctggcatgcggggccacaagggtgccaagggggaaatcggagaacctggaaggcaggggcacaagggggaagaaggcgaccagggggagttaggagaagttggtgctcagggcccaccaggggcacagggattgcggggcattaccggcatagttggcgataaaggcgagaagggcgctcgcggattggatggcgagccagggccacaaggtctccctggtgccccaggcgaccaagggcaacgcgggcctccaggtgaagccgggccaaaaggcgaccgaggcgcggagggcgcgcgtggaatccccgggctgcccgggccaaagggagatactggcctcccaggcgttgacggaagggatggcattccaggcatgcccggcactaagggggagccagggaagcctggccccccaggagacgctggcctccaagggctccccggcgtccccgggatcccaggtgccaaaggggtcgccggagagaaaggttccactggcgctcctggtaaacccggccaaatgggcaactccgggaagcccgggcagcaaggaccccccggcgaggtgggcccccgcggcccacaggggcttcccggctccaggggcgagttaggacccgtgggaagcccaggactgccgggcaaactcgggtcattgggaagccccggcctgcccgggctgccaggaccccctggactacccgggatgaagggggatcgaggagtggtaggcgaaccaggcccaaaaggcgagcagggggccagcggggaggagggtgaggcaggagaacgaggcgaactgggagacattggactgcccgggcccaaagggagcgccggaaatcccggcgaacccggtctcagaggtcccgaagggtcacggggtctaccgggggtggaaggtcccagaggccctcctggacccaggggcgtccaaggcgaacagggggcgacgggccttcctggtgtgcagggccctcctggcagggctcccaccgaccagcacattaagcaggtttgcatgcgggtgattcaggagcactttgctgaaatggcagcgtccttaaagagacccgacagcggggccaccgggcttcctggaagacctgggccccccggaccgcccgggccaccaggcgagaatggctttccgggacagatgggaatccgggggctgcccggtatcaaagggccccccggtgcgcttggattaaggggtcccaaaggtgacttaggcgaaaaaggagagagagggcccccaggcagaggacctaacggcttaccgggggcaatcggcctgcccggcgatcctggccccgcaagctatgggagaaacggccgggacggcgagcgggggcctcctggcgtggccggcatacctggcgtgcccggccccccagggcctcccgggctccctggcttttgcgagcccgccagttgcacaatgcaagccggccagagggcttttaacaaggggccagatccatag

SEQ ID NO: 231113 - DNA, 2037 bp, Artificial Sequence
  derived and/or modified sequence
atggcctggacagcaagggatcgaggtgcacttggtctgctgttgctcggcctgtgcttatgtgccgcccagaggggccctccgggcgagcaaggcccaccgggccctccgggtcctccgggcgtgcctggcatcgacggcatcgacggggacaggggcccaaagggtccccccgggccccctggccctgccggcgaacccggtaaacccggagcacctgggaagccagggaccccaggcgcggatggcctcactggacccgacggcagccctggctcgataggctccaaaggtcagaaaggcgaacccggagtgcctgggagcagaggttttccaggcaagatcctgccactgctccaagggcccccaggaaccgcagggttgccaggagagttgggtcgagtggggccagtgggagatcctggccgccgcggcccacctggcccgcctggccctccgggaccacggggaacaattggcttccacgacggggatcccctatgcccgaacgcttgccctcctggccggtctggttatccagggctcccaggaatgcgcggccacaaaggcgcaaagggcgagatcggggaacctggaagacagggacataagggtgaagaaggtgatcagggagagctaggggaagtcggggcccagggtcctcccggggctcagggactccgaggcatcacgggcatcgtaggtgacaaaggcgaaaagggcgctcgggggctcgacggagagccaggccctcagggtctgcccggcgcaccaggcgatcaggggcagagaggaccaccgggtgaagccgggcctaaaggagacaggggggccgaaggtgcacggggaatccctgggcttcctgggcccaaaggggataccggactgcctggtgtggacggtagggatggcattcctggcatgccaggcacgaagggggagcctggaaagccaggccccccaggggacgccgggctccaaggtctgccaggtgtgcccgggatccccggagctaaaggagttgccggagaaaagggcagtacgggagctcccggaaagcccgggcagatggggaactccgggaagcccggccagcagggaccaccgggggaagtgggaccgcggggcccccaaggactcccagggagccggggtgagctcggccccgtgggctcacccggtttgccggggaagctggggtcccttggcagcccggggctgcccggactacccggtccacccgggcttcccgggatgaagggcgacaggggggtggtcggagaacctggacctaagggagagcagggagcgtcaggcgaggagggagaggcaggggagaggggagagttgggagatattggactccccggccccaaggggtctgcagggaatccaggcgaacccggcctgcgcggtcccgaaggcagcaggggtctgccaggcgtggaaggaccacggggacccccaggcccgcgcggcgtacaaggagagcagggggccactgggttgcctggtgtccagggtccgcctggcagagccccaacagaccaacacataaaacaggtttgcatgagagtcatccaggagcactttgcagagatggcagccagcttaaagcggccagactctggtgcgaccgggctgccgggaagacccggccccccaggcccccctggcccacctggtgaaaatggctttccgggacagatggggatccgcggccttccgggaattaagggtccaccgggcgccttagggctgagagggcccaagggggatcttggagaaaagggggaacgaggtccacctggccgaggaccgaacggcctgccaggcgctatagggctccccggagaccccggtccagcttcctatggccgtaacgggcgcgatggcgaacggggcccaccaggtgtggcaggcatcccaggcgtccctggtcctcctgggccacctggactgcccggcttttgtgagcccgcctcttgcactatgcaggccggccaaagagcttttaacaaagggcccgacccatag

SEQ ID NO: 231114 - DNA, 2037 bp, Artificial Sequence
  derived and/or modified sequence
atggcctggacagcccgggacagaggagccctgggcctgctgctgctgggcctgtgcctgtgtgccgcccagaggggccccccaggagagcagggccccccaggccccccaggccccccaggagtgcccggcattgatggcattgatggagaccggggccccaagggccccccaggccccccaggccctgctggggagcccgggaagccaggggcccctgggaagccaggcaccccaggagcagatggcctgactggaccagatggcagccctggcagcatcggcagcaagggccagaagggggagcccggggtgcccggcagccggggcttccctggccggggcatccctggccccccaggccccccaggcacagctggcctgcctggagagctgggccgggtgggccctgtgggggaccctggaagaagaggccccccaggccccccaggccccccaggcccccggggcaccatcggcttccatgatggagaccccctgtgccccaatgcctgccccccaggccgcagcggctacccaggcctgcccggcatgaggggccacaagggggccaagggggagattggagagcccggccggcagggccacaagggggaggagggggaccagggcgagctgggggaggtgggcgcccagggccccccaggggcccagggcctgcggggcatcactggaattgtgggggacaagggggagaagggggcccggggcctggatggagagcccggcccccagggcctgcccggggcccctggggaccagggccagaggggccccccaggagaggccggccccaagggggacagaggagctgagggcgcccggggcatccctggcctgcccggccccaagggggacaccggcctgcccggggtggatggaagagatggcatccctggcatgcctggcaccaagggggagcccgggaagccaggccccccaggagatgctggcctgcagggcctgcccggggtgcccggcatccctggggccaagggcgtggccggggagaagggcagcactggagcccctgggaagccaggccagatgggcaacagcggcaagccaggccagcagggccccccaggagaggtgggcccccggggcccccagggcctgcccggcagcagaggagagctgggccctgtgggcagccctggcctgcccgggaagctgggcagcctgggcagccctggcctgcccggcctgcccggccccccaggcctgcccggcatgaagggggaccggggcgtggtgggggagcccggccccaagggggagcagggcgccagcggggaggagggggaggccggggagcggggggagctgggggacatcggcctgcccggccccaagggcagcgctggcaaccctggagagcccggcctgcggggccctgagggcagccggggcctgcccggggtggagggcccccggggccccccaggcccccggggcgtgcagggcgagcagggcgccaccggcctgcccggggtgcagggccccccaggccgggcccccacagaccagcacatcaagcaggtgtgcatgagggtcatccaggagcactttgctgagatggccgccagcctgaagaggccagattctggggccaccggcctgcccggccggcccggccccccaggccccccaggccccccaggagaaaatggcttccctggccagatgggcatccggggcctgcccggcatcaagggccccccaggggccctgggcctgcggggccccaagggggacctgggggagaagggggagcggggccccccaggccggggccccaacggcctgcccggggccatcggcctgcccggggaccccggccctgccagctatggaagaaatggaagagatggagagcggggccccccaggagtggccggcatccctggggtgcccggccccccaggccccccaggcctgcccggcttctgtgagcccgccagctgcaccatgcaggccggccagagggccttcaacaagggccctgacccctag

SEQ ID NO: 231115 - DNA, 2037 bp, Artificial Sequence
  derived and/or modified sequence
atggcctggacagcccgggacagaggagccctgggcctgctgctgctgggcctgtgcctgtgtgccgcccagaggggccccccaggagagcagggccccccaggccccccaggccccccaggagtgcccggcattgatggcattgatggagaccggggccccaagggccccccaggccccccaggccctgctggggagcccgggaagccaggggcccctgggaagccaggcaccccaggagcagatggcctgactggaccagatggcagccctggcagcatcggcagcaagggccagaagggggagcccggggtgcccggcagccggggcttccctgggaagatcctgcccctgctgcagggccccccaggcacagctggcctgcctggagagctgggccgggtgggccctgtgggggaccctggaagaagaggccccccaggccccccaggccccccaggcccccggggcaccatcggcttccatgatggagaccccctgtgccccaatgcctgccccccaggccgcagcggctacccaggcctgcccggcatgaggggccacaagggggccaagggggagattggagagcccggccggcagggccacaagggggaggagggggaccagggcgagctgggggaggtgggcgcccagggccccccaggggcccagggcctgcggggcatcactggaattgtgggggacaagggggagaagggggcccggggcctggatggagagcccggcccccagggcctgcccggggcccctggggaccagggccagaggggccccccaggagaggccggccccaagggggacagaggagctgagggcgcccggggcatccctggcctgcccggccccaagggggacaccggcctgcccggggtggatggaagagatggcatccctggcatgcctggcaccaagggggagcccgggaagccaggccccccaggagatgctggcctgcagggcctgcccggggtgcccggcatccctggggccaagggcgtggccggggagaagggcagcactggagcccctgggaagccaggccagatgggcaacagcggcaagccaggccagcagggccccccaggagaggtgggcccccggggcccccagggcctgcccggcagcagaggagagctgggccctgtgggcagccctggcctgcccgggaagctgggcagcctgggcagccctggcctgcccggcctgcccggccccccaggcctgcccggcatgaagggggaccggggcgtggtgggggagcccggccccaagggggagcagggcgccagcggggaggagggggaggccggggagcggggggagctgggggacatcggcctgcccggccccaagggcagcgctggcaaccctggagagcccggcctgcggggccctgagggcagccggggcctgcccggggtggagggcccccggggccccccaggcccccggggcgtgcagggcgagcagggcgccaccggcctgcccggggtgcagggccccccaggccgggcccccacagaccagcacatcaagcaggtgtgcatgagggtcatccaggagcactttgctgagatggccgccagcctgaagaggccagattctggggccaccggcctgcccggccggcccggccccccaggccccccaggccccccaggagaaaatggcttccctggccagatgggcatccggggcctgcccggcatcaagggccccccaggggccctgggcctgcggggccccaagggggacctgggggagaagggggagcggggccccccaggccggggccccaacggcctgcccggggccatcggcctgcccggggaccccggccctgccagctatggaagaaatggaagagatggagagcggggccccccaggagtggccggcatccctggggtgcccggccccccaggccccccaggcctgcccggcttctgtgagcccgccagctgcaccatgcaggccggccagagggccttcaacaagggccctgacccctag

SEQ ID NO: 231116 - DNA, 3059 bp, Artificial Sequence
  derived and/or modified sequence
cgcgcgcctcccgggcctggacgctttggcaaccgctactcccgggggtgctttttctgcagggacgaagtgccacctatgctagtggcgggtctggaagcctagaggggaaccaggctgcagagccgggccaagggattagcggcgggcggcgggcatggcctggactgcgcgggaccgcggggccctggggctgctgctgttggggctctgcttgtgcgcggctcaaagaggtcccccgggtgagcagggtcctcccgggcctccgggcccccctggagttccaggcatcgatggcatcgacggtgaccgaggtcctaagggccccccgggccccccgggtcctgcaggtgaaccgggaaagccaggagctccaggcaagcctggcacacctggcgctgatggattaacaggacctgatggatcccctggctccattgggtcaaagggacaaaaaggagaacctggtgtgcctggatcgcgtggatttccaggccgtggtattcctggaccccctggtcctcctgggacagcaggactccctggagagcttggccgtgtaggacctgttggtgaccctgggagaagaggaccacctggcccccctggccccccaggacccagaggaacaattggctttcatgatggagatccattgtgtcccaatgcctgtccaccaggtcgctcaggatatccaggcctaccaggcatgaggggtcataaaggggctaaaggagaaattggtgaaccaggaagacaaggacacaagggtgaagaaggtgaccagggagaactcggagaagttggagctcaaggacctccaggagcccagggtttgcgaggcatcaccggcatagttggggacaaaggggaaaaaggtgctcggggcttagatggtgaacctgggcctcagggtcttcctggtgcacctggtgatcaaggacagcgaggacctccaggagaagcaggtcccaaaggagatagaggggctgaaggtgctagaggaattcctggtctccctgggcccaaaggagacacgggtttgccaggtgtggatggccgtgatgggatccctggaatgcctggaacaaagggtgaaccaggaaaacctgggcctcctggtgatgcaggattgcaggggttaccaggtgtacctggaattcctggtgcaaagggtgttgctggtgaaaagggtagcacaggtgctccagggaagcctggtcagatgggaaattcaggcaaaccgggccaacaggggcctccaggagaggtgggaccccgaggaccccaggggcttcctggcagtagaggagaattaggaccagtgggatccccaggcctaccaggtaaactgggttctctgggtagccctggcctccctggcttgcctgggccccctggacttcctggaatgaaaggtgacaggggtgtagtcggtgaaccgggtccaaagggtgaacagggtgcctctggtgaagaaggtgaagcaggagaaaggggggaacttggagatataggattacctggcccaaagggatctgcaggtaatcctggggaacctggcttgagagggcctgagggaagtcgggggcttcctggagtggaaggaccaagaggaccacctggaccccggggtgtgcagggagaacagggtgccaccggcctgcctggtgtccagggccctccgggtagagcaccgacagatcagcacattaagcaggtttgcatgagagtcatacaagaacattttgctgagatggctgccagtcttaagcgtccagactcaggtgccactgggcttcctggaaggcctggccctcctggtccccccggccctcctggagagaatggtttcccaggccagatgggaattcgtggccttccgggcattaaggggccccctggtgctcttggtttgaggggacctaaaggtgacttgggagaaaagggggagcgtggccctccaggaagaggtcccaacggtttgcctggagctataggtctcccaggtgacccaggccctgccagctatggcagaaatggccgagacggtgagcgaggccccccaggggtggcaggaattcctggagtgcctggacccccgggacctcctgggcttcccggtttctgtgagccagcctcctgcaccatgcaggctggtcagcgagcatttaacaaagggcctgacccttgaaaggcttactgctgcatggctgtctgcatgaaccacgcctggtgaaggagcctgggtgagaaacaccatccaaagctggggcaaagatgattaccttcagcatgattacaatgtattaccttcagtatgattacagaagtcctacttgacaatcacatatagaagaacggtgctattcagtaagttctctttcctttcccttggagggaagacagcagagtcatcagttaaaaaaaaaaaaagaaaaccaaacacctcccttgaataaatttatactcctgttcccaggatcttgagctttagtgtgctatacctatgtgtcttatcgtgggccactgtgccaataaacaaaaacaactgtttggtttacctcagttgcagtagttattttcatttagaagttgttctcagattattgtttcagttatatagaggattactagactagttatgaagaaaccccactacattcaatggaattggtgcttaaaatctcatcgatgtgctgtctctggagtgataagaaagggctacatctcccgaaatgatttctttacgtcatgtattggtttccttcttcaccttgaacttttgttgaactgtatgtactttaccccaaacctgttaatattttgagcgcttctatgtgaaagcaaagaaataattttaatactctggcattcataaattttattgatgagattatttattttaaaggtttgaggtaacatctctggttgtaccaaagaagaaataaatatggtttcttaatctcttgcatgttttcttataaataatcatgttcaatgaaaagaagttactgagcttatttagatacattaaacattacttaactactggttct

SEQ ID NO: 231117 - DNA, 2893 bp, Artificial Sequence
  derived and/or modified sequence
atggcctggactgcgcgggaccgcggggccctggggctgctgctgttggggctctgcttgtgcgcggctcaaagaggtcccccgggtgagcagggtcctcccgggcctccgggcccccctggagttccaggcatcgatggcatcgacggtgaccgaggtcctaagggccccccgggccccccgggtcctgcaggtgaaccgggaaagccaggagctccaggcaagcctggcacacctggcgctgatggattaacaggacctgatggatcccctggctccattgggtcaaagggacaaaaaggagaacctggtgtgcctggatcgcgtggatttccaggtaaaattctgccattacttcagggtcctcctgggacagcaggactccctggagagcttggccgtgtaggacctgttggtgaccctgggagaagaggaccacctggcccccctggccccccaggacccagaggaacaattggctttcatgatggagatccattgtgtcccaatgcctgtccaccaggtcgctcaggatatccaggcctaccaggcatgaggggtcataaaggggctaaaggagaaattggtgaaccaggaagacaaggacacaagggtgaagaaggtgaccagggagaactcggagaagttggagctcaaggacctccaggagcccagggtttgcgaggcatcaccggcatagttggggacaaaggggaaaaaggtgctcggggcttagatggtgaacctgggcctcagggtcttcctggtgcacctggtgatcaaggacagcgaggacctccaggagaagcaggtcccaaaggagatagaggggctgaaggtgctagaggaattcctggtctccctgggcccaaaggagacacgggtttgccaggtgtggatggccgtgatgggatccctggaatgcctggaacaaagggtgaaccaggaaaacctgggcctcctggtgatgcaggattgcaggggttaccaggtgtacctggaattcctggtgcaaagggtgttgctggtgaaaagggtagcacaggtgctccagggaagcctggtcagatgggaaattcaggcaaaccgggccaacaggggcctccaggagaggtgggaccccgaggaccccaggggcttcctggcagtagaggagaattaggaccagtgggatccccaggcctaccaggtaaactgggttctctgggtagccctggcctccctggcttgcctgggccccctggacttcctggaatgaaaggtgacaggggtgtagtcggtgaaccgggtccaaagggtgaacagggtgcctctggtgaagaaggtgaagcaggagaaaggggggaacttggagatataggattacctggcccaaagggatctgcaggtaatcctggggaacctggcttgagagggcctgagggaagtcgggggcttcctggagtggaaggaccaagaggaccacctggaccccggggtgtgcagggagaacagggtgccaccggcctgcctggtgtccagggccctccgggtagagcaccgacagatcagcacattaagcaggtttgcatgagagtcatacaagaacattttgctgagatggctgccagtcttaagcgtccagactcaggtgccactgggcttcctggaaggcctggccctcctggtccccccggccctcctggagagaatggtttcccaggccagatgggaattcgtggccttccgggcattaaggggccccctggtgctcttggtttgaggggacctaaaggtgacttgggagaaaagggggagcgtggccctccaggaagaggtcccaacggtttgcctggagctataggtctcccaggtgacccaggccctgccagctatggcagaaatggccgagacggtgagcgaggccccccaggggtggcaggaattcctggagtgcctggacccccgggacctcctgggcttcccggtttctgtgagccagcctcctgcaccatgcaggctggtcagcgagcatttaacaaagggcctgacccttgaaaggcttactgctgcatggctgtctgcatgaaccacgcctggtgaaggagcctgggtgagaaacaccatccaaagctggggcaaagatgattaccttcagcatgattacaatgtattaccttcagtatgattacagaagtcctacttgacaatcacatatagaagaacggtgctattcagtaagttctctttcctttcccttggagggaagacagcagagtcatcagttaaaaaaaaaaaaagaaaaccaaacacctcccttgaataaatttatactcctgttcccaggatcttgagctttagtgtgctatacctatgtgtcttatcgtgggccactgtgccaataaacaaaaacaactgtttggtttacctcagttgcagtagttattttcatttagaagttgttctcagattattgtttcagttatatagaggattactagactagttatgaagaaaccccactacattcaatggaattggtgcttaaaatctcatcgatgtgctgtctctggagtgataagaaagggctacatctcccgaaatgatttctttacgtcatgtattggtttccttcttcaccttgaacttttgttgaactgtatgtactttaccccaaacctgttaatattttgagcgcttctatgtgaaagcaaagaaataattttaatactctggcattcataaattttattgatgagattatttattttaaaggtttgaggtaacatctctggttgtaccaaagaagaaataaatatggtttcttaatctcttgcatgttttcttataaataatcatgttcaatgaaaagaagttactgagcttatttagatacattaaacattacttaact

SEQ ID NO: 231118 - DNA, 2037 bp, Artificial Sequence
  derived and/or modified sequence
atggcctggaccgcccgggaccggggcgccctgggcctgctgctgctgggcctgtgcttatgcgctgcacagaggggcccccccggagaacagggcccaccaggcccccctggaccacctggggtgccgggaatcgacggtatcgatggtgaccgcggcccgaagggccctcccggtccgcccggacccgccggagaaccgggtaagccgggagccccaggcaagccaggaacccctggggctgatggtctcactggccccgatggaagtcccggtagtatcggtagtaagggccagaagggcgagcccggggtacctggctccagagggtttcccggtagaggcatccccggtccacccggtcctccaggaaccgcgggactccctggggaactgggacgtgtaggacccgtcggggaccccggccgtcgcggccccccaggccccccagggcccccaggtccacggggtaccatcgggttccacgatggcgacccactgtgtccaaacgcctgtcccccggggaggtccggctacccaggtctgccaggaatgcggggtcataagggcgctaagggagagatcggcgaacccggccggcagggccacaagggcgaagagggagaccagggcgaactcggggaggtgggcgctcagggaccaccgggggcgcaagggctaaggggtattactggtattgtgggggacaagggagaaaagggagctcgaggtcttgatggcgagcctggcccccaggggctgccaggcgcacccggggaccaggggcaacgggggccgccaggcgaggcgggccctaaaggggacaggggcgccgagggagcaaggggcattcccggcctgcctggacccaagggggacacaggcctgccaggagtggacgggagggatggtattcctggcatgcctgggactaagggtgaacctggcaagcccggaccacctggagatgccggactgcagggactaccaggtgtgccaggcattcctggggccaaaggggttgccggagagaaggggtccacgggcgcacccggtaaaccaggacagatggggaattctggcaagcccgggcagcagggccctcctggcgaggtgggaccgcgcggcccacaggggttacctggctccaggggagaactcggccccgtaggctcgcccggtttgccaggcaagctgggcagtcttggatcccccgggttacctggtctgccggggccaccaggcctgcccggcatgaagggcgatagaggcgtcgtgggggagccgggcccaaagggcgagcagggagccagtggagaagagggcgaggctggagagaggggtgagttaggagacataggcctgcctggaccgaaggggtccgccggaaatcccggtgagccaggactccggggaccagaggggagtcggggccttcccggggtcgagggcccccggggcccacctggaccaaggggtgtgcagggggaacagggtgcaaccggtttacccggggtgcagggaccgcctggcagagcgccaactgatcagcacattaaacaggtatgcatgcgcgtcatccaggaacacttcgccgagatggccgcttccctgaaacgtcccgactcgggagctacaggcttacccggcagaccagggcccccaggtccaccagggcctccaggcgaaaatggcttccctggccaaatgggcatcagagggctccccggcattaaggggccccccggggcattgggcctccggggaccaaaaggggatctgggcgagaaaggtgagagagggccaccgggccgtggacccaatgggttacccggagcaatagggttgccaggagatcccggcccagcgtcatatggcaggaatggacgagacggtgagcgcggcccacctggcgtggccggtatccctggtgtgcctggacctcctgggccacccggtttaccaggcttctgcgaacctgcttcgtgtacaatgcaagcaggccaaagagcgttcaacaaggggcccgacccgtag

SEQ ID NO: 231119 - DNA, 2037 bp, Artificial Sequence
  derived and/or modified sequence
atggcctggaccgcccgggaccggggcgccctgggcctgctgctgctgggcctatgtctgtgcgccgcacagcgcggtcccccaggggagcaggggccgccaggacctccgggcccacctggtgtgccaggaatcgacggtatcgatggtgatagaggcccaaaaggccccccaggtccacccgggcctgccggcgaaccggggaagccaggcgccccagggaagccgggtactcctggggctgatggcctaactgggccagatggctcacccgggtctattggaagtaagggacagaaaggggagcctggagtgccgggctctcgaggtttccccgggaaaattcttccactgctgcagggccctccaggaacagccgggctcccgggagagcttggccgagtgggccccgtcggagatcctggacgacgcggaccacccgggcctccaggacccccaggccctagagggaccatcggctttcacgacggggatccattatgtccaaacgcttgccctccaggcagatcagggtatcctggcctccctggaatgcggggtcacaaaggggctaaaggcgagataggggagcccggacgccagggccataagggagaggaaggggaccaaggggaattgggcgaagtcggcgctcagggacctccaggcgcccagggactgcggggaatcactgggattgtgggcgataaaggggagaaaggagccagagggttggatggggaaccgggccctcagggactgcccggagctcccggcgaccagggacagcgtggcccccctggagaggccggacccaaaggagataggggggccgagggcgcccgtggcatccctggcctgccgggacctaaaggcgacaccggcctgcccggagtcgacggacgcgacggcatccctggcatgccagggacaaagggcgaaccaggtaagcctggacccccgggggacgcaggtctccaggggctcccaggcgtgcccggtattcctggagctaagggtgttgctggagaaaaaggttctaccggggctcccggcaagccgggccagatgggcaactctggaaagccaggacagcagggaccccccggagaggttggacctcgggggcctcagggcttaccagggagcaggggggagctgggcccagttggctcaccaggcttgcctggaaaattaggctctctgggcagtcccggcctgcccgggctgccaggtccccctggtttacctggcatgaagggagacaggggcgttgtcggagaacccggccccaagggcgaacagggcgcctcaggggaggagggtgaggctggggaaagaggcgagcttggtgatattgggctgcccggaccaaagggatctgccgggaaccctggcgagcccggtctgaggggtcctgaaggctcaaggggcctgccgggcgttgagggccccaggggccccccaggcccccgaggtgtacagggtgaacagggggccacagggctaccaggggtgcaaggaccaccgggaagagcccccactgaccagcacatcaagcaagtctgcatgcgcgtcatccaggagcatttcgccgaaatggccgcttcactgaaacggcccgattcaggagccacagggctaccaggtaggcctggaccccctggaccacccggcccacctggcgagaatgggttccccggtcagatgggcattcgcggcctacccgggatcaaaggcccaccgggagcgctgggtctgcgcgggccgaagggcgacctaggagagaaaggggagcggggtcccccaggaagaggccccaacggactgccgggggctatcggcctccctggggacccaggacccgcctcttatggccgcaacggccgcgatggcgaacgcggaccacctggagttgccggtattcccggcgtacccggccctcctggcccccccgggctgcccggattctgcgaacccgctagctgtacaatgcaagccggacaaagagcctttaacaagggccccgacccatag

SEQ ID NO: 231120 - DNA, 2037 bp, Artificial Sequence
  derived and/or modified sequence
atggcatggactgctagagataggggcgctttgggactcttgcttctcggcctgtgtctgtgcgctgcccaaagaggtcctcccggtgagcagggtccccctgggccacctggacccccaggagtcccgggaatcgatggtatcgacggggatcggggacccaagggtccacctgggcctcctgggcctgctggggaacctggtaagcctggagctcctggcaagcctggaactccaggtgctgacggcctgacgggccctgacggcagccccggttctatcggaagcaaggggcagaagggagagccaggagtgccaggctctaggggattccccggtagagggattcccggtcccccagggcctcctggtaccgctgggttgccgggagagcttgggagggtgggcccagtaggcgatccaggcaggaggggaccccctggccctccgggtcctccagggcctcgtgggacgattgggtttcacgacggagatccactttgtcctaatgcttgcccacctggacgatccggctatcccggattgcctggcatgcggggtcataagggggctaagggcgagataggagaacccggaaggcaaggacataaaggagaagaaggggatcagggggaattaggcgaagtcggcgctcagggcccaccaggagcccaggggttaagaggcatcacgggcatcgtcggcgacaaaggtgagaaaggcgctaggggtctcgacggcgagcctggacctcaggggcttccaggtgcacccggagatcaaggccaaagaggccctccgggtgaggcgggtccaaagggggaccgaggcgctgagggggctcgtgggatacccggactgccaggcccaaagggcgacaccggtttacccggagtcgacggtcgagacggaattcccggaatgccaggcaccaaaggagagcctgggaaaccaggcccacccggagatgcgggactgcaaggactgccgggagtgcccggaataccgggagcgaagggggtagccggtgaaaaggggagcacgggggctccgggtaagccgggtcagatgggtaactcaggaaaaccgggacaacagggaccgccaggcgaagtcggtccacggggaccccagggcctgccaggttccagaggggagctcggcccagtgggcagtccaggactccctgggaagcttggatcattaggctcgcccggacttcctggcctgcccggaccaccagggctccctggtatgaagggcgaccggggtgtcgtaggagagcctggacccaagggggagcagggtgcctccggggaagagggcgaggccggtgagcggggagagttaggggacataggtttgccagggcctaagggcagtgcagggaacccaggcgagcctggcctccggggaccagaagggagtagaggtctgccaggggtggagggccctaggggtccgccaggccctcgcggagtgcagggggagcagggcgctactggccttccaggagtgcagggccctcctggcagagcacccactgaccagcacatcaagcaggtgtgtatgcgcgtaattcaggagcacttcgccgaaatggcggcttctctgaaacgccctgactccggtgccacggggctgcctggcaggccaggacccccagggcctcccggtcccccaggggagaatgggtttcctggacaaatgggaatccgaggcctaccaggcatcaaggggccaccgggagccttgggtctgcggggacctaagggcgatcttggtgagaagggagagagaggaccaccgggtaggggtccaaatgggctaccaggggcaattggtctgcccggtgatcccggtcctgcatcttacggcagaaatggcagggacggcgagcgcggtccccctggagtggcaggcattccaggggtgcccggacctcctggacctcccggtttgccaggcttttgcgagcccgctagctgtacaatgcaggcaggccaacgggcattcaacaaagggcctgacccttag

SEQ ID NO: 231121 - DNA, 2037 bp, Artificial Sequence
  derived and/or modified sequence
atggcttggaccgccagggaccgaggtgccctgggccttctcctcctcggtctttgtctctgtgccgcacagagagggcctcccggagagcagggtccccctggccctcccggaccacctggggtaccaggaatcgacggaatcgatggggacaggggacccaaaggacccccaggacccccaggccctgctggagagccaggaaagcccggagcacctgggaagcccggtacccctggggcagatggcctgacggggcctgatggaagcccgggatctattggcagcaaggggcaaaaaggcgagcctggggtccccggttctaggggcttccccggtaagatcctccccctgctgcagggcccacccggtacggccggtctgccaggggaactaggtagagtgggtcctgtgggcgaccctggacgcagaggccctcctggcccacctgggcctccagggccacgaggtaccatcggtttccatgatggagatcctctgtgtccgaatgcttgcccacctggaaggagcggctatcctggcctccccggaatgagaggccacaagggagctaagggcgagatcggagaacctggaaggcaaggccacaaaggcgaagaaggggaccagggtgagttaggagaggtaggggctcagggcccaccgggtgcacagggcctgaggggaatcaccgggattgttggagacaagggcgaaaagggcgcacgcggactggacggggagcccggtccacagggtttgccaggcgcaccaggcgatcaaggacagagaggcccacctggtgaggccggacccaagggtgacaggggggcagagggagcccgaggcataccgggtctccctgggcctaagggggacaccggcctcccaggtgtggatgggcgagacggaatccccggaatgcctgggacgaagggggaacccggaaagccaggcccacccggtgacgccggattacagggtctgccgggagtacccggaattccaggggcaaagggcgtcgctggcgaaaaaggttctaccggggcaccaggaaaacccggacaaatgggaaactcaggaaagcccggacagcaaggacctcccggtgaggttgggccacgaggccctcagggtcttcctggctcaagaggcgagctcggtccagttgggtctcccggactgcccggaaagttgggctctctgggctcgccaggcctgccaggcctgcctgggccacccggtctgcccggaatgaaaggggaccgcggtgtcgtaggcgaacccggaccaaaaggtgagcaaggggcttccggtgaggaaggcgaggcaggtgagcgcggtgaactgggagatattggactacctgggcctaagggctccgctgggaatcctggggaaccaggcctccgcggacctgaaggatccagagggttaccaggggtggaaggccctcgtggcccacccggtccgagaggcgtccagggggaacaaggtgccaccggcttgccgggtgttcaggggcctcctggcagagccccaactgatcagcacatcaaacaagtgtgtatgcgggtcatacaggagcacttcgcggagatggccgcatcccttaaaaggccagattcaggagccactggactgcctggccgacctggccctccaggacccccaggccctccaggggaaaacggtttccccggacaaatgggaatcaggggattgcccggaattaagggccctccaggagctctcggattgcgaggccctaaaggagacttaggagagaagggtgagagaggtcctcctggaaggggccctaatggcctccccggagcgatcggtctcccaggtgaccccggtcccgcttcttacggcaggaacgggcgtgatggtgaaagaggcccaccaggagtggccggtataccaggtgtccctgggcctcccggtcctcccggtcttccgggattttgcgaacccgcaagctgtacaatgcaggccggtcagagggcattcaataaagggcctgacccatag

SEQ ID NO: 231122 - protein, 78 aa, Artificial Sequence
  derived and/or modified sequence
MREENKGMPSGGGSDEGLASAAARGLVEKVRQLLEAGADPNGVNRFGRRAIQVAGAPGPRRQGARERGARPRRIGAGT

SEQ ID NO: 231123 - DNA, 237 bp, Artificial Sequence
  derived and/or modified sequence
atgagagaggagaacaagggcatgcccagcggcggcggcagcgacgagggcctggccagcgccgccgccagaggcctggtggagaaggtgagacagctgctggaggccggcgccgaccccaacggcgtgaacagattcggcagaagagccatccaggtggccggcgcccccggccccagaagacagggcgccagagagagaggcgccagacccagaagaatcggcgccggcacctag

SEQ ID NO: 231124 - DNA, 237 bp, Artificial Sequence
  derived and/or modified sequence
atgcgcgaggagaacaagggcatgcccagtgggggcggcagcgatgagggtctggccagcgccgcggcgcggggactagtggagaaggtgcgacagctcctggaagccggcgcggatcccaacggagtcaaccgtttcgggaggcgcgcgatccaggtagctggggccccagggcctcgccggcagggggcgcgcgaacgcggggcgcggcctcggcggatcggggctggaacctag

SEQ ID NO: 231125 - DNA, 237 bp, Artificial Sequence
  derived and/or modified sequence
atgcgcgaagaaaacaagggtatgccctctggagggggcagcgacgaggggctcgccagcgctgctgccagaggactggttgaaaaagttagacagctcctggaggcgggcgccgaccccaatggcgtgaatcggttcggcaggcgcgccatacaggtggctggcgcacccgggccacgacggcagggggcgagagaaagaggtgcccggcccagacggatcggggcaggcacctag

SEQ ID NO: 231126 - DNA, 237 bp, Artificial Sequence
  derived and/or modified sequence
atgcgcgaggagaacaaaggaatgcccagtgggggcggaagcgatgaggggctcgccagcgctgcagctagaggtttagtggagaaagtgaggcaattgctggaagctggagcagaccccaatggagttaaccgcttcggtcggagagccatccaggttgcaggggcccccggtcctagaagacaaggagccagagagaggggcgccagacctcgtaggatcggagccggaacctag

SEQ ID NO: 231127 - DNA, 237 bp, Artificial Sequence
  derived and/or modified sequence
atgagggaggagaacaagggcatgcccagcggcggcggcagtgatgagggcctggccagcgctgctgcccggggcctggtggagaaggtgcggcagctgctggaggccggggctgaccccaatggagtgaaccgcttcggccggcgggccatccaggtggccggggcccctggcccccggcggcagggcgcccgggagcggggggcccggccccggcgcatcggggccggcacctag

SEQ ID NO: 231128 - DNA, 237 bp, Artificial Sequence
  derived and/or modified sequence
atgcgggaggagaacaagggcatgcccagcggcggcggcagcgacgagggcttggcctccgcagccgcccgcggcctcgtggagaaggttcgtcagctgctggaagccggcgctgatccaaatggcgttaaccgctttggtagacgcgccatccaggtggcgggcgctccaggccctcggcgccagggcgcccgagagagaggcgcccgtccgagacggattggtgccggcacatag

SEQ ID NO: 231129 - DNA, 237 bp, Artificial Sequence
  derived and/or modified sequence
atgcgggaggagaacaagggcatgcccagcggcggcggcagcgacgaggggttagcttcagcggccgccaggggtctggtcgaaaaagtccgtcaactgctggaggctggtgccgacccaaatggagtgaatcggtttggcaggcgggctattcaggtggcaggagcgcccggccctaggagacagggcgctcgagaacggggggccagacccagacgcatcggtgcaggaacatag

SEQ ID NO: 231130 - DNA, 237 bp, Artificial Sequence
  derived and/or modified sequence
atgcgtgaggagaataaaggtatgccttctggcggtggaagcgacgaggggcttgcttccgccgcagctcggggacttgtggagaaagtgcgacagctgctagaggcaggagccgatcctaatggcgtcaatcgatttggcagaagggccatacaggtggccggagccccagggccaaggagacagggcgctagggagcgcggtgcccgtcctagacgcatcggagccggaacatag

SEQ ID NO: 231131 - DNA, 237 bp, Artificial Sequence
  derived and/or modified sequence
atgagagaggaaaacaagggtatgccttctggtggtggtagtgatgagggcctcgcttcagcggctgctcggggtctcgtggaaaaggtacggcaactcctcgaagccggtgcggatcctaacggcgtcaatcgctttggaaggagggccattcaggtcgctggagctcccggtccccgtcgtcaaggcgctagggaaaggggcgcacggccacgccgtatcggcgctgggacatag

SEQ ID NO: 231132 - protein, 194 aa, Artificial Sequence
  derived and/or modified sequence
MAPKKDVKKPVAAAAAAPAPAPAPAPAPAPAKPKEEKIDLSAIKIEFSKEQQDEFKEAFLLFDRTGDSKITLSQVGDVLRALGTNPTNAEVRKVLGNPSNEELNAKKIEFEQFLPMMQAISNNKDQATYEDFVEGLRVFDKEGNGTVMGAELRHVLATLGEKMKEEEVEALMAGQEDSNGCINYEAFVKHIMSI

SEQ ID NO: 231133 - DNA, 585 bp, Artificial Sequence
  derived and/or modified sequence
atggctcccaaaaaagatgtcaaaaaacccgtagccgctgccgccgccgccccagcgcctgccccagcccccgccccagctccagctcctgcaaagccaaaggaggaaaagatcgatttatcagcgatcaaaatcgaattttccaaagagcagcaggacgaatttaaagaggcttttctgctattcgacagaaccggcgattccaagattacgttatcacaagttggggacgtgcttcgtgccttaggtactaaccccaccaatgcagaagtgcgcaaggtgctggggaatcctagcaacgaggagctcaatgcgaaaaaaattgaattcgagcaattcctaccgatgatgcaggccatctccaacaataaggaccaggcaacctatgaggacttcgtggagggacttagagtcttcgataaggaggggaatgggacggttatgggagccgagctgcggcacgtgctagccactctgggggaaaaaatgaaagaggaagaggtcgaagctttgatggccgggcaggaggactccaacggttgcattaactacgaggcctttgtaaaacatatcatgtctatctag

SEQ ID NO: 231134 - DNA, 585 bp, Artificial Sequence
  derived and/or modified sequence
atggcccccaagaaggatgtgaagaagcctgtggccgctgctgctgctgccccagccccagccccagccccagccccagccccagccccagccaagcccaaggaggagaagattgacctgagcgccatcaagattgagttcagcaaggagcagcaggatgagttcaaggaggccttcctgctgtttgacagaactggagacagcaagatcaccctgagccaggtgggagatgtgctgcgggccctgggcaccaaccccaccaatgctgaggtgaggaaggtgctgggcaaccccagcaatgaggagctgaatgccaagaagattgaatttgagcagttcctgcccatgatgcaggccatcagcaacaacaaggaccaggccacctatgaggactttgtggagggcctgcgggtgtttgacaaggagggcaatggcaccgtgatgggcgctgagctgcggcacgtgctggccaccctgggggagaagatgaaggaggaggaggtggaggccctgatggccggccaggaggacagcaatggctgcatcaactatgaggcctttgtgaagcacatcatgagcatctag

SEQ ID NO: 231135 - DNA, 1065 bp, Artificial Sequence
  derived and/or modified sequence
tgcccttatgccgtttaacactctgggtccatcttcaagacactgggctgtggatcaacccaaccaccactcctcttccaagaatcattttgacaggttcttttggaggaactccttctctttttaacccacccttttaaaaaaaaaaatggcaccaaagaaagacgtgaagaaacctgtggctgcggctgcggctgccccagccccggcaccggcacctgcacctgcccctgccccagccaaacccaaagaagaaaaaattgacctctctgccattaagatcgagttctctaaggaacagcaggatgaattcaaggaggcatttctcctgtttgacagaacaggtgattccaagatcaccttaagccaggtcggtgatgtccttcgagctctgggcacaaatcccaccaatgcagaggtcaggaaagttctgggaaaccccagcaatgaagagctgaatgccaagaaaattgagtttgaacaatttctgcctatgatgcaagccatttccaacaacaaggaccaggccacctatgaagactttgttgagggtctgcgtgtctttgacaaggaaggcaatggcacagtcatgggtgctgaactccgccatgttctagccaccctgggtgaaaagatgaaagaggaagaagtggaagccctgatggcaggtcaagaagactccaatggctgcatcaactacgaagcttttgtcaagcacatcatgtctatctgaatggagctctcaagaacaagcattgtttaggaagactggctggaaacttattttaatcacacccatgacaaactctccagatctgtttaccatcattcaggaaaacaaagcaatctggacggttcaagactgagcaactccctgaatttttatacatcttcagtttttctctgaattgaattcataccacacaaacaaagtgtctgctgctctagatgagaagaataaaatattgacaatctcaaatccaagcaccattctttattatctaccatgaatcaacaaacattcttaaaacaataaatcaataaacaattttggtcagtctggaa

SEQ ID NO: 231136 - DNA, 585 bp, Artificial Sequence
  derived and/or modified sequence
atggcccccaagaaggacgtgaagaagcccgtggccgccgccgccgcagctcccgccccagcaccggccccagctccagcccccgccccagccaagcccaaggaagaaaaaatcgatctgtctgccattaaaattgaattctcaaaagagcagcaggacgagttcaaagaggctttcctgctgttcgaccgaacaggtgattcaaagatcactctctctcaagtgggtgatgtgctgagggcgttaggcaccaatcccacgaatgcggaggttcgcaaagtgctgggtaatccttcgaacgaagagctaaatgccaagaagattgagttcgaacaatttctgcccatgatgcaggctatttccaataacaaagaccaggccacctacgaggatttcgttgagggccttcgtgtgttcgataaggaaggcaacgggacagtgatgggtgcagagcttaggcacgtgttagctacgttaggcgagaagatgaaggaggaagaggtggaggccttaatggccggacaagaggattccaatggctgcatcaactatgaagcattcgtgaagcatattatgtccatttag

SEQ ID NO: 231137 - DNA, 585 bp, Artificial Sequence
  derived and/or modified sequence
atggctccaaagaaagacgtaaagaaacctgtggccgcagctgccgcagcaccagcaccggctcctgcaccggcaccggcacctgcgccagcgaaacccaaagaggagaaaattgatctaagtgcgattaaaatcgagttctccaaggaacagcaggatgagtttaaagaggctttcttgctattcgatagaactggtgactcaaagataactctatctcaggtgggggatgtacttcgcgcactgggaactaacccaaccaatgccgaagtgaggaaggtacttggaaaccctagcaatgaggagcttaatgccaagaagattgagttcgaacaattcctgccgatgatgcaagccatcagcaataataaagaccaggcaacatacgaagacttcgtcgagggacttcgggtattcgataaggaaggaaatgggacagttatgggcgcagagcttagacatgtgttggcaacactcggggaaaagatgaaagaggaggaggtggaagctctcatggccggtcaggaagattctaacggttgcatcaactacgaggctttcgtgaaacatattatgtctatctag

SEQ ID NO: 231138 - DNA, 585 bp, Artificial Sequence
  derived and/or modified sequence
atggcccccaagaaggacgtgaagaagcccgtggccgccgccgccgccgcccccgcccccgcccccgcccccgcccccgcccccgcccccgccaagcccaaggaggagaagatcgacctgagcgccatcaagatcgagttcagcaaggagcagcaggacgagttcaaggaggccttcctgctgttcgacagaaccggcgacagcaagatcaccctgagccaggtgggcgacgtgctgagagccctgggcaccaaccccaccaacgccgaggtgagaaaggtgctgggcaaccccagcaacgaggagctgaacgccaagaagatcgagttcgagcagttcctgcccatgatgcaggccatcagcaacaacaaggaccaggccacctacgaggacttcgtggagggcctgagagtgttcgacaaggagggcaacggcaccgtgatgggcgccgagctgagacacgtgctggccaccctgggcgagaagatgaaggaggaggaggtggaggccctgatggccggccaggaggacagcaacggctgcatcaactacgaggccttcgtgaagcacatcatgagcatctag

SEQ ID NO: 231139 - protein, 150 aa, Artificial Sequence
  derived and/or modified sequence
MSFSADQIAEFKEAFLLFDRTGDSKITLSQVGDVLRALGTNPTNAEVRKVLGNPSNEELNAKKIEFEQFLPMMQAISNNKDQATYEDFVEGLRVFDKEGNGTVMGAELRHVLATLGEKMKEEEVEALMAGQEDSNGCINYEAFVKHIMSI

SEQ ID NO: 231140 - DNA, 453 bp, Artificial Sequence
  derived and/or modified sequence
atgtctttttctgcagatcagattgcggaattcaaagaggcgttcctactgttcgatagaaccggagatagcaaaatcaccctcagccaggtaggggatgtgctgcgggctctcgggaccaatcccacaaacgcagaagttagaaaggtccttgggaaccctagcaatgaagaacttaacgctaagaagatcgaattcgaacagttcctgcccatgatgcaggcaatatcaaataataaagatcaagcgacctatgaggactttgtagaaggtttacgtgtgttcgataaggagggcaacggtacggtaatgggggctgaactccggcacgtgctcgccaccctgggcgagaaaatgaaggaggaggaagtagaggctcttatggctgggcaagaggactctaatgggtgcatcaactacgaggctttcgtgaaacacattatgtctatttag

SEQ ID NO: 231141 - DNA, 453 bp, Artificial Sequence
  derived and/or modified sequence
atgtccttctctgctgaccagattgctgagttcaaggaggccttcctgctgtttgacagaactggagacagcaagatcaccctgagccaggtgggagatgtgctgcgggccctgggcaccaaccccaccaatgctgaggtgaggaaggtgctgggcaaccccagcaatgaggagctgaatgccaagaagattgaatttgagcagttcctgcccatgatgcaggccatcagcaacaacaaggaccaggccacctatgaggactttgtggagggcctgcgggtgtttgacaaggagggcaatggcaccgtgatgggcgctgagctgcggcacgtgctggccaccctgggggagaagatgaaggaggaggaggtggaggccctgatggccggccaggaggacagcaatggctgcatcaactatgaggcctttgtgaagcacatcatgagcatctag

SEQ ID NO: 231142 - DNA, 870 bp, Artificial Sequence
  derived and/or modified sequence
ccagggatgaccccactcagggaccggagcagccctcaactcactcttcagcttccctgctgtgttgcagcccagccgctccatcatgtccttcagtgctgaccagattgctgaattcaaggaggcatttctcctgtttgacagaacaggtgattccaagatcaccttaagccaggtcggtgatgtccttcgagctctgggcacaaatcccaccaatgcagaggtcaggaaagttctgggaaaccccagcaatgaagagctgaatgccaagaaaattgagtttgaacaatttctgcctatgatgcaagccatttccaacaacaaggaccaggccacctatgaagactttgttgagggtctgcgtgtctttgacaaggaaggcaatggcacagtcatgggtgctgaactccgccatgttctagccaccctgggtgaaaagatgaaagaggaagaagtggaagccctgatggcaggtcaagaagactccaatggctgcatcaactacgaagcttttgtcaagcacatcatgtctatctgaatggagctctcaagaacaagcattgtttaggaagactggctggaaacttattttaatcacacccatgacaaactctccagatctgtttaccatcattcaggaaaacaaagcaatctggacggttcaagactgagcaactccctgaatttttatacatcttcagtttttctctgaattgaattcataccacacaaacaaagtgtctgctgctctagatgagaagaataaaatattgacaatctcaaatccaagcaccattctttattatctaccatgaatcaacaaacattcttaaaacaataaatcaataaacaattttggtcagtctggaa

SEQ ID NO: 231143 - DNA, 453 bp, Artificial Sequence
  derived and/or modified sequence
atgagcttcagcgccgaccagatcgccgagttcaaggaggccttcttgctcttcgataggactggggatagtaaaataaccctctctcaggttggggatgtcctgagagcattgggtaccaaccccacaaacgccgaagtgaggaaggtgctgggtaacccttctaatgaagagctgaatgctaagaagatcgaattcgagcagtttcttccaatgatgcaggcaatttctaataacaaagatcaagcaacctatgaagattttgtcgagggccttcgggtgttcgataaggaaggcaatggaacagtgatgggggctgagctaagacatgtcttggccaccctgggcgagaagatgaaagaggaagaagtggaggccctgatggctggtcaggaggacagcaacggatgtattaattacgaggcatttgtgaagcacatcatgtccatttag

SEQ ID NO: 231144 - DNA, 453 bp, Artificial Sequence
  derived and/or modified sequence
atgagcttctcagctgatcaaatcgctgagttcaaagaagcctttctcctttttgaccgaacaggggattccaagatcactctgagtcaggtgggggacgtgctacgggcacttggaactaaccccacgaatgctgaggttagaaaagtcctaggtaacccctccaacgaggagctgaacgcgaaaaagatcgaatttgaacagtttctgccaatgatgcaggccatttctaacaacaaagatcaggccacatatgaagatttcgtggagggcctccgggtgttcgataaggaggggaacggaaccgtaatgggcgcagaactgcggcatgtgttagcaacactcggagagaaaatgaaggaagaggaggtcgaggccctcatggcagggcaagaggatagtaacggctgtattaattatgaggccttcgtgaaacacataatgagtatttag

SEQ ID NO: 231145 - DNA, 453 bp, Artificial Sequence
  derived and/or modified sequence
atgagcttcagcgccgaccagatcgccgagttcaaggaggccttcctgctgttcgacagaaccggcgacagcaagatcaccctgagccaggtgggcgacgtgctgagagccctgggcaccaaccccaccaacgccgaggtgagaaaggtgctgggcaaccccagcaacgaggagctgaacgccaagaagatcgagttcgagcagttcctgcccatgatgcaggccatcagcaacaacaaggaccaggccacctacgaggacttcgtggagggcctgagagtgttcgacaaggagggcaacggcaccgtgatgggcgccgagctgagacacgtgctggccaccctgggcgagaagatgaaggaggaggaggtggaggccctgatggccggccaggaggacagcaacggctgcatcaactacgaggccttcgtgaagcacatcatgagcatctag

SEQ ID NO: 231146 - protein, 151 aa, Artificial Sequence
  derived and/or modified sequence
MCDFTEDQTAEFKEAFQLFDRTGDGKILYSQCGDVMRALGQNPTNAEVLKVLGNPKSDEMNVKVLDFEHFLPMLQTVAKNKDQGTYEDYVEGLRVFDKEGNGTVMGAEIRHVLVTLGEKMTEEEVEMLVAGHEDSNGCINYEELVRMVLNG

SEQ ID NO: 231147 - DNA, 456 bp, Artificial Sequence
  derived and/or modified sequence
atgtgtgactttaccgaagatcagacggctgagtttaaggaagcattccagctctttgatcgtaccggcgacgggaaaatcttatatagtcagtgcggggatgtaatgagagctctcggtcagaatcctacaaatgccgaagttttgaaggtgctaggaaatcccaagtcagatgaaatgaatgtcaaggttctggacttcgagcacttcctccctatgctccagacagtggccaagaataaggaccaggggacttatgaagactacgtggaggggctcagggtgttcgacaaagaaggcaatggcacagtgatgggtgccgaaatcaggcacgttctagtgacactgggggagaaaatgacagaagaagaagtggagatgctggtggcggggcatgaagatagcaatggatgcatcaactacgaagagctcgtgcggatggtgctgaatggctag

SEQ ID NO: 231148 - DNA, 456 bp, Artificial Sequence
  derived and/or modified sequence
atgtgtgacttcacagaggaccagacagctgagttcaaggaggccttccagctgtttgacagaactggagatggcaagatcctgtacagccagtgtggagatgtgatgagggccctgggccagaaccccaccaatgctgaggtgctgaaggtgctgggcaaccccaagagtgatgagatgaatgtgaaggtgctggactttgagcacttcctgcccatgctgcagacagtggccaagaacaaggaccagggcacctatgaagattatgtggagggcctgcgggtgtttgacaaggagggcaatggaacagtgatgggcgctgagatcagacatgtgctggtgaccctgggggagaagatgacagaggaggaggtggagatgctggtggccggccacgaggacagcaatggctgcatcaactatgaggagctggtgaggatggtgctgaatggatag

SEQ ID NO: 231149 - DNA, 655 bp, Artificial Sequence
  derived and/or modified sequence
attactgcaggaaaaggtcccggagagctgagcagtcaagatgtgtgacttcaccgaagaccagaccgcagagttcaaggaggccttccagctgtttgaccgaacaggtgatggcaagatcctgtacagccagtgtggggatgtgatgagggccctgggccagaaccctaccaacgccgaggtgctcaaggtcctggggaaccccaagagtgatgagatgaatgtgaaggtgctggactttgagcactttctgcccatgctgcagacagtggccaagaacaaggaccagggcacctatgaggattatgtcgaaggacttcgggtgtttgacaaggaaggaaatggcaccgtcatgggtgctgaaatccggcatgttcttgtcacactgggtgagaagatgacagaggaagaagtagagatgctggtggcagggcatgaggacagcaatggttgtatcaactatgaagagctcgtccgcatggtgctgaatggctgaggaccttcccagtctccccagagtccgtgcctttccctgtgtgaattttgtatctagcctaaagtttccctaggctttcttgtctcagcaactttcccatcttgtctctcttggatgatgtttgccgtcagcattcaccaaataaacttgctctctggg

SEQ ID NO: 231150 - DNA, 456 bp, Artificial Sequence
  derived and/or modified sequence
atgtgcgacttcaccgaggaccagaccgccgagttcaaggaggcctttcagctgttcgataggacgggcgatggaaagatcttgtattctcagtgtggcgatgtcatgcgcgccctgggacaaaatccaaccaatgccgaagtgctaaaagtgctgggaaaccctaaaagcgatgaaatgaatgttaaggtcctggacttcgaacatttcctgccaatgcttcagacagtggccaaaaataaggatcagggtacatacgaagactacgttgagggtctcagggtctttgacaaagaagggaacgggacagtaatgggtgcggaaatccgtcatgtgctcgtcacactgggcgagaaaatgaccgaagaagaagtggagatgttggtggccggccatgaggatagcaatggttgtattaattacgaagaactggtcagaatggtactcaacggatag

SEQ ID NO: 231151 - DNA, 456 bp, Artificial Sequence
  derived and/or modified sequence
atgtgtgacttcacggaagatcaaactgctgagttcaaggaggcattccagctgttcgaccggaccggagacggaaaaattctctacagtcaatgtggggacgtcatgagagctctgggccagaatcctaccaatgccgaagtcctaaaggtgctggggaatccaaagagcgatgaaatgaatgtaaaagtgctcgattttgagcacttcctaccgatgttgcagaccgtggcgaaaaataaggaccaggggacctatgaggattatgtggaggggcttagggtgtttgacaaagaggggaacggcactgttatgggcgctgaaatccggcacgtgttggtcaccctgggggagaagatgacagaagaggaagtggagatgctcgtggccggacacgaagattccaacggctgtataaactacgaggaattagtccgaatggtgctgaacggctag

SEQ ID NO: 231152 - DNA, 456 bp, Artificial Sequence
  derived and/or modified sequence
atgtgcgacttcaccgaggaccagaccgccgagttcaaggaggccttccagctgttcgacagaaccggcgacggcaagatcctgtacagccagtgcggcgacgtgatgagagccctgggccagaaccccaccaacgccgaggtgctgaaggtgctgggcaaccccaagagcgacgagatgaacgtgaaggtgctggacttcgagcacttcctgcccatgctgcagaccgtggccaagaacaaggaccagggcacctacgaggactacgtggagggcctgagagtgttcgacaaggagggcaacggcaccgtgatgggcgccgagatcagacacgtgctggtgaccctgggcgagaagatgaccgaggaggaggtggagatgctggtggccggccacgaggacagcaacggctgcatcaactacgaggagctggtgagaatggtgctgaacggctag

SEQ ID NO: 231153 - protein, 491 aa, Artificial Sequence
  derived and/or modified sequence
MMSEHDLADVVQIAVEDLSPDHPVVLENHVVTDEDEPALKRQRLEINCQDPSIKSFLYSINQTICLRLDSIEAKLQALEATCKSLEEKLDLVTNKQHSPIQVPMVAGSPLGATQTCNKVRCAVPGRRQNTIVVKVPGQEDSHHEDGESGSEASDSVSSCGQAGSQSIGSNVTLITLNSEEDYPNGTWLGDENNPEMRVRCAIIPSDMLHISTNCRTAEKMALTLLDYLFHREVQAVSNLSGQGKHGKKQLDPLTIYGIRCHLFYKFGITESDWYRIKQSIDSKCRTAWRRKQRGQSLAVKSFSRRTPNSSSYCPSEPMMSTPPPASELPQPQPQPQALHYALANAQQVQIHQIGEDGQVQVIPQGHLHIAQVPQGEQVQITQDSEGNLQIHHVGQDGQLLEATRIPCLLAPSVFKASSGQVLQGAQLIAVASSDPAAAGVDGSPLQGSDIQVQYVQLAPVSDHTAGAQTAEALQPTLQPEMQLEHGAIQIQ

SEQ ID NO: 231154 - protein, 28 aa, Artificial Sequence
  derived and/or modified sequence
MMSEHDLADVVQIAVEDLSPDHPVVLEN

SEQ ID NO: 231155 - protein, 95 aa, Artificial Sequence
  derived and/or modified sequence
MMSEHDLADVVQIAVEDLSPDHPVVLENHVVTDEDEPALKRQRLEINCQDPSIKSFLYSINQTICLRLDSIEAKLQALEATCKSLEEKLDLVTNK

SEQ ID NO: 231156 - DNA, 1476 bp, Artificial Sequence
  derived and/or modified sequence
atgatgtctgaacacgacctcgctgacgtggtgcagattgccgttgaggatctttcccctgatcacccggtggtcctcgaaaatcacgttgtcaccgacgaagacgagccagctttaaagcgacagcggctggagatcaattgccaggatccctctataaagtctttcttgtactccataaatcagaccatctgcctgcgacttgattcaatagaagctaagctgcaggctctggaggcaacttgcaagtccttggaggaaaagttagatctggtaactaataagcagcattctccaattcaggtgccaatggtcgccggctctcccctcggcgccacgcagacatgtaacaaggtaaggtgtgcagtgcctggaagacgccaaaatacgatcgtagtgaaggtgcctggccaagaggactcccaccatgaggatggcgaatccggctcggaagcttccgatagcgttagttcctgcgggcaggcaggcagccagagcatcgggagcaatgttaccctcattactctaaacagtgaagaggactatcctaacggcacatggttaggagacgaaaacaaccctgagatgcgggtgcgatgcgccatcatcccgagcgacatgcttcacatttccacaaattgcaggacagccgagaagatggccttaactttgctagattacctttttcacagggaagtgcaggccgtgagtaacctttccgggcagggtaaacacggcaaaaagcagctcgatcccttgacgatctacggcatccgctgccaccttttctacaaatttggcattacagagtcagattggtaccggattaaacagtccatcgatagtaagtgccgaacagcttggagaagaaagcaaaggggccagagcttggccgtcaagagcttctccaggcgcactccaaactcaagctcctactgcccaagcgaaccaatgatgtcaacacctccccctgcatcagaacttccacagccccagcctcagcctcaggctctccactatgcccttgccaatgctcaacaggtgcagatccatcagatcggagaggatggacaggtgcaagtgattcctcagggacacctgcacatcgcacaggtgccacagggggagcaggtgcaaattacacaagactcagagggcaacctccagattcatcatgtggggcaggacgggcagctcctggaagcaacgagaatcccatgtctcctggccccttcagtctttaaggccagttctggtcaggtcttacagggggcccagctcatcgcagtggcatcatccgacccggcagcagctggcgttgatggatcccccttgcagggaagcgatatacaagtccagtacgtgcagctggcccccgtgtccgaccacacagctggggcccagacggcggaggccctgcagcccactctgcagccagaaatgcaactcgagcatggggccatccagattcagtag

SEQ ID NO: 231157 - DNA, 1476 bp, Artificial Sequence
  derived and/or modified sequence
atgatgtcagaacatgatttggctgacgtggtgcagatagcagtggaagacttatctcctgatcatccagtcgtgttggaaaatcacgtggtgactgatgaggatgagccggcccttaagaggcagagattggaaattaactgccaggacccatcaattaaatcctttctctattctatcaatcagacaatctgtctgagactggactctatcgaagcaaaattacaggccctcgaagccacttgtaaaagcctggaggagaagttggacctggtgactaataaacagcactcaccgatccaagtgccgatggttgctgggagtccactgggcgcaactcagacctgtaataaagtgcgttgcgctgtccccggccgtcggcagaacactatcgtggtcaaagtgcccgggcaagaagactcccatcacgaggacggagaatccgggtcagaagcaagcgatagtgtctcaagctgcggccaagcaggctcacagtcaatcggaagcaatgtgacactaatcacgctcaattccgaggaagattacccaaatggcacatggctcggggatgaaaataatcctgagatgcgagtgaggtgcgcaattattccatccgacatgctccatatctctaccaattgcagaacggccgaaaagatggcactgacactgttagactatctgttccaccgggaggtccaagccgtgtctaacctgagtggacagggaaaacatggtaaaaagcagctggaccccctgactatctacggcatccgttgccacctgttctacaaatttggtattactgagtctgactggtaccgcatcaaacagagtattgactctaaatgtcgaacagcatggcggcggaagcaaaggggccagtctttggccgttaaaagcttcagtcgtcggactccaaactctagtagctattgccccagcgaacccatgatgtcaacacccccccctgcctcagagttaccacagccacaaccccagccgcaggctcttcactatgccctcgctaacgcacaacaagtgcagatccatcaaatcggcgaagacggccaggtgcaggtgatccctcagggccaccttcacatcgcccaggttccccaaggcgaacaagtccagattacccaagactctgaaggcaatcttcaaatccaccatgtgggccaagatggccaactactcgaggccacacgcatcccttgcctgcttgccccatctgtgtttaaagcatcttccggacaggtgctacagggggcccagctcatcgctgtcgccagcagcgaccccgctgctgccggtgtggacgggtcacctctccagggctccgatatacaagtacagtatgtgcagctggctcccgtgagcgaccatacagcaggggcgcagaccgcggaggcattacagcctacactgcagccagagatgcaacttgagcacggggctattcagattcaatag

SEQ ID NO: 231158 - DNA, 1476 bp, Artificial Sequence
  derived and/or modified sequence
atgatgtctgaacatgacctggctgatgtggtgcagattgctgtggaggacctgagcccagaccaccctgtggtgctggagaaccacgtggtgacagatgaagatgagcccgccctgaagaggcagaggctggagatcaactgccaggaccccagcatcaagagcttcctgtacagcatcaaccagaccatctgcctgcggctggacagcattgaggccaagctgcaggccctggaggccacctgcaagagcctggaggagaagctggacctggtgaccaacaagcagcacagccccatccaggtgcccatggtggccggcagccccctgggcgccacccagacctgcaacaaggtgcgctgtgctgtgcccggccggcggcagaacaccatcgtggtgaaggtgcccggccaggaggacagccaccatgaagatggagagagcggcagcgaggccagtgacagcgtgagcagctgtggccaggccggcagccagagcatcggcagcaatgtgaccctcatcaccctgaacagcgaggaggactaccccaacggcacctggctgggagatgagaacaaccctgagatgagggtgcgctgtgccatcatccccagcgacatgctgcacatcagcaccaactgcaggacagctgagaagatggccctgaccctgctggactacctgttccaccgggaggtgcaggccgtgagcaacctgagcggccagggcaagcacggcaagaagcagctggaccccctgaccatctacggcatccgctgccacctgttctacaagtttggcatcacagaaagtgactggtaccgcatcaagcagagcattgacagcaaatgtagaacagcctggaggaggaagcagaggggccagagcctggccgtgaagagcttcagcaggaggacccccaacagcagcagctactgccccagcgagcccatgatgagcaccccacctccagccagcgagctgccccagccccagccccagccccaggccctgcactacgccctggccaatgcccagcaggtgcagatccaccagattggagaagatggccaggtgcaggtgatcccccagggccacctgcacatcgcccaggtgccccagggcgagcaggtgcagatcacccaggacagcgagggcaacctgcagatccaccacgtgggccaggacggccagctgctggaggccacccgcatcccctgcctgctggcccccagcgtcttcaaggccagcagcggccaggtgctgcagggcgcccagctgattgctgtggccagcagtgaccctgctgctgctggggtggatggcagccccctgcagggcagtgacatccaggtgcagtatgtgcagctggcccctgtgtctgaccacacagctggggcccagacagctgaggccctgcagcccaccctgcagcctgagatgcagctggagcacggggccatccagatccagtag

SEQ ID NO: 231159 - DNA, 1476 bp, Artificial Sequence
  derived and/or modified sequence
atgatgagcgagcacgacctggccgacgtggtgcagatcgccgtggaggacctcagtccagaccaccccgtagttctggagaatcatgttgttaccgacgaagacgagcccgcgttaaagaggcagagacttgagataaattgccaggatccttctattaaatcctttctgtactccattaatcagacaatctgcctgcggcttgacagcattgaagcgaaactacaggcgctggaggcgacttgcaaaagtctggaggagaaacttgatctggtgacgaataagcagcactcccctatccaggtcccaatggtggcaggtagtccacttggagcaactcagacctgtaacaaggtgaggtgcgctgtgccagggcgcagacaaaataccatcgtcgtgaaggtgcccggtcaggaggacagccatcatgaggacggcgagtcggggtcggaggcatctgatagcgtgtcatcatgtggacaagctggatcacagtctatcggtagtaacgtgaccctgatcacgctaaattccgaggaagattaccccaatggcacttggctgggggacgagaacaatcccgagatgagagtgcgttgcgccataattcccagcgatatgctccacatctcaactaattgcagaaccgctgagaaaatggccctgacactgcttgactacctcttccaccgggaagtacaagcagtgagcaacttgagcggtcaaggaaagcacgggaagaagcaactggatccactgaccatttatggtattagatgccacctcttctacaagttcggaattaccgaaagcgattggtaccgcatcaaacagagcattgacagtaagtgtaggacagcctggaggaggaaacagcggggccaaagtctggccgtgaagagcttctcacgccggacaccgaacagctcaagctattgtccctcggaacctatgatgagcacacccccccccgcaagcgagttgccccagcctcagccacagccccaagctctacattacgcacttgctaatgcccagcaagtccagatacaccaaattggtgaagatggccaggtgcaggttatccctcaaggtcatcttcatatcgcccaggtccctcagggtgagcaggttcagatcacccaggactctgagggaaatctccaaatacaccacgtcggacaggatggccagttacttgaagccacgcgcataccttgcctgctcgcgcccagcgtcttcaaagcatcgagtggacaggtgcttcagggcgcacagctcatagccgtcgcgtcctccgaccccgccgctgcgggtgtcgacgggtcacctctgcaaggcagtgatatccaagtgcagtacgtgcagcttgccccagtgagcgaccacaccgctggggcacagaccgcagaggcacttcagcccactttgcagcctgagatgcagctggaacacggggccattcaaatccaatag

SEQ ID NO: 231160 - DNA, 1476 bp, Artificial Sequence
  derived and/or modified sequence
atgatgagcgagcacgacctggccgacgtggtgcagatcgccgtggaggacctgagtcccgaccatccagtcgtgcttgaaaaccatgtggtcaccgacgaggacgaacccgcgttaaagaggcagaggctcgagatcaattgccaagaccctagtatcaaatcttttctctacagtattaaccagacaatctgtctgagactggacagcatcgaagcaaagctccaggcactggaggcaacgtgcaaatcgctcgaggagaagctggatctggtcaccaataaacaacacagccccattcaggtccccatggtggcggggtctcccctaggcgcaactcaaacgtgcaataaggtcagatgcgcagtacctgggagaaggcagaataccatagtggtcaaagtgcccggtcaagaggatagccaccatgaggatggggaatccggatctgaagccagcgactcggtgtcgtcttgtgggcaggctggctcacaatctattggaagcaatgtaaccctgataacgctcaactctgaagaagactaccccaacggcacttggctcggggacgagaacaatcctgagatgcgcgtgcggtgcgctataatccccagcgacatgctgcatatctcgaccaattgccggacagctgagaagatggcccttactctattggactacctgttccacagagaagtgcaagccgtgagtaacctatccgggcagggtaagcacgggaaaaagcagctcgaccctctcacaatatatgggatcagatgccacctgttctataaattcgggattactgaatccgattggtataggatcaagcagtcaatcgactctaaatgccgtacagcatggagacgtaagcaacggggccaaagcttagcagtgaaatcattctctcgcaggacaccgaacagctcgtcttattgtccctccgagcctatgatgtcaaccccacctcccgcctctgagctgccgcagccgcagccgcagccccaggccctgcattacgccctggcaaacgcccagcaagtgcagatacaccagattggagaggatggccaagttcaagtaatcccacagggacacctgcatatcgcacaggttccacagggggaacaggtacagataacccaggactctgaaggcaacctccaaattcaccacgttggacaagatggacagctcctggaagccacccgaatcccttgcctgcttgctccaagcgttttcaaggcgagttccggccaggtcttacaaggcgcccaactgattgccgtggcctcatcggacccagccgctgccggcgtcgacgggagccctttacaggggagtgacattcaggtccagtatgtccagctggctccggtgtctgatcataccgcgggcgcacagactgccgaggcattgcaaccaacccttcagcccgaaatgcagctggaacacggcgcaatccagattcagtag

SEQ ID NO: 231161 - DNA, 1476 bp, Artificial Sequence
  derived and/or modified sequence
atgatgagcgagcacgacctggctgatgtagttcaaattgcagtggaagacctgagccccgatcatccagtcgttctggagaaccatgttgtcaccgacgaagacgagccagcacttaagagacagcggctggaaataaattgtcaggatccatctataaaaagctttctatattccatcaaccagactatttgcctgagattagatagcattgaggccaagcttcaggcattggaagcgacgtgtaaatcgctcgaagaaaaattagacctagtgaccaacaaacagcattcacccatccaggtgccaatggtggctggcagtcctctgggggcaacgcagacctgtaataaggtgcgatgtgctgtccctggcaggcggcagaataccatagtggtaaaagtgcctggtcaggaagattcccaccacgaagacggggaatctggcagtgaagctagcgattcggtctcttcctgtggacaggcagggagtcaatcaattgggtccaacgtgacactgatcactctgaactcagaagaagactatcctaatggaacatggctgggggacgaaaacaatcctgagatgagagtgcggtgtgcaataattccctcagatatgctgcacatcagcacaaattgtaggaccgctgagaaaatggctctcactctcttggactacctctttcatcgagaagtgcaagccgtctccaacctctctggccagggcaaacacgggaagaagcagctggatcccctgacaatttatggtattcggtgtcatctgttctataagtttgggataaccgagagcgattggtacagaatcaagcaaagcatcgattccaagtgtcgcacagcctggcgccgaaagcagagaggccagtcactggccgttaaatccttttctaggaggacccctaactcttctagctactgcccatcggagccaatgatgtccacaccacctccagcgtctgagttgcctcagccgcagccgcagcctcaggcgctccattacgcactggcgaacgcgcagcaggtgcagatccaccagataggtgaggatgggcaagtgcaagtcataccacagggacacctgcatatcgctcaggtgcctcaaggagaacaagtgcagatcacacaggactctgagggcaacctgcagatccaccatgtgggtcaggatggtcaactactcgaagcaacacgcattccatgcctccttgcacccagcgtgtttaaggctagcagtggacaggtactgcaaggtgctcagctgatcgccgtggcaagctcagacccggctgccgctggtgtggatggcagccccctccagggctccgatatccaagtgcagtatgttcaactcgcacccgtgtctgaccacacagccggagcacagactgccgaggcgctgcagcccacccttcaacctgaaatgcagctggaacacggggctatccaaatccaatag

SEQ ID NO: 231162 - DNA, 1476 bp, Artificial Sequence
  derived and/or modified sequence
atgatgtcggagcatgacctggcagacgttgttcaaatcgcggtggaggatctgtcaccagatcacccagtggttctcgagaatcacgtagtcacagatgaggacgagccagcgctaaagcggcaacgcttggaaattaattgccaagacccctccataaagagctttctatactctatcaatcagaccatctgcctccgccttgactctattgaagccaagcttcaggctctagaggccacgtgtaaaagtctggaagagaaactggacttagtgaccaacaagcagcatagtcccattcaggtccccatggtggcaggaagcccactcggagccacgcagacctgcaataaggtaaggtgtgctgttccaggtcgacgtcagaacacgatagtggtcaaagttcccggtcaggaggactctcatcatgaggacggcgagagtggatctgaggcttccgactcagtctccagctgcggacaggcaggttcccagagtatcggaagtaatgtgacactcattacgctgaactcagaggaggactatccaaatggcacctggctgggagatgagaacaaccctgaaatgcgcgtcagatgcgctattattccttcagacatgctccatattagcacaaactgtcgcacagccgagaagatggctttgactctgctggattaccttttccaccgtgaagtgcaggctgttagtaatctgtcaggccagggcaagcacggcaagaagcagcttgatcccctgaccatctatggcatcaggtgtcacctcttctacaaattcggcatcaccgaatccgattggtataggatcaagcaatcaatcgactccaagtgcaggactgcgtggcggagaaagcaacggggacagagcctggctgttaaaagcttttcaagacgcactcctaacagtagcagttactgcccatcagagcctatgatgtctacacctccccctgcctccgaattgccccaaccccagcctcagcctcaagcccttcattatgcactggccaacgcccagcaggtgcagatccatcaaattggcgaggacggccaggtccaagtgatcccccagggccacttgcatattgcgcaggtgccccagggcgaacaggttcagatcacccaggactctgaaggtaacttacaaatacatcacgtggggcaagacggtcagctgttggaggcgacgcgcattccgtgcctattggctcccagtgtttttaaggcttctagtggacaggtgttacaaggcgctcagctcatcgccgtggcgtcatccgacccagccgctgctggcgtggatgggtcacccctccagggctcagatatccaggtccaatacgtccagctcgcccctgtgagtgaccacactgcaggggctcagacggcagaggctctacagccaaccctgcagcctgaaatgcagcttgagcatggagccatacaaatacaatag

SEQ ID NO: 231163 - DNA, 2283 bp, Artificial Sequence
  derived and/or modified sequence
agagcggcggcttctctcgcgaggacggacgccattatcgcatctccccgacaaacaccacgagaattccgcagcccacacggtgaccaaaagccagccccactgtgagttgaactctttcgtgttgaccggccactctccgtgctctggatgatgtcggaacacgacctggccgatgtggttcagattgcagtggaagacctgagccctgaccacccagttgttttggagaatcatgtagtgacagatgaagacgaacctgctttgaaacgccagcgactagaaatcaattgccaggatccatctataaagtcattcctgtattccatcaaccagacaatctgcttgcggttggatagcattgaagccaaattgcaagccctggaggctacttgtaaatccttagaagaaaagctggatctggtcacgaacaagcagcacagccccatccaggtccccatggtggccggctcccctctcggggcaacccagacgtgcaacaaagtgcgatgcgctgtgcctgggcgtcggcagaacaccattgtggtgaaggtgccgggccaagaagacagccaccacgaggacggggagagcggctcggaggccagcgactctgtgtccagctgtgggcaggcgggcagtcagagcatcgggagcaacgtcacgctcatcaccctgaactcggaagaggactaccccaatggcacctggctgggcgacgagaacaaccccgagatgcgggtacgctgcgccatcatcccctccgacatgctgcacatcagcaccaactgccgcacggccgagaagatggcgctcacgctgctggactacctcttccaccgcgaggtgcaggctgtgtccaacctctcggggcagggcaagcacgggaagaagcagctggacccgctcaccatctacggcatccggtgtcaccttttctataaatttggcatcacagaatccgactggtaccgaatcaagcagagcatcgactccaagtgccgcacggcgtggcggcgcaagcagcggggccagagcctggcggtcaagagcttctcgcggagaacgcccaactcgtcctcctactgcccttcagagccgatgatgagcaccccacctcctgccagcgagctcccgcagccacagccgcagccgcaggccctgcactacgcgctggccaacgcacagcaggtgcagatccaccagatcggagaagacggacaggtgcaagtaatcccacagggacacctccacatcgcccaggtgccgcagggggagcaagtccagatcacgcaggacagcgagggcaacctccagatccatcacgtggggcaggacggtcagcttctagaggccacccgcatcccctgcctcctggccccatccgtcttcaaagccagcagtggccaggtgctgcagggtgcacagctgatcgccgtggcctcctcggaccccgcggcggcgggcgtggatgggtcgccactccagggcagcgacatccaggttcagtacgtgcagctggcgccagtgagtgaccacacggccggggcacagacggccgaagccctgcagcccacgctacagccggagatgcagctcgagcacggggccatccagattcagtgagcggtgcccatggcaccaggagcccctcgccggctccgcctacggcccggcccccacgcgccctgctctcacggcctcggcacaggcagcggctgcacgtgttctgctgaagtgcgtctgaaggccgctgcctccgcggggaacagcatcctatcaactgaaagagcagccgccgccgcccccagccggagacccctttcgtttgagtcctgctgttggtgtcggagcacgaggggaggcacggtgcggagagcgtcgcatatgcgcgggaaatcaagaactatgatatttttctgtttaaacagctttttttaatttgctatggtgtttataacaaaaaagaaaatttgaaaaaaaaaatcccaggggagtagcaggagccctttgctgtgtgctctgtccagtgtcatgagacgggagccctttgctgtgtgctctgtccagtgtcatgagacgggagccctttgctgtgtgctctgtccagtgtcatgagacgggagccctttgctgtgtgctctgtccagtgtcatgaggcaggtgtttgcaaagccagctctcggttccgatggggtattgctgacctacttttctaggggaaatgctcttaaacactgtaattatgcatttctaatgaaataaaatgtatttatgaccaca

SEQ ID NO: 231164 - DNA, 2201 bp, Artificial Sequence
  derived and/or modified sequence
agagcggcggcttctctcgcgaggacggacgccattatcgcatctccccgacaaacaccacgagaattccgcagcccacacggtgaccaaaagccagccccactgtgagttgaactctttcgtgttgaccggccactctccgtgctctggatgatgtcggaacacgacctggccgatgtggttcagattgcagtggaagacctgagccctgaccacccagttgttttggagaatcatgtagtgacagatgaagacgaacctgctttgaaacgccagcgactagaaatcaattgccaggatccatctataaagtcattcctgtattccatcaaccagacaatctgcttgcggttggatagcattgaagccaaattgcaagccctggaggctacttgtaaatccttagaagaaaagctggatctggtcacgaacaagcagcacagccccatccaggtccccatggtggccggctcccctctcggggcaacccagacgtgcaacaaagtgcgatgcgctgtgcctgggcgtcggcagaacaccattgtggtgaaggtgccgggccaagaagacagccaccacgaggacggggagagcggctcggaggccagcgactctgtgtccagctgtgggcaggcgggcagtcagagcatcgggagcaacgtcacgctcatcaccctgaactcggaagaggactaccccaatggcacctggctgggcgacgagaacaaccccgagatgcgggtacgctgcgccatcatcccctccgacatgctgcacatcagcaccaactgccgcacggccgagaagatggcgctcacgctgctggactacctcttccaccgcgaggtgcaggctgtgtccaacctctcggggcagggcaagcacgggaagaagcagctggacccgctcaccatctacggcatccggtgtcaccttttctataaatttggcatcacagaatccgactggtaccgaatcaagcagagcatcgactccaagtgccgcacggcgtggcggcgcaagcagcggggccagagcctggcggtcaagagcttctcgcggagaacgcccaactcgtcctcctactgcccttcagagccgatgatgagcaccccacctcctgccagcgagctcccgcagccacagccgcagccgcaggccctgcactacgcgctggccaacgcacagcaggtgcagatccaccagatcggagaagacggacaggtgcaagtaatcccacagggacacctccacatcgcccaggtgccgcagggggagcaagtccagatcacgcaggacagcgagggcaacctccagatccatcacgtggggcaggacggtcagcttctagaggccacccgcatcccctgcctcctggccccatccgtcttcaaagccagcagtggccaggtgctgcagggtgcacagctgatcgccgtggcctcctcggaccccgcggcggcgggcgtggatgggtcgccactccagggcagcgacatccaggttcagtacgtgcagctggcgccagtgagtgaccacacggccggggcacagacggccgaagccctgcagcccacgctacagccggagatgcagctcgagcacggggccatccagattcagtgagcggtgcccatggcaccaggagcccctcgccggctccgcctacggcccggcccccacgcgccctgctctcacggcctcggcacaggcagcggctgcacgtgttctgctgaagtgcgtctgaaggccgctgcctccgcggggaacagcatcctatcaactgaaagagcagccgccgccgcccccagccggagacccctttcgtttgagtcctgctgttggtgtcggagcacgaggggaggcacggtgcggagagcgtcgcatatgcgcgggaaatcaagaactatgatatttttctgtttaaacagctttttttaatttgctatggtgtttataacaaaaaagaaaatttgaaaaaaaaaatcccaggggagtagcaggagccctttgctgtgtgctctgtccagtgtcatgagacgggagccctttgctgtgtgctctgtccagtgtcatgagacgggagccctttgctgtgtgctctgtccagtgtcatgagacgggagccctttgctgtgtgctctgtccagtgtcatgagacgggagccctttggatggggccggtgtcagcaaaggaggca

SEQ ID NO: 231165 - DNA, 1476 bp, Artificial Sequence
  derived and/or modified sequence
atgatgagcgagcacgacctggccgacgtggtgcagatcgccgtggaggacctgagccccgaccaccccgtggtgctggagaaccacgtggtgaccgacgaggacgagcccgccctgaagagacagagactggagatcaactgccaggaccccagcatcaagagcttcctgtacagcatcaaccagaccatctgcctgagactggacagcatcgaggccaagctgcaggccctggaggccacctgcaagagcctggaggagaagctggacctggtgaccaacaagcagcacagccccatccaggtgcccatggtggccggcagccccctgggcgccacccagacctgcaacaaggtgagatgcgccgtgcccggcagaagacagaacaccatcgtggtgaaggtgcccggccaggaggacagccaccacgaggacggcgagagcggcagcgaggccagcgacagcgtgagcagctgcggccaggccggcagccagagcatcggcagcaacgtgaccctgatcaccctgaacagcgaggaggactaccccaacggcacctggctgggcgacgagaacaaccccgagatgagagtgagatgcgccatcatccccagcgacatgctgcacatcagcaccaactgcagaaccgccgagaagatggccctgaccctgctggactacctgttccacagagaggtgcaggccgtgagcaacctgagcggccagggcaagcacggcaagaagcagctggaccccctgaccatctacggcatcagatgccacctgttctacaagttcggcatcaccgagagcgactggtacagaatcaagcagagcatcgacagcaagtgcagaaccgcctggagaagaaagcagagaggccagagcctggccgtgaagagcttcagcagaagaacccccaacagcagcagctactgccccagcgagcccatgatgagcacccccccccccgccagcgagctgccccagccccagccccagccccaggccctgcactacgccctggccaacgcccagcaggtgcagatccaccagatcggcgaggacggccaggtgcaggtgatcccccagggccacctgcacatcgcccaggtgccccagggcgagcaggtgcagatcacccaggacagcgagggcaacctgcagatccaccacgtgggccaggacggccagctgctggaggccaccagaatcccctgcctgctggcccccagcgtgttcaaggccagcagcggccaggtgctgcagggcgcccagctgatcgccgtggccagcagcgaccccgccgccgccggcgtggacggcagccccctgcagggcagcgacatccaggtgcagtacgtgcagctggcccccgtgagcgaccacaccgccggcgcccagaccgccgaggccctgcagcccaccctgcagcccgagatgcagctggagcacggcgccatccagatccagtag

SEQ ID NO: 231166 - protein, 1624 aa, Artificial Sequence
  derived and/or modified sequence
MSKRRMSVGQQTWALLCKNCLKKWRMKRQTLLEWLFSFLLVLFLYLFFSNLHQVHDTPQMSSMDLGRVDSFNDTNYVIAFAPESKTTQEIMNKVASAPFLKGRTIMGWPDEKSMDELDLNYSIDAVRVIFTDTFSYHLKFSWGHRIPMMKEHRDHSAHCQAVNEKMKCEGSEFWEKGFVAFQAAINAAIIEIATNHSVMEQLMSVTGVHMKILPFVAQGGVATDFFIFFCIISFSTFIYYVSVNVTQERQYITSLMTMMGLRESAFWLSWGLMYAGFILIMATLMALIVKSAQIVVLTGFVMVFTLFLLYGLSLITLAFLMSVLIKKPFLTGLVVFLLIVFWGILGFPALYTRLPAFLEWTLCLLSPFAFTVGMAQLIHLDYDVNSNAHLDSSQNPYLIIATLFMLVFDTLLYLVLTLYFDKILPAEYGHRCSPLFFLKSCFWFQHGRANHVVLENETDSDPTPNDCFEPVSPEFCGKEAIRIKNLKKEYAGKCERVEALKGVVFDIYEGQITALLGHSGAGKTTLLNILSGLSVPTSGSVTVYNHTLSRMADIENISKFTGFCPQSNVQFGFLTVKENLRLFAKIKGILPHEVEKEVQRVVQELEMENIQDILAQNLSGGQNRKLTFGIAILGDPQVLLLDEPTAGLDPLSRHRIWNLLKEGKSDRVILFSTQFIDEADILADRKVFISNGKLKCAGSSLFLKKKWGIGYHLSLHLNERCDPESITSLVKQHISDAKLTAQSEEKLVYILPLERTNKFPELYRDLDRCSNQGIEDYGVSITTLNEVFLKLEGKSTIDESDIGIWGQLQTDGAKDIGSLVELEQVLSSFHETRKTISGVALWRQQVCAIAKVRFLKLKKERKSLWTILLLFGISFIPQLLEHLFYESYQKSYPWELSPNTYFLSPGQQPQDPLTHLLVINKTGSTIDNFLHSLRRQNIAIEVDAFGTRNGTDDPSYNGAIIVSGDEKDHRFSIACNTKRLNCFPVLLDVISNGLLGIFNSSEHIQTDRSTFFEEHMDYEYGYRSNTFFWIPMAASFTPYIAMSSIGDYKKKAHSQLRISGLYPSAYWFGQALVDVSLYFLILLLMQIMDYIFSPEEIIFIIQNLLIQILCSIGYVSSLVFLTYVISFIFRNGRKNSGIWSFFFLIVVIFSIVATDLNEYGFLGLFFGTMLIPPFTLIGSLFIFSEISPDSMDYLGASESEIVYLALLIPYLHFLIFLFILRCLEMNCRKKLMRKDPVFRISPRSNAIFPNPEEPEGEEEDIQMERMRTVNAMAVRDFDETPVIIASCLRKEYAGKKKNCFSKRKKKIATRNVSFCVKKGEVIGLLGHNGAGKSTTIKMITGDTKPTAGQVILKGSGGGEPLGFLGYCPQENALWPNLTVRQHLEVYAAVKGLRKGDAMIAITRLVDALKLQDQLKAPVKTLSEGIKRKLCFVLSILGNPSVVLLDEPSTGMDPEGQQQMWQVIRATFRNTERGALLTTHYMAEAEAVCDRVAIMVSGRLRCIGSIQHLKSKFGKDYLLEMKLKNLAQMEPLHAEILRLFPQAAQQERFSSLMVYKLPVEDVRPLSQAFFKLEIVKQSFDLEEYSLSQSTLEQVFLELSKEQELGDLEEDFDPSVKWKLLLQEEP

SEQ ID NO: 231167 - DNA, 4875 bp, Artificial Sequence
  derived and/or modified sequence
atgtcgaagagacggatgagcgtggggcagcagacctgggccctgttatgcaagaattgcctgaagaaatggcgcatgaagaggcagacccttctggaatggttattctctttcctcctggtattattcctctacctgttttttagcaacctgcaccaggtgcatgacactccacagatgagcagcatggaccttggcagagttgacagctttaacgacactaactacgttatcgccttcgcacccgagtctaagacaacacaggagatcatgaacaaggtcgcttcagccccttttctgaaaggtcgcactatcatgggttggcctgacgaaaaatcaatggacgaactggatcttaactactctatcgacgccgtcagggtgatctttaccgacacattcagttaccatctcaagttcagctgggggcacaggattcccatgatgaaggagcaccgagaccactcagcgcactgccaggcagttaacgaaaaaatgaagtgtgaaggctcagagttctgggagaaaggattcgtggcgttccaggccgcaatcaatgcagccataatcgagatcgccactaatcacagtgttatggagcagctcatgtctgtgactggagttcatatgaagatcctgccctttgtcgcccagggcggagtcgctaccgacttcttcattttcttctgcattatttcattctctacattcatttactacgtctcagttaacgtgactcaagaacgacagtacatcactagcttaatgaccatgatgggtctccgggaaagcgccttctggctgagctggggactcatgtacgcaggatttatcctgatcatggccacactgatggctctgattgttaagtccgctcagatcgtcgtgttaaccggttttgtgatggtgttcacactgtttctactttatgggttgagcttaatcacacttgctttcctcatgagtgtgctcatcaagaaacccttcctgacaggcctggtggtgttcctcctaatcgttttctggggcatcttgggatttcccgcgttatatacacgattaccagccttccttgaatggacactctgtttgctgtcaccctttgctttcactgtgggtatggcccagctaattcacttagattatgatgtgaacagtaacgctcacctggatagtagccagaatccctatctgattatagctactctcttcatgctggtgttcgatacactgctatacctcgtcttgaccttgtatttcgataagattcttcccgccgaatatggccatcgctgttcccccctgtttttcctcaagtcttgcttttggttccagcatggccgcgctaatcacgttgtacttgagaacgagacagactccgaccctacccctaatgattgctttgagcctgtcagccctgaattttgcggtaaagaagcgattcgcatcaagaaccttaagaaagaatacgcggggaaatgtgaacgtgttgaggctctgaaaggtgtcgtcttcgatatttatgaaggacagattaccgctttactggggcactctggagccggcaagacaaccctgctcaacattttgtccggcctgagcgtgcctacctcagggtcagtgacggtgtacaaccatacactcagcagaatggctgacattgaaaatatttctaaattcacgggcttctgtccccagagcaacgtacaatttggcttccttactgtgaaggaaaatttgaggctgtttgcgaagattaagggcatcctccctcatgaggtggagaaagaagttcagcgcgtagttcaagaactcgaaatggaaaacattcaggacatcctggcccaaaatctgtccgggggacaaaatcggaaactcacattcggtattgctatccttggagacccacaggtgctgctattagacgaacccaccgcaggtcttgacccgcttagccgccatcgaatttggaatttactcaaggagggaaaatcagaccgcgtcatcctgttttcaacacagttcattgacgaagccgacatccttgccgataggaaagtcttcatcagcaatggcaaactcaagtgcgcaggcagctctctgttcctcaagaaaaagtggggtatcggataccatctgtcactgcatttaaacgagaggtgtgatcccgagagcatcaccagtcttgttaagcaacatatatccgacgcaaagcttacagcacagtcagaggagaagttagtttacattctacccctagaaagaaccaataagttcccggagctgtatcgagaccttgaccggtgcagtaaccagggaattgaagactacggagtgtctatcacaactctgaacgaagtctttctgaaactggagggtaagtcaacaatagacgagtctgatattggaatctgggggcagctgcagacagatggcgcaaaagacataggatctctagtcgaacttgagcaggtcctgagctcatttcacgagactcgcaagactatcagcggagtggccttgtggcgccagcaggtgtgcgctatcgcaaaggtgagatttctgaagctgaagaaggagcggaaatccctctggactattctcctccttttcgggataagcttcatcccccagctgcttgaacatctgttctacgagtcttaccagaagtcctacccctgggagctctcacctaatacatacttcctctcccccggccagcagcctcaggaccctttaacccatcttttggtgattaataaaacagggtctaccatcgataatttcttacattcactccggagacaaaatatcgctatcgaggttgatgctttcgggactaggaatggcaccgatgaccctagctataatggcgccatcattgtttctggggacgaaaaggatcacagattctcgatcgcttgtaataccaagcggctaaattgcttccctgtgctcctggatgtcatctctaacggcctgctgggtatttttaattctagtgagcacatccagacggatagatcaactttctttgaagagcacatggactacgaatatgggtatcgctccaacacgttcttctggatcccaatggccgccagctttacgccctatatagctatgtcatctatcggagactacaaaaaaaaggctcacagtcagttgaggatctctgggctctatccgtccgcctactggttcgggcaggcattggtcgatgtttcactatatttcctcatcctgttactgatgcaaattatggattatattttttccccagaggaaatcattttcatcatacagaatctactgattcagatattgtgttcgatcggttacgtgagttccttggttttcctgacctatgttattagttttatctttaggaacggcaggaaaaattccggcatctggtccttctttttcctgatcgtcgtaatcttttctatcgtggcgacagacctgaacgagtacgggtttctaggattgttcttcggtacgatgcttatccccccattcacgcttatcggatctctgtttattttctctgagatttctcccgactcaatggactacctcggtgcttcagaaagtgagatcgtatacttggccctgctgatcccctacctgcatttcttaatcttcctgtttattctccggtgcttggaaatgaattgcaggaagaagctcatgcggaaggacccggtgttccgcatcagccctagatcaaacgccattttcccaaaccccgaagagccagaaggagaggaagaggacatccagatggagaggatgcgaaccgtcaatgcaatggcagtgcgggacttcgacgagacacccgtgataatcgccagttgtcttagaaaggaatacgccggtaagaagaaaaactgtttttctaaacggaaaaagaagatcgctacacggaatgtttcattttgtgtcaaaaaaggggaagtgatcggactgctcggccataatggagcaggaaaaagcactacaatcaaaatgattactggggacactaaacctaccgctggacaggttatccttaagggctccggcggaggagagcctcttggttttttaggctattgccctcaggaaaacgcgctgtggccgaacctgacagtgcgtcaacaccttgaagtgtatgccgccgtcaagggactcaggaaaggagacgctatgatcgctattacccgattggtggatgcgctgaaattgcaggaccagctgaaggccccagttaagacactttcagaggggatcaagcgcaagctgtgtttcgtgctatccatcttgggtaacccctctgtggtactgctggatgagccgagcacaggtatggatccagaggggcagcagcagatgtggcaggtcatccgagccacctttcgtaataccgaaaggggcgcattactgactacgcattacatggctgaggcagaggccgtgtgtgatagagtggctattatggtgagcggccgtcttagatgcatagggagcattcagcatctgaaaagtaagttcggcaaagactacctcctagagatgaaactaaagaacctcgcgcagatggaaccactacacgcggaaatcctgagactgtttccacaggcagcacagcaggaacgattctcaagtctaatggtgtataaattaccagtggaggacgtccggcctctcagtcaggcctttttcaaactggaaattgttaaacagagcttcgacttagaggagtatagcctttcccagtcaactctggaacaggtgttcctggagctgtcaaaggagcaagaacttggcgatctggaggaggactttgatccatccgtgaagtggaagcttctgctgcaggaggagccgtag

SEQ ID NO: 231168 - DNA, 4875 bp, Artificial Sequence
  derived and/or modified sequence
atgagcaagaggaggatgtctgtgggccagcagacctgggccctgctgtgcaagaactgcctgaagaagtggaggatgaagaggcagaccctgctggagtggctgttctccttcctgctggtgctcttcctgtacctgttcttcagcaacctgcaccaggtgcatgacaccccccagatgagctccatggacctgggccgggtggacagcttcaatgacaccaactacgtgattgcctttgcccctgagagcaagaccacccaggagatcatgaacaaggtggccagcgcccccttcctgaagggccgcaccatcatgggctggccagatgagaagtccatggatgagctggacctgaactacagcattgatgctgtgcgggtcatcttcacagacaccttctcctaccacctgaagttctcctggggccaccgcatccccatgatgaaggagcaccgggaccacagcgcccactgccaggccgtgaatgagaagatgaagtgtgagggcagcgagttctgggagaagggctttgtggccttccaggccgccatcaatgctgccatcatcgagatcgccaccaaccacagcgtgatggagcagctgatgtctgtgactggagtgcacatgaagatcctgccctttgtggcccagggcggcgtggccacagacttcttcatcttcttctgcatcatctccttcagcaccttcatctactacgtgtctgtgaatgtgacccaggagcggcagtacatcaccagcctgatgaccatgatgggcctgcgggagagcgccttctggctgtcctggggcctgatgtatgccggcttcatcctgatcatggccaccctgatggccctgattgtgaagagcgcccagatcgtggtgctgaccggctttgtgatggtgttcaccctcttcctgctgtatggcctgagcctcatcaccctggccttcctgatgtctgtgctgatcaagaagcccttcctgaccggcctggtggtgttcctgctgattgtgttctggggcatcctgggcttccctgccctgtacacccggctgcctgccttcctggagtggaccctgtgcctgctgagcccctttgccttcaccgtgggcatggcccagctgatccacctggactatgatgtgaacagcaatgcccacctggacagcagccagaacccctacctgatcatcgccaccctcttcatgctggtgtttgacaccctgctgtacctggtgctgaccctgtactttgacaagatcctgcctgcagaatatggccaccgctgcagccccctcttcttcctgaagagctgcttctggttccagcacggccgggccaaccacgtggtgctggagaatgaaacagacagcgaccccaccccaaatgactgctttgagcctgtgtccccagagttctgtgggaaggaggccatccgcatcaagaacctgaagaaggagtatgctggaaaatgtgagcgggtggaggccctgaagggcgtggtgtttgacatctatgagggccagatcacagccctgctgggccacagcggggccggcaagaccaccctgctgaacatcctgagcggcctgtctgtgcccaccagcggctctgtgacagtgtacaaccacaccctgagcaggatggctgacatcgagaacatcagcaagttcaccggcttctgcccccagagcaatgtgcagtttggcttcctgactgtgaaggagaacctgcggctgtttgccaagatcaagggcatcctgccccatgaggtggagaaggaggtgcagagggtggtgcaggagctggagatggagaacatccaggacatcctggcccagaacctgagcggcggccagaacaggaagctgaccttcggcatcgccatcctgggggacccccaggtgctgctgctggatgagcccacagctggcctggaccccctgagccgccaccgcatctggaacctgctgaaggagggcaagagtgacagagtcatcctcttcagcacccagttcattgatgaagctgacatcctggccgacaggaaggtgttcatcagcaatggcaagctgaagtgtgccggcagcagcctcttcctgaagaagaagtggggcatcggctaccacctgagcctgcacctgaatgaaagatgtgaccctgagagcatcaccagcctggtgaagcagcacatcagtgatgccaagctgacagcccagagcgaggagaagctggtgtacatcctgcccctggagaggaccaacaagtttcctgagctgtacagagacctggaccgctgcagcaaccagggcattgaagattatggagtgtccatcaccaccctgaatgaggtgttcctgaagctggagggcaagagcaccattgatgaaagtgacatcggcatctggggccagctgcagacagatggagccaaggacatcggcagcctggtggagctggagcaggtgctgagcagcttccacgagaccaggaagaccatctctggagtggccctgtggaggcagcaggtgtgtgccatcgccaaggtgcgcttcctgaagctgaagaaggagaggaagagcctgtggaccatcctgctgctgtttggcatctccttcatcccccagctgctggagcacctgttctatgagagctaccagaagagctacccctgggagctgagccccaacacctacttcctgagccctggccagcagccccaggaccccctgacccacctgctggtgatcaacaagacaggcagcaccatcgacaacttcctgcacagcctgcggcggcagaacatcgccatcgaggtggatgccttcggcaccagaaatggaacagatgaccccagctacaatggagccatcatcgtgtctggagatgagaaggaccaccgcttcagcatcgcctgcaacaccaagaggctgaactgcttccctgtgctgctggatgtgatcagcaatggcctgctgggcatcttcaacagcagcgagcacatccagacagacaggagcaccttctttgaggagcacatggactatgaatatggctaccgcagcaacaccttcttctggatccccatggccgccagcttcaccccctacatcgccatgagcagcattggagactacaagaagaaggcccacagccagctgcgcatcagcggcctgtaccccagcgcctactggtttggccaggccctggtggatgtgtccctgtacttcctgatcctgctgctgatgcagatcatggactacatcttcagccctgaggagatcatcttcatcatccagaacctgctgatccagatcctgtgcagcatcggctacgtgagcagcctggtgttcctgacctacgtgatctccttcatcttcagaaatggaaggaagaacagcggcatctggagcttcttcttcctgattgtggtgatcttcagcatcgtggccacagacctgaatgaatatggcttcctgggcctcttcttcggcaccatgctgatcccccccttcaccctgattggcagcctcttcatcttcagcgagatcagcccagacagcatggactacctgggcgccagcgagagcgagatcgtgtacctggccctgctgatcccctacctgcacttcctgatcttcctgttcatcctgcgctgcctggagatgaactgcaggaagaagctgatgaggaaggaccccgtcttccgcatcagccccaggagcaatgccatcttccccaaccctgaggagcctgagggggaggaggaggacatccagatggagaggatgaggacagtgaatgccatggctgtgcgggactttgatgagacccctgtgatcatcgccagctgcctgaggaaggagtatgccggcaagaagaagaactgcttcagcaagaggaagaagaagatcgccaccagaaatgtgtccttctgtgtgaagaagggggaggtgattggcctgctgggccacaacggggccggcaagagcaccaccatcaagatgatcaccggggacaccaagcccacagctggccaggtgatcctgaagggcagcggcggcggggagcccctgggcttcctgggctactgcccccaggagaatgccctgtggcccaacctgactgtgcggcagcacctggaggtgtatgctgctgtgaagggcctgaggaaaggagatgccatgattgccatcacccggctggtggatgccctgaagctgcaggaccagctgaaggcccctgtgaagaccctgtctgagggcatcaagaggaagctgtgctttgtgctgagcatcctgggcaaccccagcgtggtgctgctggatgagcccagcacaggcatggaccctgagggccagcagcagatgtggcaggtgatccgggccaccttcaggaacacagagcggggggccctgctgaccacccactacatggccgaggccgaggccgtgtgtgacagagtggccatcatggtgtctggccgcctgcgctgcatcggcagcatccagcacctgaagagcaagtttgggaaggactacctgctggagatgaagctgaagaacctggcccagatggagcccctgcatgctgagatcctgcggctcttcccccaggccgcccagcaggagcgcttcagcagcctgatggtgtacaagctgcctgtggaggatgtgcggcccctgagccaggccttcttcaagctggagatcgtgaagcagagctttgacctggaggagtacagcctgagccagagcaccctggagcaggtgttcctggagctgagcaaggagcaggagctgggggacctggaggaggactttgaccccagcgtgaagtggaagctgctgctgcaggaggagccctag

SEQ ID NO: 231169 - DNA, 4875 bp, Artificial Sequence
  derived and/or modified sequence
atgagcaagcggcggatgagcgtgggccagcagacctgggccctgctgtgtaagaattgcctcaagaaatggcgcatgaaaagacagaccctcctcgagtggctcttcagctttttattagtgctctttctgtacctcttcttctctaacttacatcaggtccacgacactccgcagatgtctagcatggatctggggcgggtagatagctttaacgataccaactatgtgatcgcctttgcaccagagagcaagacaacgcaggaaataatgaataaggtcgcttcagcccctttcctcaaaggcagaaccataatgggatggcctgacgagaagtcaatggacgaactggacttgaattacagtattgacgctgttcgggtgatttttaccgatactttttcctaccatttgaagttttcctggggtcaccgtatccccatgatgaaggagcaccgggatcactctgcccactgtcaagccgtcaatgaaaaaatgaaatgcgagggcagcgaattctgggagaaaggcttcgtcgcctttcaggctgcaattaatgccgccattatcgaaatagcaaccaaccacagcgtgatggagcaacttatgtctgtgactggcgtccatatgaagatccttccctttgtggcacagggcggcgtggctactgacttctttatttttttctgcatcatttctttctcaacttttatctattatgtgagcgtcaatgttacccaggaacgtcagtacatcaccagtttaatgacgatgatggggctgcgtgagagcgctttctggcttagctggggcttaatgtacgccgggttcattctcatcatggctaccctcatggcattgatcgtgaaatcagcccagatagtggtgcttaccgggtttgtgatggtgttcacactgttcctgctgtacgggctttcactgatcactctggctttcctgatgagtgtattgatcaagaaaccttttctgaccggcctggttgtgtttctgttgatcgtcttttggggcatcttagggtttcccgcactgtacacccggctgccagccttcctggagtggaccctctgtcttctctcccccttcgcctttactgtgggcatggctcagttgatccatctcgactatgatgtcaattccaatgcacatttggacagctcacagaacccttatctgataatcgcgacactcttcatgcttgtgtttgataccctcctctatcttgtgctgaccctttattttgacaaaattttacccgcggagtatggtcacaggtgcagtccattgttcttcctgaagtcctgcttctggtttcagcacggccgggcaaatcacgtggttctggaaaacgagaccgatagcgatccaactccaaatgattgcttcgaacctgtgtctccagagttttgtggcaaagaggctatccgaatcaaaaatttgaaaaaggagtatgccggcaaatgcgaacgcgtggaggctcttaagggcgtggtcttcgatatatatgaagggcagattactgcccttctgggacactccggggcgggcaaaacaactttgctgaatatactttcaggactctctgtgcccacgtcagggtcggtcactgtctataaccacactctgagcagaatggctgatatcgagaacattagtaaattcactgggttctgcccacaatctaacgtccagttcgggttcttaaccgttaaggagaacctccggttgttcgctaagattaagggaattctgccacacgaagttgagaaagaggtgcagcgggtggttcaggaattagagatggagaatattcaggatattttggctcagaacctgtcaggaggccaaaatcggaaactcaccttcgggatcgcaatcctgggtgaccctcaggttctcctgttagatgagccaaccgctggactggatcccctgagccggcacaggatttggaatctgttgaaagaaggcaaaagcgaccgcgtgattttgttcagtacccagtttattgatgaggcggatatcctggccgaccgcaaagtctttatcagcaacggcaaacttaaatgtgccggctcaagcttattcctgaagaaaaagtggggaattggataccatttgtcattgcaccttaacgaacggtgcgatccagagagcattacttcactggtgaaacagcacatctcagacgccaaacttacggcacagtctgaggagaagctggtgtatatccttccccttgagcggactaataaattccccgagctgtaccgggatctggatcgctgctccaatcagggcatcgaggattatggcgtgtcgattacgaccttaaacgaagtatttctgaagctcgaagggaagagcactattgacgagtccgatattggaatttggggccagctgcagaccgatggggccaaggatatcggaagcttagtggaattggagcaagtactgtcctccttccacgaaacccggaaaactatcagcggagtggccctatggagacaacaggtttgcgctatcgctaaagtgcgttttctcaagttaaaaaaggagaggaaatctctttggacaatcctgctactatttggcatcagcttcatcccacagctgttggagcatctgttctatgagagctaccagaagagctacccgtgggagcttagccccaatacctactttctgagtcctggacagcagccccaagaccctctgacgcacctgctggtcatcaataagacgggttcgaccatcgacaatttcttgcactcgctccgtagacaaaatatcgctatcgaagtggacgcgtttggaactagaaatggcacagacgatccgtcctataatggtgccattattgtatccggcgatgagaaggatcaccgcttcagcattgcatgtaataccaagcggctgaattgtttccctgtgctcctggacgtaatttccaatggactcctcggtatctttaatagctccgaacacatccagactgaccggagtaccttctttgaggagcacatggattacgaatatggttatagatcgaatacatttttctggattccaatggccgcatcctttactccttacattgctatgtcaagtatcggcgactataaaaagaaggcgcactcccagctcagaatctccggcctgtacccgagtgcctactggtttgggcaggccttggttgacgtgagtttgtattttctgattctactgctcatgcagatcatggattacatcttcagccccgaggagattatttttatcatccagaatctgctcatccagattctgtgctccatcggctacgtcagttccttggtctttcttacctatgtgatctccttcatatttcggaacggaagaaaaaattctggtatttggtccttcttttttttgatcgtggtcatcttctccattgtagccacagaccttaatgaatacggttttctgggcttattctttggcaccatgctcatcccccctttcacgctcatagggagccttttcatcttcagcgaaatcagccctgacagcatggactacctaggggcctcagaatctgaaatcgtatacctggctctgctaattccgtacctccattttctcatcttcttgttcatcctgaggtgtctggagatgaactgtcggaagaagctcatgaggaaggatccagtctttaggataagcccccgatcgaacgctattttcccaaatcccgaggagccagagggcgaagaggaggatattcaaatggagaggatgcgtacggtcaatgctatggctgtgcgcgatttcgacgaaacacccgtgattatagcctcatgcctgagaaaggaatatgcaggaaagaagaaaaattgtttttctaaacggaagaagaaaatcgcaactagaaatgtctccttctgtgtaaagaagggggaagtgattggcctactgggacacaacggtgcaggaaagtcaacaactatcaagatgatcaccggggatacaaagccaaccgcgggccaagtcattctcaagggaagcggcggcggggaaccattgggttttctcggatactgtcctcaggaaaatgccctctggccaaacctaaccgtgaggcagcacctggaggtttatgctgctgtgaagggactccgtaaaggcgatgccatgatcgccatcacacggctggtggatgcgctgaaactccaagaccagctcaaagctcccgtgaaaaccctctccgagggtattaagcggaagctctgctttgtgctgagcatcctgggcaatccgtccgtcgtgcttttggacgagccttctacaggcatggatccggaaggccagcagcagatgtggcaggtaatcagagcaactttccgaaataccgagcgcggcgccctcctcactacccactacatggccgaagcggaggccgtatgtgaccgggtagctatcatggtgtccgggcggcttcgttgtatcggaagtattcagcacttgaagtcaaagtttggtaaggattatctgcttgagatgaaactaaagaacctggctcaaatggagcccctgcacgcagaaatccttcgactctttccacaggcggctcagcaggagcgcttttcttccctgatggtttataaactgccagttgaggacgtcagaccattgtcacaagcgttcttcaagctggaaatcgtgaagcagtcctttgacctggaggaatactcactgtcacaaagcactctggaacaggtgtttttagagttaagtaaggagcaggaactgggcgatctggaagaagatttcgacccaagtgtcaagtggaagctgctactgcaggaagaaccctag

SEQ ID NO: 231170 - DNA, 4875 bp, Artificial Sequence
  derived and/or modified sequence
atgtccaaacggagaatgtccgtgggtcaacagacctgggctcttttgtgcaaaaattgtctgaagaagtggagaatgaagagacagacactgctcgaatggctgttctcatttctgctggtgttattcctgtacctgtttttcagcaacctccaccaggtccatgacacaccccagatgagttccatggatctcggcagagtggactcttttaacgacactaactacgtgatcgccttcgcgcctgaatcaaagactacccaagagattatgaataaagtggcctctgctcctttcctcaagggccgaacgattatgggatggcctgatgaaaaatccatggatgagctggatttgaactattcaatcgacgcagttagggtgatttttaccgatacattttcataccacctcaaattctcttgggggcatcgcattcccatgatgaaggagcatcgcgatcactccgcccactgccaggcggtcaatgagaagatgaaatgtgaagggagtgaattttgggagaaggggttcgtggccttccaggcggctattaatgccgctataattgagattgcgactaatcactctgtgatggagcagcttatgtccgttactggcgtgcacatgaaaatcctgccttttgtggcccaagggggtgtcgccacagactttttcatatttttttgtatcatttctttttctacctttatctattatgtgagtgtcaacgtgacacaggagcgacagtatatcaccagtctgatgactatgatggggctgcgggagtctgcattctggctatcatggggcctcatgtacgccggttttattctgattatggcaaccctgatggccctgattgtaaagtccgcacaaattgttgttctgacaggcttcgtaatggtctttacattattcctcctgtacggcttatccctcatcactttagccttcctgatgtccgtgctgatcaagaagccctttctcactggactcgtcgtgttcctcctgatcgtgttttggggaatcctgggctttcccgcactctacacccgcctgcccgcttttcttgaatggactctttgtttgctgtctcctttcgctttcaccgtgggtatggctcaactcattcacttggactacgatgtgaattcaaacgcccacctggattctagccaaaatccctatctgatcatcgctacgctttttatgttagtctttgacactcttctttatctcgttcttaccttgtactttgacaagatactgcccgctgaatatggtcaccgttgtagtcccttattttttctcaagtcatgcttttggtttcaacatggcagagcaaatcacgtagtgcttgaaaacgagacagactctgatcctacaccgaacgactgtttcgaacccgtgtcccctgaattctgtgggaaggaggccatccgcatcaagaacctgaagaaagagtatgccggaaagtgcgaacgagtggaggccctcaaaggcgttgtgtttgatatttacgagggccaaataacagccttactgggccattcgggcgcagggaagacgacactgctgaacatactttcgggccttagcgtgccaactagcgggtccgtcaccgtgtataaccataccttgtcccgcatggccgacattgaaaacattagtaagttcaccggattttgcccccagtctaatgtacagttcggtttcctgacagtaaaggagaaccttcgactttttgcaaagatcaagggcatcctgccgcatgaggttgagaaggaggtgcaacgtgtagtgcaggagttggagatggaaaatattcaggatatcttagctcagaatctcagcggaggtcagaacagaaaactgaccttcggtatcgccattctcggagacccccaagtgctgctgctcgatgaacctaccgctggactggaccctttaagtcgacacagaatatggaacttgctgaaggagggaaaaagtgatagggtgatcctgttttcaacacagtttattgacgaagcagacatcctcgcagacagaaaagtatttatcagcaacggtaagttaaaatgtgctgggtctagtctgtttctgaaaaaaaaatggggcatcggatatcacctgtcattacatctgaatgaaagatgtgaccctgagtcaatcacctctctcgtaaagcaacacatttccgacgccaagctcacagctcagtcagaggagaagcttgtttatatattacccctcgagagaaccaacaagtttcccgagctgtatcgggatctggaccgctgctctaatcaggggatagaggactacggggtgtcaattactactctaaatgaggtcttcctcaagttagaaggaaaaagcaccatagacgagagcgacattgggatctgggggcagttacagaccgacggcgcaaaggatataggctcacttgtcgagctggaacaggtactgtcatccttccacgagactcggaagaccatcagcggagtggccctctggcgacaacaggtctgtgccatcgctaaagtaagattccttaagctcaaaaaagaaagaaagtcactgtggaccatactgctcctctttggtatctcctttattccccagcttctggaacatttgttttatgagagctaccaaaaatcttacccttgggagctttcccccaatacatactttctcagccctggacagcagccccaggatccccttactcacctgctcgtcattaacaagaccggcagcacgatcgacaacttcctgcatagcctccgcaggcagaatatcgctatcgaagtcgatgcatttggcaccaggaatggcaccgatgatccttcttacaatggggctatcattgtttctggcgatgaaaaggaccatcggttcagcatagcttgcaatacgaaacgactgaactgctttcccgtgctgttggacgttattagtaacggtctactggggatcttcaacagcagtgaacatatccaaacagacaggagtactttctttgaagagcacatggattatgagtacggatatcggagcaacacctttttttggatcccaatggccgcttcatttacaccttacatagccatgagtagcattggggactataaaaagaaggcccacagccagctgcgcatcagtggactctaccctagtgcatattggtttggccaggcgctggtggacgttagtttatatttcctgattctactgctgatgcagataatggactatatctttagcccagaggagattatctttatcattcaaaaccttctaatccagatcctctgtagtattggctacgtgagctccctggtcttccttacttacgtgatctccttcatcttcaggaacggccgtaaaaacagcggaatttggagcttcttctttttgattgttgtcatattcagcatcgttgccacagacttaaacgaatatggttttctaggtctgttttttggcaccatgttaatcccaccatttactcttattggatcactgttcatttttagcgaaatcagccctgacagcatggattacctgggagcctcagagtctgagatagtgtacctggcccttctcataccatacctgcattttctaatttttctgttcatcctgcgctgccttgagatgaactgccggaaaaagctgatgaggaaggaccctgtgttccgcattagcccgagatctaacgccatttttccaaatccagaggaaccagaaggcgaggaagaagatattcagatggaacgcatgcgcaccgtcaatgcgatggctgtgcgtgatttcgatgagacaccagtaatcatagctagttgcttgcggaaggagtacgccggtaagaagaagaattgcttctccaaacgcaaaaaaaagattgcaacaagaaacgtatcattctgcgtaaagaagggcgaggtcataggtctgctcggccataacggggcagggaagagtaccaccatcaagatgattaccggtgacacaaagccaactgctggacaggtgattttgaaggggtcaggaggaggagaaccactcgggttcctgggctattgtccacaggaaaatgctctgtggccaaatctgacagtcaggcaacatctggaggtttatgcagcagtgaaaggtctgcggaagggagacgccatgattgccattactcggctggtggatgccctgaagttgcaggaccagttaaaggccccagtcaaaaccctcagtgaaggaattaagcggaagttatgttttgtgttatctatactgggaaacccgtcggttgtgctgctggacgagcccagcaccgggatggacccggaaggtcagcaacaaatgtggcaagtgatacgggctacatttaggaacactgaaagaggggcactgctgactacccattacatggcggaagccgaggccgtgtgtgaccgcgtcgcgataatggtgtctggcagactgaggtgtattggctctattcaacacctgaagagtaaatttggcaaagattatctgcttgagatgaaattgaagaaccttgctcaaatggaacccctgcacgcggagatcctcaggctgtttccccaggccgcacagcaggagcggtttagtagtcttatggtgtacaaactcccagttgaagatgttcggccactgagtcaggcttttttcaagctcgagattgtaaagcagtcttttgatttagaggaatactccctgtcgcagagtacgctggagcaagtgtttttggaattgtcaaaagagcaagaattaggagatctggaggaggatttcgaccctagcgttaagtggaaactgctgcttcaggaagagccttag

SEQ ID NO: 231171 - DNA, 4875 bp, Artificial Sequence
  derived and/or modified sequence
atgagcaagagaagaatgagcgtgggccagcagacctgggccctgctgtgcaagaactgcctgaagaagtggagaatgaagagacagaccctgctggagtggctgttcagcttcctgctggtgctgttcctgtacctgttcttcagcaacctgcaccaggtgcacgacaccccccagatgagcagcatggacctgggcagagtggacagcttcaacgacaccaactacgtgatcgccttcgcccccgagagcaagaccacccaggagatcatgaacaaggtggccagcgcccccttcctgaagggcagaaccatcatgggctggcccgacgagaagagcatggacgagctggacctgaactacagcatcgacgccgtgagagtgatcttcaccgacaccttcagctaccacctgaagttcagctggggccacagaatccccatgatgaaggagcacagagaccacagcgcccactgccaggccgtgaacgagaagatgaagtgcgagggcagcgagttctgggagaagggcttcgtggccttccaggccgccatcaacgccgccatcatcgagatcgccaccaaccacagcgtgatggagcagctgatgagcgtgaccggcgtgcacatgaagatcctgcccttcgtggcccagggcggcgtggccaccgacttcttcatcttcttctgcatcatcagcttcagcaccttcatctactacgtgagcgtgaacgtgacccaggagagacagtacatcaccagcctgatgaccatgatgggcctgagagagagcgccttctggctgagctggggcctgatgtacgccggcttcatcctgatcatggccaccctgatggccctgatcgtgaagagcgcccagatcgtggtgctgaccggcttcgtgatggtgttcaccctgttcctgctgtacggcctgagcctgatcaccctggccttcctgatgagcgtgctgatcaagaagcccttcctgaccggcctggtggtgttcctgctgatcgtgttctggggcatcctgggcttccccgccctgtacaccagactgcccgccttcctggagtggaccctgtgcctgctgagccccttcgccttcaccgtgggcatggcccagctgatccacctggactacgacgtgaacagcaacgcccacctggacagcagccagaacccctacctgatcatcgccaccctgttcatgctggtgttcgacaccctgctgtacctggtgctgaccctgtacttcgacaagatcctgcccgccgagtacggccacagatgcagccccctgttcttcctgaagagctgcttctggttccagcacggcagagccaaccacgtggtgctggagaacgagaccgacagcgaccccacccccaacgactgcttcgagcccgtgagccccgagttctgcggcaaggaggccatcagaatcaagaacctgaagaaggagtacgccggcaagtgcgagagagtggaggccctgaagggcgtggtgttcgacatctacgagggccagatcaccgccctgctgggccacagcggcgccggcaagaccaccctgctgaacatcctgagcggcctgagcgtgcccaccagcggcagcgtgaccgtgtacaaccacaccctgagcagaatggccgacatcgagaacatcagcaagttcaccggcttctgcccccagagcaacgtgcagttcggcttcctgaccgtgaaggagaacctgagactgttcgccaagatcaagggcatcctgccccacgaggtggagaaggaggtgcagagagtggtgcaggagctggagatggagaacatccaggacatcctggcccagaacctgagcggcggccagaacagaaagctgaccttcggcatcgccatcctgggcgacccccaggtgctgctgctggacgagcccaccgccggcctggaccccctgagcagacacagaatctggaacctgctgaaggagggcaagagcgacagagtgatcctgttcagcacccagttcatcgacgaggccgacatcctggccgacagaaaggtgttcatcagcaacggcaagctgaagtgcgccggcagcagcctgttcctgaagaagaagtggggcatcggctaccacctgagcctgcacctgaacgagagatgcgaccccgagagcatcaccagcctggtgaagcagcacatcagcgacgccaagctgaccgcccagagcgaggagaagctggtgtacatcctgcccctggagagaaccaacaagttccccgagctgtacagagacctggacagatgcagcaaccagggcatcgaggactacggcgtgagcatcaccaccctgaacgaggtgttcctgaagctggagggcaagagcaccatcgacgagagcgacatcggcatctggggccagctgcagaccgacggcgccaaggacatcggcagcctggtggagctggagcaggtgctgagcagcttccacgagaccagaaagaccatcagcggcgtggccctgtggagacagcaggtgtgcgccatcgccaaggtgagattcctgaagctgaagaaggagagaaagagcctgtggaccatcctgctgctgttcggcatcagcttcatcccccagctgctggagcacctgttctacgagagctaccagaagagctacccctgggagctgagccccaacacctacttcctgagccccggccagcagccccaggaccccctgacccacctgctggtgatcaacaagaccggcagcaccatcgacaacttcctgcacagcctgagaagacagaacatcgccatcgaggtggacgccttcggcaccagaaacggcaccgacgaccccagctacaacggcgccatcatcgtgagcggcgacgagaaggaccacagattcagcatcgcctgcaacaccaagagactgaactgcttccccgtgctgctggacgtgatcagcaacggcctgctgggcatcttcaacagcagcgagcacatccagaccgacagaagcaccttcttcgaggagcacatggactacgagtacggctacagaagcaacaccttcttctggatccccatggccgccagcttcaccccctacatcgccatgagcagcatcggcgactacaagaagaaggcccacagccagctgagaatcagcggcctgtaccccagcgcctactggttcggccaggccctggtggacgtgagcctgtacttcctgatcctgctgctgatgcagatcatggactacatcttcagccccgaggagatcatcttcatcatccagaacctgctgatccagatcctgtgcagcatcggctacgtgagcagcctggtgttcctgacctacgtgatcagcttcatcttcagaaacggcagaaagaacagcggcatctggagcttcttcttcctgatcgtggtgatcttcagcatcgtggccaccgacctgaacgagtacggcttcctgggcctgttcttcggcaccatgctgatcccccccttcaccctgatcggcagcctgttcatcttcagcgagatcagccccgacagcatggactacctgggcgccagcgagagcgagatcgtgtacctggccctgctgatcccctacctgcacttcctgatcttcctgttcatcctgagatgcctggagatgaactgcagaaagaagctgatgagaaaggaccccgtgttcagaatcagccccagaagcaacgccatcttccccaaccccgaggagcccgagggcgaggaggaggacatccagatggagagaatgagaaccgtgaacgccatggccgtgagagacttcgacgagacccccgtgatcatcgccagctgcctgagaaaggagtacgccggcaagaagaagaactgcttcagcaagagaaagaagaagatcgccaccagaaacgtgagcttctgcgtgaagaagggcgaggtgatcggcctgctgggccacaacggcgccggcaagagcaccaccatcaagatgatcaccggcgacaccaagcccaccgccggccaggtgatcctgaagggcagcggcggcggcgagcccctgggcttcctgggctactgcccccaggagaacgccctgtggcccaacctgaccgtgagacagcacctggaggtgtacgccgccgtgaagggcctgagaaagggcgacgccatgatcgccatcaccagactggtggacgccctgaagctgcaggaccagctgaaggcccccgtgaagaccctgagcgagggcatcaagagaaagctgtgcttcgtgctgagcatcctgggcaaccccagcgtggtgctgctggacgagcccagcaccggcatggaccccgagggccagcagcagatgtggcaggtgatcagagccaccttcagaaacaccgagagaggcgccctgctgaccacccactacatggccgaggccgaggccgtgtgcgacagagtggccatcatggtgagcggcagactgagatgcatcggcagcatccagcacctgaagagcaagttcggcaaggactacctgctggagatgaagctgaagaacctggcccagatggagcccctgcacgccgagatcctgagactgttcccccaggccgcccagcaggagagattcagcagcctgatggtgtacaagctgcccgtggaggacgtgagacccctgagccaggccttcttcaagctggagatcgtgaagcagagcttcgacctggaggagtacagcctgagccagagcaccctggagcaggtgttcctggagctgagcaaggagcaggagctgggcgacctggaggaggacttcgaccccagcgtgaagtggaagctgctgctgcaggaggagccctag

SEQ ID NO: 231172 - protein, 1617 aa, Artificial Sequence
  derived and/or modified sequence
MNMKQKSVYQQTKALLCKNFLKKWRMKRESLLEWGLSILLGLCIALFSSSMRNVQFPGMAPQNLGRVDKFNSSSLMVVYTPISNLTQQIMNKTALAPLLKGTSVIGAPNKTHMDEILLENLPYAMGIIFNETFSYKLIFFQGYNSPLWKEDFSAHCWDGYGEFSCTLTKYWNRGFVALQTAINTAIIEITTNHPVMEELMSVTAITMKTLPFITKNLLHNEMFILFFLLHFSPLVYFISLNVTKERKKSKNLMKMMGLQDSAFWLSWGLIYAGFIFIISIFVTIIITFTQIIVMTGFMVIFILFFLYGLSLVALVFLMSVLLKKAVLTNLVVFLLTLFWGCLGFTVFYEQLPSSLEWILNICSPFAFTTGMIQIIKLDYNLNGVIFPDPSGDSYTMIATFSMLLLDGLIYLLLALYFDKILPYGDERHYSPLFFLNSSSCFQHQRTNAKVIEKEIDAEHPSDDYFEPVAPEFQGKEAIRIRNVKKEYKGKSGKVEALKGLLFDIYEGQITAILGHSGAGKSSLLNILNGLSVPTEGSVTIYNKNLSEMQDLEEIRKITGVCPQFNVQFDILTVKENLSLFAKIKGIHLKEVEQEVQRILLELDMQNIQDNLAKHLSEGQKRKLTFGITILGDPQILLLDEPTTGLDPFSRDQVWSLLRERRADHVILFSTQSMDEADILADRKVIMSNGRLKCAGSSMFLKRRWGLGYHLSLHRNEICNPEQITSFITHHIPDAKLKTENKEKLVYTLPLERTNTFPDLFSDLDKCSDQGVTGYDISMSTLNEVFMKLEGQSTIEQDFEQVEMIRDSESLNEMELAHSSFSEMQTAVSDMGLWRMQVFAMARLRFLKLKRQTKVLLTLLLVFGIAIFPLIVENIMYAMLNEKIDWEFKNELYFLSPGQLPQEPRTSLLIINNTESNIEDFIKSLKHQNILLEVDDFENRNGTDGLSYNGAIIVSGKQKDYRFSVVCNTKRLHCFPILMNIISNGLLQMFNHTQHIRIESSPFPLSHIGLWTGLPDGSFFLFLVLCSISPYITMGSISDYKKNAKSQLWISGLYTSAYWCGQALVDVSFFILILLLMYLIFYIENMQYLLITSQIVFALVIVTPGYAASLVFFIYMISFIFRKRRKNSGLWSFYFFFASTIMFSITLINHFDLSILITTMVLVPSYTLLGFKTFLEVRDQEHYREFPEANFELSATDFLVCFIPYFQTLLFVFVLRCMELKCGKKRMRKDPVFRISPQSRDAKPNPEEPIDEDEDIQTERIRTATALTTSILDEKPVIIASCLHKEYAGQKKSCFSKRKKKIAARNISFCVQEGEILGLLGPNGAGKSSSIRMISGITKPTAGEVELKGCSSVLGHLGYCPQENVLWPMLTLREHLEVYAAVKGLRKADARLAIARLVSAFKLHEQLNVPVQKLTAGITRKLCFVLSLLGNSPVLLLDEPSTGIDPTGQQQMWQAIQAVVKNTERGVLLTTHNLAEAEALCDRVAIMVSGRLRCIGSIQHLKNKLGKDYILELKVKETSQVTLVHTEILKLFPQAAGQERYSSLLTYKLPVADVYPLSQTFHKLEAVKHNFNLEEYSLSQCTLEKVFLELSKEQEVGNFDEEIDTTMRWKLLPHSDEP

SEQ ID NO: 231173 - protein, 477 aa, Artificial Sequence [sequence omitted]

SEQ ID NO: 231174 - DNA, 4854 bp, Artificial Sequence
  derived and/or modified sequence
atgaatatgaaacaaaagagtgtataccaacagacaaaagcgctgctttgcaagaactttttaaaaaaatggagaatgaagagagagagcctgttggagtggggattatccatcctgcttggtctttgcatcgctctgtttagctcctccatgcggaacgtacagttcccagggatggcgccacaaaatctggggagggttgacaaatttaattcttcatcgctgatggtcgtttatacacccatctctaacctcactcagcagatcatgaacaaaaccgctctggcacccttgctgaagggtacgtctgttataggcgctcccaacaagacccatatggacgagatccttctggagaatctcccgtatgccatgggaattatcttcaacgagaccttcagctataagctgattttcttccagggatacaattctcctctgtggaaggaagacttcagcgcacattgctgggatggttacggggaattttcttgcacactgacaaaatactggaatagggggttcgtggcgctacagactgctataaacaccgcaatcatcgagataacgaccaatcaccccgttatggaggagctcatgtccgtaacggccatcactatgaaaacgctgccttttatcaccaaaaatctgttacacaacgaaatgttcatcctgttttttctgcttcacttttcgcccctggtatattttattagccttaacgtgaccaaagaacggaaaaagtctaagaaccttatgaagatgatgggccttcaggacagcgcattttggctgagctgggggcttatctacgccggattcatcttcattataagtatctttgtcacgatcatcattacctttacccaaattattgtaatgacagggttcatggttatatttatcttgttcttcctctatggcttatccctagtggctctagtgttcttgatgtcagtcttactgaagaaagctgtccttaccaatctcgtggtctttctactgacactgttttgggggtgcctggggtttacggtgttttacgagcagttgccatcttccctagaatggatcctcaacatctgttctccctttgccttcactactggcatgatccaaattataaagctcgactataatctcaatggggtgattttccccgacccgtcaggagactcttacaccatgattgcgacattcagcatgctcctgctggatgggctgatctatctgctgctcgcgctctactttgacaagatccttccatacggggacgaacgacactattcgcctctgttctttctgaacagctcctcgtgcttccaacaccaaaggacaaacgcaaaggtgatcgagaaagaaattgatgctgagcacccctccgacgattactttgaaccagtggccccagagttccagggcaaggaagctatcaggattagaaacgtgaaaaaagaatacaagggaaagtccggtaaggtggaggctctaaagggactgttatttgatatatacgagggccagattactgccatcttgggccactccggtgctggcaaatcttccctcctgaacattctcaacggcctctctgtgcctaccgagggtagcgttaccatatacaacaaaaacctcagcgagatgcaagaccttgaagaaatccgcaagatcaccggagtttgtccccaattcaacgtccagtttgacatattgacagttaaagagaacctgagcttgtttgccaagataaaaggcatccacctgaaggaggttgagcaggaagtccagaggatattgctggagctagacatgcaaaatatacaggacaatctagccaaacacctgtccgagggccaaaaacggaaactaacattcggtatcaccatcctgggcgatccccagatcctccttctcgatgaaccaactacaggcctggaccccttttcacgtgatcaggtctggtctttgttgagggagaggcgtgcggaccatgtaattttattttcaacccagagcatggacgaagctgacattttagccgacagaaaggtcataatgtccaacggcagacttaagtgtgctggatcttccatgttcctaaagaggaggtggggccttgggtatcacctgtcccttcaccggaatgagatttgcaatcccgaacagatcacttccttcatcacacaccatatccccgatgccaagctgaagaccgagaacaaggagaagctggtgtacacactgcccctcgagcgcacaaacaccttcccggatttattctcggatcttgacaagtgtagtgaccagggagttacaggttacgacatcagtatgagtactctaaacgaggtgttcatgaagctcgagggccagtctactatcgaacaggattttgagcaagtcgagatgataagggattccgaatccctcaacgaaatggagctggctcactccagcttctccgaaatgcaaactgcggtttcagatatggggctgtggagaatgcaggtctttgcaatggcccgcctgcgattcttgaaattgaagcgccagacgaaagtcctgttgacactgctccttgtgttcggcattgccatcttccctctcatagttgagaacattatgtacgctatgctgaacgagaaaatagactgggaatttaaaaatgaactatactttctgagtcccggacagttaccccaggagccacgtaccagcctgctgattatcaacaacactgagtccaacatcgaggatttcatcaaaagtctgaaacaccaaaatattctgcttgaggtcgatgactttgagaatcggaacgggaccgacggattatcctataacggggcaattattgtgtccggcaaacagaaagattatcgattcagtgtggtctgtaatacgaaacgtcttcactgctttcctatcctgatgaacattatttctaacgggcttctgcagatgtttaaccacacacagcacataagaattgagtcatcaccctttcctctgagtcatattggtctgtggacaggtcttcctgacggttcttttttcttgtttctggtcttgtgcagtattagtccctacattaccatgggaagtattagtgactataagaaaaatgcgaagtctcagctgtggattagtgggttatacacctcagcttactggtgcggtcaggccctggtcgatgttagcttttttattcttatcctgctactaatgtacctcatcttttacatcgaaaacatgcagtatcttcttattacatcccaaattgtgtttgctctcgtaatagtgacacccggctacgccgccagcttggttttttttatctacatgattagctttatcttcaggaagagaaggaaaaactctggcctctggtccttctattttttctttgcctctactatcatgttctcaataactctgatcaatcattttgatctttcaatattgatcacgaccatggtgctggttccctcatacaccctcctgggcttcaagacgtttctggaagttcgcgatcaggagcactaccgcgagttccccgaagccaatttcgagctaagtgcaaccgattttctggtatgtttcatcccctacttccaaacactgttgtttgtctttgtgctgcggtgtatggaactaaaatgcgggaaaaaacgtatgaggaaggacccagtgtttagaatctctccacagtcaagagatgccaagcctaacccggaggaaccaattgacgaagacgaggacatccagacggagaggattagaacagccactgccctgactaccagcatcctggatgaaaagcccgtcataatcgcctcatgcctgcacaaggagtacgctgggcagaaaaaatcctgcttctcaaagaggaaaaaaaaaatcgccgcccgaaacatatcattctgcgtacaagaaggagaaattcttgggctgctgggtccgaacggagctggtaaatcctcttctatccgtatgatatctggcattactaaaccaaccgccggagaggttgaattaaaggggtgcagcagcgttcttgggcacctagggtactgcccccaggagaatgtgctgtggcccatgttgaccctgagggaacatctggaggtctatgcagcagtgaaaggactgcggaaggcggacgccaggctcgctatagctcgactggtcagcgcctttaaattacacgaacagctgaacgtgccagtgcagaagctgaccgccggaattacacggaaactctgttttgttttgagtctgctgggcaattccccagttttgttattagatgagccaagcacagggatagaccccacaggccaacaacagatgtggcaagcaattcaggccgtcgtgaaaaacaccgagaggggagttctgttgacaacacataatttggctgaggctgaggcactctgcgatcgcgttgcaatcatggtatctggcagactaagatgtatcggcagcatccagcacttaaaaaataagcttgggaaggattacatcctcgaattgaaggtcaaggagacaagtcaggtcacgctagtgcatacagagattcttaagttatttcctcaggccgccggtcaggagcggtactccagccttctgacatataagcttccagtggctgatgtttacccactcagtcaaacatttcacaaactcgaggctgtcaagcacaatttcaatctggaagagtactccctgagccagtgtaccttggagaaagtttttcttgagttatctaaggaacaggaggtgggaaacttcgacgaggagatagacactaccatgcggtggaagcttctgcctcacagcgatgaaccgtag

SEQ ID NO: 231175 - DNA, 4854 bp, Artificial Sequence
  derived and/or modified sequence
atgaacatgaagcagaagtctgtgtaccagcagaccaaggccctgctgtgcaagaacttcctgaagaagtggaggatgaagcgggagagcctgctggagtggggcctgagcatcctgctgggcctgtgcatcgccctcttcagcagctccatgagaaatgtgcagtttcctggcatggccccccagaacctgggccgggtggacaagttcaacagcagcagcctgatggtggtgtacacccccatcagcaacctgacccagcagatcatgaacaagacagccctggcccccctgctgaagggcacctctgtgattggagcccccaacaagacccacatggatgagatcctgctggagaacctgccctatgccatgggcatcatcttcaatgagaccttctcctacaagctgatcttcttccagggctacaacagccccctgtggaaggaggacttcagcgcccactgctgggatggctacggggagttcagctgcaccctgaccaagtactggaacagaggatttgtggccctgcagacagccatcaacacagccatcatcgagatcaccaccaaccaccctgtgatggaggagctgatgtctgtgacagccatcaccatgaagaccctgcccttcatcaccaagaacctgctgcacaatgagatgttcatcctcttcttcctgctgcacttcagccccctggtgtacttcatcagcctgaatgtgaccaaggagaggaagaagagcaagaacctgatgaagatgatgggcctgcaggacagcgccttctggctgtcctggggcctcatctatgccggcttcatcttcatcatcagcatctttgtgaccatcatcatcaccttcacccagatcatcgtgatgacaggcttcatggtgatcttcatcctcttcttcctgtatggcctgagcctggtggccctggtgttcctgatgtctgtgctgctgaagaaggctgtgctgaccaacctggtggtgttcctgctgaccctcttctggggctgcctgggcttcaccgtcttctatgagcagctgcccagcagcctggagtggatcctgaacatctgcagcccctttgccttcaccaccggcatgatccagatcatcaagctggactacaacctgaatggagtcatcttcccagaccccagcggggacagctacaccatgattgccaccttctccatgctgctgctggatggcctcatctacctgctgctggccctgtactttgacaagatcctgccctatggagatgagcggcactacagccccctcttcttcctgaacagcagcagctgcttccagcaccagaggaccaatgccaaggtgattgagaaggagattgatgctgagcaccccagtgatgactactttgagcctgtggcccctgagttccagggcaaggaggccatccgcatcagaaatgtgaagaaggagtacaagggcaagagcggcaaggtggaggccctgaagggcctgctgtttgacatctatgagggccagatcacagccatcctgggccacagcggggccggcaagagcagcctgctgaacatcctgaatggcctgtctgtgcccacagagggctctgtgaccatctacaacaagaacctgtctgagatgcaggacctggaggagatcaggaagatcaccggggtgtgcccccagttcaacgtgcagtttgacatcctgactgtgaaggagaacctgagcctgtttgccaagatcaagggcatccacctgaaggaggtggagcaggaggtgcagaggatcctgctggagctggacatgcagaacatccaggacaacctggccaagcacctgtctgagggccagaagaggaagctgaccttcggcatcaccatcctgggggacccccagatcctgctgctggatgagcccaccaccggcctggaccccttcagccgggaccaggtgtggagcctgctgcgggagcggcgggctgaccacgtgatcctcttcagcacccagagcatggatgaggccgacatcctggccgacaggaaggtgatcatgagcaatggccgcctgaagtgtgccggcagctccatgttcctgaagaggcgctggggcctgggctaccacctgagcctgcacagaaatgagatctgcaaccctgagcagatcaccagcttcatcacccaccacatcccagatgccaagctgaagacagagaacaaggagaagctggtgtacaccctgcccctggagaggaccaacaccttcccagacctcttcagtgacctggacaagtgcagcgaccagggcgtgacaggctatgacatctccatgagcaccctgaatgaggtgttcatgaagctggagggccagagcaccatcgagcaggactttgagcaggtggagatgatccgggacagcgagagcctgaatgagatggagctggcccacagcagcttcagcgagatgcagacagctgtgtctgacatgggcctgtggaggatgcaggtgtttgccatggcccggctgcgcttcctgaagctgaagaggcagaccaaggtgctgctgaccctgctgctggtgtttggcatcgccatcttccccctcatcgtggagaacatcatgtatgccatgctgaatgagaagattgactgggagttcaagaatgagctgtacttcctgagccctggccagctgccccaggagcccaggaccagcctgctgatcatcaacaacacagagagcaacatcgaggacttcatcaagagcctgaagcaccagaacatcctgctggaggtggatgactttgaaaatagaaatggaacagatggcctgagctacaacggggccatcatcgtgtctgggaagcagaaggactaccgcttctctgtggtgtgcaacaccaagaggctgcactgcttccccatcctgatgaacatcatcagcaatggcctgctgcagatgttcaaccacacccagcacatcagaattgagagcagccccttccccctgagccacatcggcctgtggacaggcctgcctgatggcagcttcttcctgttcctggtgctgtgcagcatcagcccctacatcaccatgggcagcatcagtgactacaagaagaatgccaagagccagctgtggatcagcggcctgtacaccagcgcctactggtgtggccaggccctggtggatgtgtccttcttcatcctgatcctgctgctgatgtacctgatcttctacatcgagaacatgcagtacctgctgatcaccagccagatcgtgtttgccctggtgattgtgaccccaggctacgccgccagcctggtgttcttcatctacatgatctccttcatcttcaggaagaggaggaagaacagcggcctgtggagcttctacttcttctttgccagcaccatcatgttcagcatcaccctcatcaaccactttgacctgagcatcctgatcaccaccatggtgctggtgcccagctacaccctgctgggcttcaagaccttcctggaggtgcgggaccaggagcactaccgggagttccctgaggccaactttgagctgagcgccacagacttcctggtgtgcttcatcccctacttccagaccctgctgtttgtgtttgtgctgcgctgcatggagctgaagtgtgggaagaagaggatgaggaaggaccccgtcttccgcatcagcccccagagcagagatgccaagcccaaccctgaggagcccattgatgaagatgaggacatccagacagagcgcatcagaacagccacagccctgaccaccagcatcctggatgagaagcctgtgatcatcgccagctgcctgcacaaggagtatgccggccagaagaagagctgcttcagcaagaggaagaagaagattgctgccaggaacatctccttctgtgtgcaggagggggagatcctgggcctgctgggccccaacggggccggcaagagcagcagcatccgcatgatcagcggcatcaccaagcccacagctggggaggtggagctgaagggctgcagctctgtgctgggccacctgggctactgcccccaggagaatgtgctgtggcccatgctgaccctgcgggagcacctggaggtgtatgctgctgtgaagggcctgaggaaggcagatgcccggctggccatcgcccggctggtgtctgccttcaagctgcacgagcagctgaatgtgcctgtgcagaagctgacagctggcatcaccaggaagctgtgctttgtgctgagcctgctgggcaacagccctgtgctgctgctggatgagcccagcactggaattgaccccaccggccagcagcagatgtggcaggccatccaggccgtggtgaagaacacagagcggggcgtgctgctgaccacccacaacctggccgaggccgaggccctgtgtgacagagtggccatcatggtgtctggccgcctgcgctgcatcggcagcatccagcacctgaagaacaagctgggcaaggactacatcctggagctgaaggtgaaggagaccagccaggtgaccctggtgcacacagagatcctgaagctgttcccccaggccgccggccaggagcgctacagcagcctgctgacctacaagctgcctgtggctgatgtgtaccccctgagccagaccttccacaagctggaggccgtgaagcacaacttcaacctggaggagtacagcctgagccagtgcaccctggagaaggtgttcctggagctgagcaaggagcaggaggtgggcaactttgatgaggagattgacaccaccatgcgctggaagctgctgccccacagtgatgagccctag

SEQ ID NO: 231176 - DNA, 4854 bp, Artificial Sequence
  derived and/or modified sequence
atgaacatgaagcagaagagcgtgtaccagcagaccaaggccctgctttgcaaaaactttctgaagaagtggagaatgaagagagagtccctgctcgaatggggcctaagcatccttctgggcctctgtattgctctgttcagctcctctatgaggaacgttcagttccctggcatggccccccagaatctcggcagagttgataagttcaacagtagcagcttgatggtagtatacactccgatcagcaatttgacccagcagataatgaacaaaacagcgctagcacccttgctgaaagggacaagcgtcatcggggccccgaacaagactcatatggacgagatcctgcttgaaaatcttccctatgcaatggggattatcttcaatgaaaccttttcctacaaactgatcttctttcaggggtacaattctcccttgtggaaagaagacttcagcgcccattgctgggatggctatggtgaattcagctgtaccttgacaaagtactggaacaggggattcgttgccctgcagacagctatcaatacagccatcatcgagatcaccacaaaccacccagtcatggaagagcttatgtccgtcactgctataactatgaagactttgccttttattacaaagaatcttctgcacaatgagatgttcattctgttcttcctcctgcacttctctcctcttgtatatttcatttcgctcaacgtgaccaaggaaagaaagaaaagcaagaatctgatgaagatgatgggattgcaggatagtgccttttggttgtcctgggggctgatctatgccggctttattttcatcatttctatctttgtgacgatcattatcacatttacacagataatcgtcatgacaggatttatggtgattttcatcctgttctttttatatggactgtctctcgtggccttggtctttcttatgtctgtcctgctaaagaaggcagtccttacaaacctggtggttttccttcttacgctcttctggggctgtctaggattcaccgtgttctacgaacagttgccttcttctttggaatggattctgaacatctgctcacctttcgctttcactacaggaatgatacaaatcataaagctggattataacttgaatggggtgattttccccgacccctctggagattcttacaccatgatcgcgaccttttcaatgctcctgctcgatggcctcatatatttactgctcgctctgtattttgacaaaatcctcccatacggggatgagagacactatagcccattgttctttcttaacagctcaagctgcttccagcatcagcgcaccaacgctaaagttatagagaaagaaatcgacgcagagcacccttcagatgattatttcgagccagttgcaccagaatttcagggtaaagaggcgatccgcatccgcaacgttaaaaaggaatacaaaggtaagagcgggaaagttgaggctctcaaggggctgctgttcgatatctatgagggccagattacagctatcttgggccacagcggagcaggcaaatcctcccttttgaatattctgaacggactgagcgtgccaacggaggggagtgtgaccatttacaataaaaacctgtccgagatgcaggatctggaagagatcagaaagatcacaggggtctgcccccagtttaacgtacagttcgacattctcactgtcaaggagaacctgtccttatttgcgaagattaaagggatccacctgaaggaggtggagcaggaggtgcagcggattttactagagctggatatgcaaaacatccaggacaatcttgcaaaacatctttccgagggacagaaacgtaagcttacctttgggatcacaatattgggcgatccccaaatcctgctgctggatgaaccaacgaccgggctcgacccgttctcacgcgatcaggtgtggtctcttctgcgcgagagacgggcagaccacgttattttgttctcaactcagtccatggacgaggccgacatcctcgctgatcgaaaggtgattatgtccaacggccgcctcaagtgcgcagggagctcaatgttcctgaaaagaagatggggactcgggtaccacttatcactgcacagaaatgagatttgtaaccccgaacagatcacgtcctttattacacaccatatacccgatgctaagttgaagactgagaataaagagaaactcgtctacacccttccactcgagaggactaacacctttccggacttgttctctgacctggacaagtgcagtgaccagggggtgaccgggtacgatatctccatgtctactctaaacgaagtattcatgaaattggaggggcagagcaccatcgagcaggactttgaacaagtcgaaatgatacgagatagcgaaagcctgaacgagatggagctagcccactcctccttctcagagatgcagaccgccgtcagtgatatgggattgtggagaatgcaggttttcgccatggccagactcagatttctgaaattgaagcgccaaactaaggtactcctgactcttctcctggtattcggaattgctatttttccattgattgtggagaatatcatgtacgccatgttgaacgagaaaatagattgggagttcaaaaacgaactgtacttccttagtcccgggcagctcccacaggagccacgaacctcactgctgataatcaataatacggagtccaatattgaagatttcatcaagagtctgaaacaccagaatatattactggaggttgatgattttgaaaaccggaatggaacagacggtctgagttataatggggcaataatcgtatcaggtaagcagaaggactatagattcagcgttgtctgtaatactaaacggttgcactgcttccctatcttaatgaacatcatcagcaatggcctcctgcagatgttcaaccacacacagcacattcggattgaatcgtcaccattcccactaagccatattgggctctggacagggttgcccgacggctcattcttcctgttcctcgtgctgtgctctatctctccctacattactatgggaagtattagtgactacaagaaaaacgctaagagtcagctgtggatctctgggctctatacctctgcctattggtgcggccaggcactggtggatgtgagcttctttattctgatactcttattaatgtacctgattttctatatagagaatatgcagtatctgctgataacaagccagatagtgtttgctcttgtgattgttacccccggctacgccgcaagcctggtattttttatatatatgatttccttcatttttaggaaacgacgcaagaactccgggctctggagcttctactttttcttcgcatccactattatgtttagcatcaccctgatcaaccactttgatctgtccattctcattaccacaatggtgttggtgccgagctacaccctgctgggcttcaaaacgttcttagaggttagagaccaagagcactatagagaatttcccgaagccaatttcgaactgagcgctaccgatttcctggtgtgctttatcccatactttcagacactgctgttcgtctttgttctcaggtgcatggagctgaaatgcggaaagaagcgcatgcgcaaggacccggtctttagaatctcgccccagtcgagggacgccaagcctaaccctgaagaacccattgatgaagacgaggacatccaaactgaacgtatcaggacagcaacagccctaacgacttcaatccttgatgagaaaccagtcattattgccagttgtctccacaaggagtacgcaggccagaaaaaatcatgcttctcaaaaagaaaaaagaagatagcggctagaaatatttcgttttgtgtacaagagggagaaatccttgggctcctcggacccaatggggcgggtaaaagcagtagcattaggatgatctccggtatcacaaaacccaccgctggggaagtggagttgaaagggtgctcctcagtcctcggacatttgggctattgtccacaggaaaatgtgctatggcccatgctgaccctgcgtgaacatctcgaggtgtatgctgccgtgaaaggactgcgaaaggctgatgcccggctggccatagcgagactagtctcggcctttaagctccacgagcagctcaatgttccagtgcagaaacttaccgctggaattacaaggaaattgtgcttcgtgctgtctctcctgggcaattcccccgtcttgctgctggatgagcctagtacaggaatcgatcctaccggtcagcagcagatgtggcaagctattcaggctgttgttaagaacaccgagagaggcgttttactgaccacacataacttggccgaagctgaagctctgtgtgacagagtcgctataatggtgagtgggagattacgttgcataggttcgattcagcacctgaaaaacaaacttggcaaggattatatcttggaactgaaagtcaaggagacgagtcaagtgacactggtacacacggaaattctcaagttattcccacaggctgccgggcaggagcgctatagctcactcctcacttataaactgccagtcgccgatgtgtaccccctgtcgcaaaccttccataagctggaggccgtcaagcacaatttcaacctggaggagtattcactgtcacagtgcaccctcgaaaaggtattcctggagttgtcaaaggagcaggaagtgggcaatttcgatgaggagatcgataccaccatgcgatggaaacttttgccacatagtgatgaaccttag

SEQ ID NO: 231177 - DNA, 4854 bp, Artificial Sequence
  derived and/or modified sequence
atgaacatgaagcagaaaagtgtgtatcagcagactaaagccctcctgtgcaaaaattttctgaagaaatggcggatgaaacgggaatctctgctggaatgggggctatcaattctgctgggactctgtattgccctcttttcatcatctatgcgcaacgtgcagttccccggaatggctcctcagaacttaggccgagttgataaatttaatagctccagtcttatggtggtctacacccccatatctaaccttacccagcagatcatgaataagaccgctcttgccccattactgaagggcacctccgtgataggtgcgccaaataaaacacatatggatgaaattttgctggagaacttaccctacgccatgggaatcatcttcaacgagacattctcatacaaactgatattttttcagggttacaatagcccactgtggaaagaggacttttccgcccattgttgggacggatacggcgagtttagctgtaccctgaccaaatattggaatagaggtttcgtcgcactccaaaccgccatcaatactgcaatcatagaaatcacaactaaccaccctgtaatggaagaactgatgagcgtgacagccatcactatgaaaacattgccgtttatcactaaaaatctactgcataacgagatgttcatcctcttttttttgctgcacttttcgcctctggtctactttatttctttgaacgtcacgaaggaacgcaaaaagtctaagaatctaatgaaaatgatgggtttgcaagacagcgccttctggctgtcgtggggtctcatttatgcaggctttattttcattatctccatttttgtgactatcatcatcaccttcacacagatcatcgttatgaccggcttcatggtgatttttatccttttctttctgtatggcttgtcactcgttgccctggtgttcctgatgagtgtcttgctcaaaaaggctgtgttaacgaatctcgtcgtgttcttattgacactgttctggggctgtctggggtttaccgtcttctacgagcagttgcccagtagcttggagtggatcctcaacatttgctccccgtttgcttttacgaccggtatgatccagatcatcaaactggactacaacttaaatggggtgatatttcccgatccaagcggtgactcttacactatgatcgctaccttcagtatgttactgctggatggcctgatttatctgctgctggcgctatattttgacaagatactgccttatggcgacgaaaggcactactctcccctcttttttctgaacagctcctcatgtttccagcatcagcggactaacgctaaggtgatcgagaaggagattgacgccgagcacccctccgacgattacttcgagccggtggcacctgagtttcaggggaaggaagcaattcggattagaaatgttaagaaagagtataagggaaagtcagggaaggtcgaggcgttaaaaggtcttcttttcgatatatacgaaggtcagattaccgcgattctggggcactctggcgctggaaagtcttcccttctgaacatactgaacggcctgtcagtgccgaccgaaggaagcgttacaatctataataagaacctcagcgagatgcaagatctggaagaaatcaggaagattacaggagtatgcccccagttcaacgttcagttcgatatcctgacagtgaaagagaacctgagcctgtttgccaaaataaaagggatccatcttaaagaggtcgaacaggaggttcagcgcatcttactggagttggacatgcagaacattcaggacaaccttgcgaaacacctgtcagagggacagaagaggaagctcaccttcgggataactatccttggcgacccgcagatattgctgctcgacgaacctaccactggcctggaccctttcagtcgcgaccaagtgtggagcctcttaagagagagacgcgcagaccatgtgatcctcttctccacgcagagcatggacgaggctgatatcctcgccgaccggaaggtcatcatgtccaatggtaggctcaaatgcgctggttcgagtatgtttctgaagcggcgttggggactaggttaccatctatccctccaccgaaacgaaatctgcaatcctgagcagatcaccagctttatcacccatcacattcccgacgcaaagctgaaaacagaaaataaggaaaagctcgtctataccttgccgctggagcgcacaaatacctttccagaccttttcagcgatctggacaagtgttcagatcagggtgtgaccggatacgatatctcaatgtcaacgctgaacgaagtcttcatgaaactggaaggccaatctacaattgaacaggactttgagcaagtcgaaatgataagggattccgagtcattgaacgaaatggagctggcacatagctccttttctgagatgcagacggccgtgagtgacatggggctgtggagaatgcaggtgtttgctatggctcggctaaggtttctgaaactcaagcgccagaccaaggtcctgttaacactgctactcgtcttcggaattgctatatttcccctgatcgtggagaacatcatgtacgcaatgctgaacgagaagattgattgggagtttaagaatgaattgtactttctgagccccggacaattaccccaggagcctcggacttctctgctgatcattaacaatacggaatctaacatcgaggattttattaaaagtctcaaacatcagaacattcttctggaagtagatgactttgagaataggaatgggactgacgggctgtcttacaacggcgctatcattgtctctggaaaacagaaagattacaggttctcagttgtgtgtaacactaaacgattgcactgtttccctattctaatgaacattattagtaacggcctgcttcaaatgttcaatcacacacagcacatcaggattgaaagctccccctttcccctgtcacacattggtctttggaccggtcttcctgatggatctttctttctgtttctggttttgtgctccatctccccttacattaccatgggcagtataagcgactataaaaagaatgccaaaagccagctgtggatctccgggctctacactagtgcttactggtgcgggcaagcattggtggacgtctccttttttattctcattctactcttgatgtatctgatcttttacatcgaaaatatgcagtatctcctcataacctctcagattgtcttcgccctcgtgattgtgactcctgggtatgcagcatcacttgtctttttcatttacatgatatccttcatctttcgcaagcggaggaaaaacagcggcctgtggagcttctacttctttttcgcctccactattatgttctcaatcaccctcatcaatcatttcgatttgagcattctgattacaactatggtgcttgtgccctcttatacactgctggggtttaaaacatttctggaagtcagagatcaggagcactacagggagttccctgaggccaacttcgagctctcagctacagatttcctggtgtgttttattccctactttcaaacactcctgttcgtgttcgtgctccgctgtatggaactgaagtgcggaaaaaaacgcatgcgaaaggaccctgtgttccgtatctccccccaatcaagggacgcaaagcccaatcctgaagagcctatcgacgaagacgaggatattcaaacagagcgaatccgtacagcgaccgctctgaccacatcaatcttggacgagaagcccgttattattgctagctgcctccataaggaatatgcagggcagaaaaagagttgcttcagcaagaggaaaaagaaaatcgctgcccgaaatattagcttctgcgtgcaggagggcgaaatcttaggactgctaggaccgaatggtgcaggcaagagttctagtattaggatgatcagcggaatcacaaagcctacagccggagaggtggagttgaaagggtgtagttccgtgctggggcacttaggctactgcccgcaggagaacgttctatggcctatgctgaccttgcgagaacatctggaggtatacgctgcggtgaagggactgcgaaaagccgacgcaaggctcgccatcgcccgactagtgagcgccttcaaactgcatgagcagcttaacgtgccagttcaaaaactgacagccggtataacaagaaaactttgtttcgtgttatctctgctcggcaatagccccgtccttttgctggacgaaccatccaccggcatcgaccctacggggcagcagcaaatgtggcaagccatccaggcggttgtcaaaaacaccgaacgaggggtcctcctcactacccacaacctggccgaagccgaggcactctgtgatcgagtcgcaatcatggtatccggtcggctccgctgtatcggttctatccagcatctgaaaaacaagctaggcaaggactacatcttggaactcaaagttaaggagacatcccaggtaactctggtgcacacggagatcttaaagctttttcctcaggccgcaggacaggaacggtactcctcgctcctgacatataagttacccgtagcggatgtgtacccattgagccagaccttccacaaactggaggctgtaaaacacaacttcaacttagaggaatacagtctcagccagtgtactctagagaaggtatttctggaactcagcaaggagcaggaggtgggcaactttgatgaggagatcgacacaaccatgaggtggaaactcctcccacattctgatgaaccttag

SEQ ID NO: 231178 - DNA, 5296 bp, Artificial Sequence
  derived and/or modified sequence
ctgctggagtaggcacccatttaaagaaaaaatgaagaagcagcaataaagaagttgtaatcgttacctagacaaacagagaactggttttgacagtgtttctagagtgctttttattattttcctgacagttgtgttccaccatgattactttctccttcagcgaataggctaaatgaatatgaaacagaaaagcgtgtatcagcaaaccaaagcacttctgtgcaagaattttcttaagaaatggaggatgaaaagagagagcttattggaatggggcctctcaatacttctaggactgtgtattgctctgttttccagttccatgagaaatgtccagtttcctggaatggctcctcagaatctgggaagggtagataaatttaatagctcttctttaatggttgtgtatacaccaatatctaatttaacccagcagataatgaataaaacagcacttgctcctcttttgaaaggaacaagtgtcattggggcaccaaataaaacacacatggacgaaatacttctggaaaatttaccatatgctatgggaatcatctttaatgaaactttctcttataagttaatatttttccagggatataacagtccactttggaaagaagatttctcagctcattgctgggatggatatggtgagttttcatgtacattgaccaaatactggaatagaggatttgtggctttacaaacagctattaatactgccattatagaaatcacaaccaatcaccctgtgatggaggagttgatgtcagttactgctataactatgaagacattacctttcataactaaaaatcttcttcacaatgagatgtttattttattcttcttgcttcatttctccccacttgtatattttatatcactcaatgtaacaaaagagagaaaaaagtctaagaatttgatgaaaatgatgggtctccaagattcagcattctggctctcctggggtctaatctatgctggcttcatctttattatttccatattcgttacaattatcataacattcacccaaattatagtcatgactggcttcatggtcatatttatactcttttttttatatggcttatctttggtagctttggtgttcctgatgagtgtgctgttaaagaaagctgtcctcaccaatttggttgtgtttctccttaccctcttttggggatgtctgggattcactgtattttatgaacaacttccttcatctctggagtggattttgaatatttgtagcccttttgcctttactactggaatgattcagattatcaaactggattataacttgaatggtgtaatttttcctgacccttcaggagactcatatacaatgatagcaactttttctatgttgcttttggatggtctcatctacttgctattggcattatactttgacaaaattttaccctatggagatgagcgccattattctcctttatttttcttgaattcatcatcttgtttccaacaccaaaggactaatgctaaggttattgagaaagaaatcgatgctgagcatccctctgatgattattttgaaccagtagctcctgaattccaaggaaaagaagccatcagaatcagaaatgttaagaaggaatataaaggaaaatctggaaaagtggaagcattgaaaggcttgctctttgacatatatgaaggtcaaatcacggcaatcctgggtcacagtggagctggcaaatcttcactgctaaatattcttaatggattgtctgttccaacagaaggatcagttaccatctataataaaaatctctctgaaatgcaagacttggaggaaatcagaaagataactggcgtctgtcctcaattcaatgttcaatttgacatactcaccgtgaaggaaaacctcagcctgtttgctaaaataaaagggattcatctaaaggaagtggaacaagaggtacaacgaatattattggaattggacatgcaaaacattcaagataaccttgctaaacatttaagtgaaggacagaaaagaaagctgacttttgggattaccattttaggagatcctcaaattttgcttttagatgaaccaactactggattggatcccttttccagagatcaagtgtggagcctcctgagagagcgtagagcagatcatgtgatccttttcagtacccagtccatggatgaggctgacatcctggctgatagaaaagtgatcatgtccaatgggagactgaagtgtgcaggttcttctatgtttttgaaaagaaggtggggtcttggatatcacctaagtttacataggaatgaaatatgtaacccagaacaaataacatccttcattactcatcacatccccgatgctaaattaaaaacagaaaacaaagaaaagcttgtatatactttgccactggaaaggacaaatacatttccagatcttttcagtgatctggataagtgttctgaccagggagtgacaggttatgacatttccatgtcaactctaaatgaagtctttatgaaactggaaggacagtcaactatcgaacaagatttcgaacaagtggagatgataagagactcagaaagcctcaatgaaatggagctggctcactcttccttctctgaaatgcagacagctgtgagtgacatgggcctctggagaatgcaagtctttgccatggcacggctccgtttcttaaagttaaaacgtcaaactaaagtgttattgaccctattattggtatttggaatcgcaatattccctttgattgttgaaaatataatgtatgctatgttaaatgaaaagatcgattgggaatttaaaaacgaattgtattttctctctcctggacaacttccccaggaaccccgtaccagcctgttgatcatcaataacacagaatcaaatattgaagattttataaaatcactgaagcatcaaaatatacttttggaagtagatgactttgaaaacagaaatggtactgatggcctctcatacaatggagctatcatagtttctggtaaacaaaaggattatagattttcagttgtgtgtaataccaagagattgcactgttttccaattcttatgaatattatcagcaatgggctacttcaaatgtttaatcacacacaacatattcgaattgagtcaagcccatttcctcttagccacataggactctggactgggttgccggatggttcctttttcttatttttggttctatgtagcatttctccttatatcaccatgggcagcatcagtgattacaagaaaaatgctaagtcccagctatggatttcaggcctctacacttctgcttactggtgtgggcaggcactagtggacgtcagcttcttcattttaattctccttttaatgtatttaattttctacatagaaaacatgcagtaccttcttattacaagccaaattgtgtttgctttggttatagttactcctggttatgcagcttctcttgtcttcttcatatatatgatatcatttatttttcgcaaaaggagaaaaaacagtggcctttggtcattttacttcttttttgcctccaccatcatgttttccatcactttaatcaatcattttgacctaagtatattgattaccaccatggtattggttccttcatataccttgcttggatttaaaacttttttggaagtgagagaccaggagcactacagagaatttccagaggcaaattttgaattgagtgccactgattttctagtctgcttcataccctactttcagactttgctattcgtttttgttctaagatgcatggaactaaaatgtggaaagaaaagaatgcgaaaagatcctgttttcagaatttccccccaaagtagagatgctaagccaaatccagaagaacccatagatgaagatgaagatattcaaacagaaagaataagaacagccactgctctgaccacttcaatcttagatgagaaacctgttataattgccagctgtctacacaaagaatatgcaggccagaagaaaagttgcttttcaaagaggaagaagaaaatagcagcaagaaatatctctttctgtgttcaagaaggtgaaattttgggattgctaggacccaatggtgctggaaaaagttcatctattagaatgatatctgggatcacaaagccaactgctggagaggtggaactgaaaggctgcagttcagttttgggccacctggggtactgccctcaagagaacgtgctgtggcccatgctgacgttgagggaacacctggaggtgtatgctgccgtcaaggggctcaggaaagcggacgcgaggctcgccatcgcaagattagtgagtgctttcaaactgcatgagcagctgaatgttcctgtgcagaaattaacagcaggaatcacgagaaagttgtgttttgtgctgagcctcctgggaaactcacctgtcttgctcctggatgaaccatctacgggcatagaccccacagggcagcagcaaatgtggcaggcaatccaggcagtcgttaaaaacacagagagaggtgtcctcctgaccacccataacctggctgaggcggaagccttgtgtgaccgtgtggccatcatggtgtctggaaggcttagatgcattggctccatccaacacctgaaaaacaaacttggcaaggattacattctagagctaaaagtgaaggaaacgtctcaagtgactttggtccacactgagattctgaagcttttcccacaggctgcagggcaggaaaggtattcctctttgttaacctataagctgcccgtggcagacgtttaccctctatcacagacctttcacaaattagaagcagtgaagcataactttaacctggaagaatacagcctttctcagtgcacactggagaaggtattcttagagctttctaaagaacaggaagtaggaaattttgatgaagaaattgatacaacaatgagatggaaactcctccctcattcagatgaaccttaaaacctcaaacctagtaattttttgttgatctcctataaactcatgttttatgtaataattaatagtatgtttaattttaaagatcatttaaaattaacatcaggtatattttgtaaatttagttaacaaatacataaattttaaaattattcttcctctcaaacataggggtgatagcaaacctgtgataaaggcaatacaaaatattagtaaagtcacccaaagagtcaggcactgggtattgtggaaataaaactatataaactt

SEQ ID NO: 231179 - DNA, 2176 bp, Artificial Sequence
  derived and/or modified sequence
agtgcaatggggcgatctctgctcactgcaacctctgcctcccagattcaagcgattctcctgcctcagcctcccaagttgctgggattacagacatttaccaccacacctggctgattttgtatttttagtagagatggggtttcaccatgttggtcaggctggttcagactcctgacctcaagtgatcctttttaaggttgaatagtatccattgtttgtatatacatacacattttgttaatccattaatttggacttttgggttgcttccacttagccacataggactctggactgggttgccggatggttcctttttcttatttttggttctatgtagcatttctccttatatcaccatgggcagcatcagtgattacaagaaaaatgctaagtcccagctatggatttcaggcctctacacttctgcttactggtgtgggcaggcactagtggacgtcagcttcttcattttaattctccttttaatgtatttaattttctacatagaaaacatgcagtaccttcttattacaagccaaattgtgtttgctttggttatagttactcctggttatgcagcttctcttgtcttcttcatatatatgatatcatttatttttcgcaaaaggagaaaaaacagtggcctttggtcattttacttcttttttgcctccaccatcatgttttccatcactttaatcaatcattttgacctaagtatattgattaccaccatggtattggttccttcatataccttgcttggatttaaaacttttttggaagtgagagaccaggagcactacagagaatttccagaggcaaattttgaattgagtgccactgattttctagtctgcttcataccctactttcagactttgctattcgtttttgttctaagatgcatggaactaaaatgtggaaagaaaagaatgcgaaaagatcctgttttcagaatttccccccaaagtagagatgctaagccaaatccagaagaacccatagatgaagatgaagatattcaaacagaaagaataagaacagccactgctctgaccacttcaatcttagatgagaaacctgttataattgccagctgtctacacaaagaatatgcaggccagaagaaaagttgcttttcaaagaggaagaagaaaatagcagcaagaaatatctctttctgtgttcaagaaggtgaaattttgggattgctaggacccaatggtgctggaaaaagttcatctattagaatgatatctgggatcacaaagccaactgctggagaggtggaactgaaaggctgcagttcagttttgggccacctggggtactgccctcaagagaacgtgctgtggcccatgctgacgttgagggaacacctggaggtgtatgctgccgtcaaggggctcaggaaagcggacgcgaggctcgccatcgcaagattagtgagtgctttcaaactgcatgagcagctgaatgttcctgtgcagaaattaacagcaggaatcacgagaaagttgtgttttgtgctgagcctcctgggaaactcacctgtcttgctcctggatgaaccatctacgggcatagaccccacagggcagcagcaaatgtggcaggcaatccaggcagtcgttaaaaacacagagagaggtgtcctcctgaccacccataacctggctgaggcggaagccttgtgtgaccgtgtggccatcatggtgtctggaaggcttagatgcattggctccatccaacacctgaaaaacaaacttggcaaggattacattctagagctaaaagtgaaggaaacgtctcaagtgactttggtccacactgagattctgaagcttttcccacaggctgcagggcaggaaaggtattcctctttgttaacctataagctgcccgtggcagacgtttaccctctatcacagacctttcacaaattagaagcagtgaagcataactttaacctggaagaatacagcctttctcagtgcacactggagaaggtattcttagagctttctaaagaacaggaagtaggaaattttgatgaagaaattgatacaacaatgagatggaaactcctccctcattcagatgaaccttaaaacctcaaacctagtaattttttgttgatctcctataaactcatgttttatgtaat

SEQ ID NO: 231180 - DNA, 4854 bp, Artificial Sequence
  derived and/or modified sequence
atgaacatgaagcagaagagcgtgtaccagcagaccaaggccctgctgtgcaagaacttcctgaagaagtggagaatgaagagagagagcctgctggagtggggcctgagcatcctgctgggcctgtgcatcgccctgttcagcagcagcatgagaaacgtgcagttccccggcatggccccccagaacctgggcagagtggacaagttcaacagcagcagcctgatggtggtgtacacccccatcagcaacctgacccagcagatcatgaacaagaccgccctggcccccctgctgaagggcaccagcgtgatcggcgcccccaacaagacccacatggacgagatcctgctggagaacctgccctacgccatgggcatcatcttcaacgagaccttcagctacaagctgatcttcttccagggctacaacagccccctgtggaaggaggacttcagcgcccactgctgggacggctacggcgagttcagctgcaccctgaccaagtactggaacagaggcttcgtggccctgcagaccgccatcaacaccgccatcatcgagatcaccaccaaccaccccgtgatggaggagctgatgagcgtgaccgccatcaccatgaagaccctgcccttcatcaccaagaacctgctgcacaacgagatgttcatcctgttcttcctgctgcacttcagccccctggtgtacttcatcagcctgaacgtgaccaaggagagaaagaagagcaagaacctgatgaagatgatgggcctgcaggacagcgccttctggctgagctggggcctgatctacgccggcttcatcttcatcatcagcatcttcgtgaccatcatcatcaccttcacccagatcatcgtgatgaccggcttcatggtgatcttcatcctgttcttcctgtacggcctgagcctggtggccctggtgttcctgatgagcgtgctgctgaagaaggccgtgctgaccaacctggtggtgttcctgctgaccctgttctggggctgcctgggcttcaccgtgttctacgagcagctgcccagcagcctggagtggatcctgaacatctgcagccccttcgccttcaccaccggcatgatccagatcatcaagctggactacaacctgaacggcgtgatcttccccgaccccagcggcgacagctacaccatgatcgccaccttcagcatgctgctgctggacggcctgatctacctgctgctggccctgtacttcgacaagatcctgccctacggcgacgagagacactacagccccctgttcttcctgaacagcagcagctgcttccagcaccagagaaccaacgccaaggtgatcgagaaggagatcgacgccgagcaccccagcgacgactacttcgagcccgtggcccccgagttccagggcaaggaggccatcagaatcagaaacgtgaagaaggagtacaagggcaagagcggcaaggtggaggccctgaagggcctgctgttcgacatctacgagggccagatcaccgccatcctgggccacagcggcgccggcaagagcagcctgctgaacatcctgaacggcctgagcgtgcccaccgagggcagcgtgaccatctacaacaagaacctgagcgagatgcaggacctggaggagatcagaaagatcaccggcgtgtgcccccagttcaacgtgcagttcgacatcctgaccgtgaaggagaacctgagcctgttcgccaagatcaagggcatccacctgaaggaggtggagcaggaggtgcagagaatcctgctggagctggacatgcagaacatccaggacaacctggccaagcacctgagcgagggccagaagagaaagctgaccttcggcatcaccatcctgggcgacccccagatcctgctgctggacgagcccaccaccggcctggaccccttcagcagagaccaggtgtggagcctgctgagagagagaagagccgaccacgtgatcctgttcagcacccagagcatggacgaggccgacatcctggccgacagaaaggtgatcatgagcaacggcagactgaagtgcgccggcagcagcatgttcctgaagagaagatggggcctgggctaccacctgagcctgcacagaaacgagatctgcaaccccgagcagatcaccagcttcatcacccaccacatccccgacgccaagctgaagaccgagaacaaggagaagctggtgtacaccctgcccctggagagaaccaacaccttccccgacctgttcagcgacctggacaagtgcagcgaccagggcgtgaccggctacgacatcagcatgagcaccctgaacgaggtgttcatgaagctggagggccagagcaccatcgagcaggacttcgagcaggtggagatgatcagagacagcgagagcctgaacgagatggagctggcccacagcagcttcagcgagatgcagaccgccgtgagcgacatgggcctgtggagaatgcaggtgttcgccatggccagactgagattcctgaagctgaagagacagaccaaggtgctgctgaccctgctgctggtgttcggcatcgccatcttccccctgatcgtggagaacatcatgtacgccatgctgaacgagaagatcgactgggagttcaagaacgagctgtacttcctgagccccggccagctgccccaggagcccagaaccagcctgctgatcatcaacaacaccgagagcaacatcgaggacttcatcaagagcctgaagcaccagaacatcctgctggaggtggacgacttcgagaacagaaacggcaccgacggcctgagctacaacggcgccatcatcgtgagcggcaagcagaaggactacagattcagcgtggtgtgcaacaccaagagactgcactgcttccccatcctgatgaacatcatcagcaacggcctgctgcagatgttcaaccacacccagcacatcagaatcgagagcagccccttccccctgagccacatcggcctgtggaccggcctgcccgacggcagcttcttcctgttcctggtgctgtgcagcatcagcccctacatcaccatgggcagcatcagcgactacaagaagaacgccaagagccagctgtggatcagcggcctgtacaccagcgcctactggtgcggccaggccctggtggacgtgagcttcttcatcctgatcctgctgctgatgtacctgatcttctacatcgagaacatgcagtacctgctgatcaccagccagatcgtgttcgccctggtgatcgtgacccccggctacgccgccagcctggtgttcttcatctacatgatcagcttcatcttcagaaagagaagaaagaacagcggcctgtggagcttctacttcttcttcgccagcaccatcatgttcagcatcaccctgatcaaccacttcgacctgagcatcctgatcaccaccatggtgctggtgcccagctacaccctgctgggcttcaagaccttcctggaggtgagagaccaggagcactacagagagttccccgaggccaacttcgagctgagcgccaccgacttcctggtgtgcttcatcccctacttccagaccctgctgttcgtgttcgtgctgagatgcatggagctgaagtgcggcaagaagagaatgagaaaggaccccgtgttcagaatcagcccccagagcagagacgccaagcccaaccccgaggagcccatcgacgaggacgaggacatccagaccgagagaatcagaaccgccaccgccctgaccaccagcatcctggacgagaagcccgtgatcatcgccagctgcctgcacaaggagtacgccggccagaagaagagctgcttcagcaagagaaagaagaagatcgccgccagaaacatcagcttctgcgtgcaggagggcgagatcctgggcctgctgggccccaacggcgccggcaagagcagcagcatcagaatgatcagcggcatcaccaagcccaccgccggcgaggtggagctgaagggctgcagcagcgtgctgggccacctgggctactgcccccaggagaacgtgctgtggcccatgctgaccctgagagagcacctggaggtgtacgccgccgtgaagggcctgagaaaggccgacgccagactggccatcgccagactggtgagcgccttcaagctgcacgagcagctgaacgtgcccgtgcagaagctgaccgccggcatcaccagaaagctgtgcttcgtgctgagcctgctgggcaacagccccgtgctgctgctggacgagcccagcaccggcatcgaccccaccggccagcagcagatgtggcaggccatccaggccgtggtgaagaacaccgagagaggcgtgctgctgaccacccacaacctggccgaggccgaggccctgtgcgacagagtggccatcatggtgagcggcagactgagatgcatcggcagcatccagcacctgaagaacaagctgggcaaggactacatcctggagctgaaggtgaaggagaccagccaggtgaccctggtgcacaccgagatcctgaagctgttcccccaggccgccggccaggagagatacagcagcctgctgacctacaagctgcccgtggccgacgtgtaccccctgagccagaccttccacaagctggaggccgtgaagcacaacttcaacctggaggagtacagcctgagccagtgcaccctggagaaggtgttcctggagctgagcaaggagcaggaggtgggcaacttcgacgaggagatcgacaccaccatgagatggaagctgctgccccacagcgacgagccctag

SEQ ID NO: 231181 - protein, 450 aa, Artificial Sequence
  derived and/or modified sequence
MRECISIHVGQAGVQIGNACWELYCLEHGIQPDGQMPSDKTIGGGDDSFNTFFSETGAGKHVPRAVFVDLEPTVVDEVRTGTYRQLFHPEQLITGKEDAANNYARGHYTIGKEIVDLVLDRIRKLADLCTGLQGFLIFHSFGGGTGSGFASLLMERLSVDYGKKSKLEFAIYPAPQVSTAVVEPYNSILTTHTTLEHSDCAFMVDNEAIYDICRRNLDIERPTYTNLNRLIGQIVSSITASLRFDGALNVDLTEFQTNLVPYPRIHFPLATYAPVISAEKAYHEQLSVAEITNACFEPANQMVKCDPRHGKYMACCMLYRGDVVPKDVNAAIATIKTKRTIQFVDWCPTGFKVGINYQPPTVVPGGDLAKVQRAVCMLSNTTAIAEAWARLDHKFDLMYAKRAFVHWYVGEGMEEGEFSEAREDLAALEKDYEEVGVDSVEAEAEEGEEY

SEQ ID NO: 231182 - protein, 418 aa, Artificial Sequence
  derived and/or modified sequence
MRECISIHVGQAGVQIGNACWELYCLEHGIQPDGQMPSDKTIGGGDDSFNTFFSETGAGKHVPRAVFVDLEPTVVDEVRTGTYRQLFHPEQLITGKEDAANNYARGHYTIGKEIVDLVLDRIRKLADLCTGLQGFLIFHSFGGGTGSGFASLLMERLSVDYGKKSKLEFAIYPAPQVSTAVVEPYNSILTTHTTLEHSDCAFMVDNEAIYDICRRNLDIERPTYTNLNRLIGQIVSSITASLRFDGALNVDLTEFQTNLVPYPRIHFPLATYAPVISAEKAYHEQLSVAEITNACFEPANQMVKCDPRHGKYMACCMLYRGDVVPKDVNAAIATIKTKRTIQFVDWCPTGFKVGINYQPPTVVPGGDLAKVQRAVCMLSNTTAIAEAWARLDLAALEKDYEEVGVDSVEAEAEEGEEY

SEQ ID NO: 231183 - DNA, 1257 bp, Artificial Sequence
  derived and/or modified sequence
atgagagagtgcatcagcatccacgtgggccaggccggcgtgcagatcggcaacgcctgctgggagctgtactgcctggagcacggcatccagcccgacggccagatgcccagcgacaagaccatcggcggcggcgacgacagcttcaacaccttcttcagcgagaccggcgccggcaagcacgtgcccagagccgtgttcgtggacctggagcccaccgtggtggacgaggtgagaaccggcacctacagacagctgttccaccccgagcagctgatcaccggcaaggaggacgccgccaacaactacgccagaggccactacaccatcggcaaggagatcgtggacctggtgctggacagaatcagaaagctggccgacctgtgcaccggcctgcagggcttcctgatcttccacagcttcggcggcggcaccggcagcggcttcgccagcctgctgatggagagactgagcgtggactacggcaagaagagcaagctggagttcgccatctaccccgccccccaggtgagcaccgccgtggtggagccctacaacagcatcctgaccacccacaccaccctggagcacagcgactgcgccttcatggtggacaacgaggccatctacgacatctgcagaagaaacctggacatcgagagacccacctacaccaacctgaacagactgatcggccagatcgtgagcagcatcaccgccagcctgagattcgacggcgccctgaacgtggacctgaccgagttccagaccaacctggtgccctaccccagaatccacttccccctggccacctacgcccccgtgatcagcgccgagaaggcctaccacgagcagctgagcgtggccgagatcaccaacgcctgcttcgagcccgccaaccagatggtgaagtgcgaccccagacacggcaagtacatggcctgctgcatgctgtacagaggcgacgtggtgcccaaggacgtgaacgccgccatcgccaccatcaagaccaagagaaccatccagttcgtggactggtgccccaccggcttcaaggtgggcatcaactaccagccccccaccgtggtgcccggcggcgacctggccaaggtgcagagagccgtgtgcatgctgagcaacaccaccgccatcgccgaggcctgggccagactggacctggccgccctggagaaggactacgaggaggtgggcgtggacagcgtggaggccgaggccgaggagggcgaggagtactag

SEQ ID NO: 231184 - DNA, 1364 bp, Artificial Sequence
  derived and/or modified sequence
aatcccgtgcggcgcgcacaggcaggaggttgcagttgggcgctcagcagctgtggcagccggttgaggtctggcagtagcgttgggctgaagcagcggagttcgccatgcgcgagtgtatctctatccacgtggggcaggcgggtgtccagatcggcaatgcctgctgggaactgtactgccttgaacatggaattcagcccgatggccaaatgccaagtgataaaaccattggtggcggggacgactccttcaacacgttcttcagtgagactggagctggcaagcacgtgcccagagcagtgtttgtggacctggagcccactgtggtcgatgaagtgcgcacagggacctacaggcagctcttccacccggagcagctgatcaccgggaaggaagatgcagccaataattacgccaggggccattacaccatcggcaaggagattgttgacctagtcctggaccggatccgcaaactggcggatctgtgcacaggactgcagggcttcctcatcttccacagctttgggggcggcactggctctgggttcgcatctctgctcatggagcggctctcagtggattacggcaagaagtccaagctagagtttgccatttacccagccccccaggtctccacagccgtggtggagccctacaactccatcctgaccacccacacgaccctggaacattctgactgtgccttcatggtcgacaatgaagccatctatgacatatgtcggcgcaacctggacattgaacgtcccacgtacaccaacctcaatcgcctgattgggcagatcgtgtcctccatcacagcctccctgcgatttgatggggccctgaatgtggacttgacggaattccagaccaacctagtgccgtacccccgcatccacttccccctggccacctatgccccagtcatctcagctgagaaggcctaccacgagcagctgtctgtggccgagatcaccaatgcctgcttcgagccagccaatcaaatggtcaagtgtgaccctcgccacggcaagtacatggcctgctgcatgttgtacaggggggacgtggtccccaaagacgtcaacgcggccatcgccaccatcaagaccaagcgcaccatccagtttgtggattggtgcccgactggatttaaggtgggcattaactaccagccccccacagtggtccccgggggagacctggccaaggtgcagcgggccgtgtgcatgctgagcaacaccacggccattgcggaggcctgggcccgcctggacctggcagctctagagaaggattatgaagaggtgggcgtggattccgtggaagctgaggctgaagaaggcgaagaatactga

SEQ ID NO: 231185 - DNA, 1353 bp, Artificial Sequence
  derived and/or modified sequence
atgcgggaatgtatcagcatccacgtcggacaagccggcgttcaaatcggcaacgcatgttgggagctgtactgcctcgagcatgggatccagcctgacggccagatgcccagcgacaagactattggtggaggcgatgactcatttaatacttttttttcagaaaccggcgccgggaagcacgtacctcgggctgttttcgtcgatctggagcccactgttgtcgacgaagttcgcaccggaacatataggcagcttttccatccagagcagctgataacaggcaaagaggatgcggccaacaattacgcccgcgggcactatacgatcggcaaggagatagtggatctggtcttggaccgcattcggaaactagccgacctgtgtacaggactgcagggctttctgattttccattcgttcggaggcgggacaggcagcggctttgcctccctcttaatggagcgcctgagtgtggattatggcaaaaagagcaagctggagtttgctatttatccggcccctcaggtgtccaccgctgtggtcgaaccatacaatagcatcctgaccacccacactacccttgagcatagcgactgtgcttttatggtggacaacgaggccatttacgatatttgccggcgcaatttagatatagagcgaccaacgtacactaaccttaacaggttaatcggccagattgttagctcaatcacggctagcctgcggttcgacggcgccctgaacgttgacctaaccgaattccaaacaaatctcgttccctaccctagaatacattttccactcgccacttatgctcctgtgattagtgcagaaaaagcataccacgagcagctcagcgtcgcagagattaccaatgcttgtttcgaaccagccaaccaaatggtaaaatgtgatccaagacatggcaaatacatggcttgttgcatgctttatcgtggggacgtcgttcccaaggatgtcaatgcagcaatcgccactattaaaacaaagcgaaccatccagttcgtggattggtgtccaacaggcttcaaggtggggattaattatcaaccccccaccgttgtgcctggaggagaccttgccaaggtgcagcgggcggtgtgtatgctatccaacacaacagcaatcgcggaggcgtgggcccggcttgaccataaatttgatctgatgtacgccaagcgggctttcgtgcactggtatgttggcgagggcatggaggaaggcgaattcagcgaggctcgggaggatctggcggccctggagaaggactatgaagaagtgggcgttgatagtgtggaggctgaagccgaagaaggagaggagtattag

SEQ ID NO: 231186 - DNA, 1257 bp, Artificial Sequence
  derived and/or modified sequence
atgagggaatgcatcagtatacacgtcggccaggctggagtacagattggcaatgcttgctgggagttgtactgcctggagcatggaatccagccagacggacagatgccgtcagacaagacaattggcggcggcgatgactcatttaacacctttttcagtgagacaggcgccggcaaacatgtccccagggccgtttttgtggatctcgagcctactgtggtggatgaggtcaggacaggtacctatcggcagctgtttcacccagagcagttgatcaccggcaaagaagatgctgcgaacaattatgcacgtggccactacactattgggaaggagattgtggacctagtcttagatcgcattcgaaaacttgcggatctttgcactggactgcagggattcttgattttccacagttttggcggcggcaccggcagcggatttgcttccctcctgatggagcgactgtccgtggattacggaaaaaaatctaagttggagttcgccatttaccccgccccccaggtctccaccgccgtggtcgaaccatataactctatccttacaactcacacaactctggagcacagtgactgcgcctttatggtcgataatgaagccatttatgacatatgccgtagaaatctagatatcgagcggcctacttacaccaacctgaatcgtctgattggccagattgtgtcctcgatcactgcctccctcagatttgacggagcccttaatgtcgacctgactgagtttcaaaccaacctggtaccctacccaaggatccattttcctttggcaacttacgcgcccgtcatttcagctgagaaagcctatcatgagcagctaagtgtggccgagattaccaatgcgtgttttgagccagcgaatcagatggtgaaatgcgaccctcggcacgggaaatacatggcgtgctgtatgctttacaggggcgacgtcgttcctaaggatgttaacgcggccatagccacaattaagacaaaacggacaattcaattcgtagattggtgccccactgggttcaaggtcgggattaattatcaaccgcccaccgtagtgcctggcggagacctggctaaggtgcaacgcgcggtgtgcatgctgtccaatactaccgcgatagcagaagcgtgggctaggttagacttagcagcgttagagaaagactatgaggaggtgggagtagattcagtggaggccgaggccgaggaaggtgaggaatactag

SEQ ID NO: 231187 - DNA, 1257 bp, Artificial Sequence
  derived and/or modified sequence
atgagggaatgtatatcaatccatgtggggcaggcgggcgtgcagataggtaacgcctgttgggaactctactgcctcgagcacggcatacagcccgacggtcagatgccttcagacaaaactatcggaggtggagatgacagttttaacacgttcttttcagaaactggcgccggcaagcatgttcctagggctgtgttcgttgacctggagccaaccgtggtcgatgaggtgcgaaccgggacctaccgacagttgttccatccagaacagctcattactgggaaggaagacgctgcaaataactatgcccgaggccattacacgataggtaaggagatcgtggatttggtcctcgatcgcatccgaaaactggcagacctctgcaccgggctccagggatttcttattttccattctttcggcgggggaaccggatcaggcttcgccagccttttgatggagaggctgtcggtggattatggtaaaaagtctaaactggaatttgcaatttatccggcgccacaggtgtctaccgccgtagtggagccatacaactccatcctgaccacacacacaaccctggaacacagtgattgtgcctttatggtggataatgaggccatttacgatatctgcaggagaaatcttgatatcgaacgtcctacttacacgaatctcaatcggttgattggtcaaattgtgtcttccatcacggcgtctctgcgcttcgatggcgccctgaatgtggacttgacagagttccagactaacttagtgccttacccacgaattcacttccctcttgccacttacgcccccgtcatcagcgctgagaaggcatatcatgagcagctgtctgtggctgaaatcacgaacgcttgcttcgagcccgctaaccagatggttaaatgtgacccccgacatgggaagtacatggcctgctgtatgttgtaccgaggtgatgtcgttcctaaggacgtcaatgcagcgattgctacaatcaagacaaaacgcactatacagtttgtggactggtgccccactggattcaaggttggaatcaactatcagccccccacggtcgtccctggcggtgatcttgccaaggttcaacgggctgtttgcatgctgagcaacaccaccgcgattgccgaggcttgggcacgcctggatctagctgctttggaaaaggattacgaagaagttggggtggattctgtcgaagctgaagcagaggagggcgaagaatattag

SEQ ID NO: 231188 - DNA, 1305 bp, Artificial Sequence
  derived and/or modified sequence
gttgaggtcaagtagtagcgttgggctgcggcagcggaggagctcaacatgcgtgagtgtatctctatccacgtggggcaggcaggagtccagatcggcaatgcctgctgggaactgtactgcctggaacatggaattcagcccgatggtcagatgccaagtgataaaaccattggtggtggggacgactccttcaacacgttcttcagtgagactggagctggcaagcacgtgcccagagcagtgtttgtggacctggagcccactgtggtcgatgaagtgcgcacaggaacctataggcagctcttccacccagagcagctgatcaccgggaaggaagatgcggccaataattacgccagaggccattacaccatcggcaaggagatcgtcgacctggtcctggaccggatccgcaaactggcggatctgtgcacgggactgcagggcttcctcatcttccacagttttgggggtggcactggctctgggttcgcatctctgctcatggagcggctctcagtggattacggcaagaagtccaagctagaatttgccatttacccagccccccaggtctccacggccgtggtggagccctacaactccatcctgaccacccacacgaccctggaacattctgactgtgccttcatggtcgacaatgaagccatctatgacatatgtcggcgcaacctggacatcgagcgtcccacgtacaccaacctcaatcgcctgattgggcagatcgtgtcctccatcacggcctccctgcgatttgacggggccctgaatgtggacttgacggaattccagaccaacctagtgccgtacccccgcatccacttccccctggccacctacgccccggtcatctcagccgagaaggcctaccacgagcagctgtccgtggctgagatcaccaatgcctgcttcgagccagccaatcagatggtcaagtgtgaccctcgccacggcaagtacatggcctgctgcatgttgtacaggggggatgtggtcccgaaagatgtcaacgcggccatcgccaccatcaagaccaagcgcaccatccagtttgtagattggtgcccaactggatttaaggtgggcattaactaccagccccccacggtggtccctgggggagacctggccaaggtgcagcgggctgtgtgcatgctgagcaacaccacggccatcgcggaggcctgggctcgcctggacctggcagctctggagaaggattatgaagaggtgggcgtggattccgtggaagccgaggctgaagaaggtgaagaatactga

SEQ ID NO: 231189 - DNA, 1353 bp, Artificial Sequence
  derived and/or modified sequence
atgcgcgagtgcatctcaattcacgtgggccaggccggcgtacagatcggcaatgcttgttgggagctttactgcctggagcacggcatacagcctgatggacagatgccatcagacaagacaatcggcgggggcgatgatagctttaataccttcttcagtgaaactggtgctggaaaacacgtgccgcgagccgtttttgtcgacctcgaaccaactgtcgtggacgaggtgcgcacagggacatatcggcaactatttcatcccgaacagctgatcacaggcaaggaagatgccgccaataattacgcccgaggtcactataccattggaaaggagatcgtggacctggtccttgaccgcatacggaaattggctgacctctgtacgggcctccaaggtttcctgatctttcatagctttggcgggggcaccggctcaggcttcgcctcactgcttatggaaagactgtcggtggactacggcaaaaagtctaagctggagtttgcaatctatcccgccccgcaggtatcaacagctgtggtggaaccgtacaattctatcctcacgactcacacaacactcgaacatagcgattgtgcctttatggtggacaatgaagccatatacgacatttgcagaaggaatctagatatcgaacgccccacttacaccaacctgaatagactaataggccagattgtgtcgtcaatcaccgcttctctgcggtttgacggggctttgaacgttgacctgacggagtttcaaactaatcttgtcccgtacccaaggattcacttcccattggcaacatatgcacccgtgatctctgcagaaaaggcgtaccatgagcagttgtctgtcgccgagatcacaaatgcttgtttcgagccagccaatcagatggtgaaatgcgaccctcgtcacggtaagtatatggcctgttgtatgttgtacaggggtgacgtggtgcctaaagatgtcaacgctgctattgcaacaataaagacgaagcggacaattcagttcgtagactggtgccccacaggattcaaagtgggcatcaactatcagccgcccactgtggtcccagggggcgacctcgccaaagtgcagagagccgtttgcatgctttctaacaccacagctatcgctgaagcttgggctaggctggaccataaatttgaccttatgtatgcaaaaagggccttcgtacattggtacgttggagagggcatggaagagggtgagttctccgaagccagagaagacctggctgctttggagaaggattacgaggaagtgggtgttgattccgtggaggccgaagcagaggaaggcgaggagtattag

SEQ ID NO: 231190 - DNA, 1353 bp, Artificial Sequence
  derived and/or modified sequence
atgagggagtgcatcagcatccacgtgggccaggccggcgtgcagattggaaatgcctgctgggagctgtactgcctggagcacggcatccagccagatggccagatgcccagcgacaagaccatcggcggcggagatgacagcttcaacaccttcttcagcgagaccggggccggcaagcacgtgcccagggctgtgtttgtggacctggagcccaccgtggtggatgaggtgaggacaggcacctaccggcagctgttccaccctgagcagctgatcaccgggaaggaggatgctgccaacaactatgcccggggccactacaccatcggcaaggagatcgtggacctggtgctggaccgcatcaggaagctggccgacctgtgcaccggcctgcagggcttcctgatcttccacagctttggaggcggcactggaagtggctttgccagcctgctgatggagcggctgtctgtggactatggcaagaagagcaagctggagtttgccatctacccagccccccaggtgtccacagctgtggtggagccctacaacagcatcctgaccacccacaccaccctggagcacagcgactgtgccttcatggtggacaatgaggccatctatgacatctgcagaagaaacctggacatcgagcggcccacctacaccaacctgaaccggctgattggccagatcgtgagcagcatcacagccagcctgcgctttgatggagccctgaatgtggacctgacagagttccagaccaacctggtgccctacccccgcatccacttccccctggccacctacgcccctgtgatctctgctgagaaggcctaccacgagcagctgtctgtggccgagatcaccaatgcctgctttgagcccgccaaccagatggtgaagtgtgaccccaggcatggcaagtacatggcctgctgcatgctgtacagaggagatgtggtgcccaaggatgtgaatgctgccatcgccaccatcaagaccaagaggaccatccagtttgtggactggtgccccaccggcttcaaggtgggcatcaactaccagcccccaacagtggtgcctggaggagacctggccaaggtgcagagagctgtgtgcatgctgagcaacaccacagccatcgccgaggcctgggcccggctggaccacaagtttgacctgatgtatgccaagagggcctttgtgcactggtacgtgggggagggcatggaggagggggagttcagcgaggcccgggaggacctggccgccctggagaaggactatgaggaggtgggcgtggacagcgtggaggccgaggccgaggagggggaggagtactag

SEQ ID NO: 231191 - DNA, 1257 bp, Artificial Sequence
  derived and/or modified sequence
atgagggagtgcatcagcatccacgtgggccaggccggcgtgcagattggaaatgcctgctgggagctgtactgcctggagcacggcatccagccagatggccagatgcccagcgacaagaccatcggcggcggagatgacagcttcaacaccttcttcagcgagaccggggccggcaagcacgtgcccagggctgtgtttgtggacctggagcccaccgtggtggatgaggtgaggacaggcacctaccggcagctgttccaccctgagcagctgatcaccgggaaggaggatgctgccaacaactatgcccggggccactacaccatcggcaaggagatcgtggacctggtgctggaccgcatcaggaagctggccgacctgtgcaccggcctgcagggcttcctgatcttccacagctttggaggcggcactggaagtggctttgccagcctgctgatggagcggctgtctgtggactatggcaagaagagcaagctggagtttgccatctacccagccccccaggtgtccacagctgtggtggagccctacaacagcatcctgaccacccacaccaccctggagcacagcgactgtgccttcatggtggacaatgaggccatctatgacatctgcagaagaaacctggacatcgagcggcccacctacaccaacctgaaccggctgattggccagatcgtgagcagcatcacagccagcctgcgctttgatggagccctgaatgtggacctgacagagttccagaccaacctggtgccctacccccgcatccacttccccctggccacctacgcccctgtgatctctgctgagaaggcctaccacgagcagctgtctgtggccgagatcaccaatgcctgctttgagcccgccaaccagatggtgaagtgtgaccccaggcatggcaagtacatggcctgctgcatgctgtacagaggagatgtggtgcccaaggatgtgaatgctgccatcgccaccatcaagaccaagaggaccatccagtttgtggactggtgccccaccggcttcaaggtgggcatcaactaccagcccccaacagtggtgcctggaggagacctggccaaggtgcagagagctgtgtgcatgctgagcaacaccacagccatcgccgaggcctgggcccggctggacctggccgccctggagaaggactatgaggaggtgggcgtggacagcgtggaggccgaggccgaggagggggaggagtactag

SEQ ID NO: 231192 - DNA, 1353 bp, Artificial Sequence
  derived and/or modified sequence
atgcgggagtgcatcagcatccacgtgggccaggccggcgtgcagataggcaacgcatgctgggagctttactgcctggaacacgggattcaaccagacggccagatgccttccgacaagacaatcggtggaggagacgactcctttaacacctttttttccgaaaccggcgctggcaagcatgtaccacgggccgtgtttgtggacctcgagcctaccgttgtcgatgaggtaaggacaggcacttacaggcagttgttccatcccgagcagctgattactggcaaggaggatgcagcaaataactacgcaagaggccactatacaatagggaaggaaatcgttgatctggtgctggacagaatcaggaaattggctgacctttgtactggcctccaaggattcctgatctttcattcctttggaggtggaactggttccggttttgcttcactccttatggaacgcctctcagtcgactatgggaaaaaaagcaagttggagtttgccatctaccccgcccctcaggtgtcaactgcagtcgtggagccatataattcaatactgacaacccataccaccctcgaacacagcgactgcgcttttatggtggataatgaggcaatctatgacatatgtcgcaggaatctggatatcgaaaggcccacttatactaatctgaaccgcctgatcggacagattgtcagcagcattactgcctcactgcgttttgatggcgcattgaatgtggacttaacagaattccagacgaacctggtgccatatcctcgcatccatttccccctcgctacctacgcccctgtcatctctgccgagaaagcataccacgagcagctgtccgtggccgagattacaaacgcatgtttcgagcctgcgaaccagatggtgaaatgtgatcctcgccacggtaagtatatggcctgctgcatgctataccgcggcgatgtggtgcccaaagatgtgaatgcggcaatcgctaccatcaaaaccaagcgtacaatacaatttgttgattggtgtcccactgggtttaaggtgggcatcaactatcagccaccaacggtggtacccggaggagaccttgccaaagtgcagagagcagtgtgtatgcttagtaacaccacagccatcgcagaggcttgggccaggctggatcacaagtttgatctgatgtatgctaagcgcgccttcgtgcactggtacgtgggagaaggcatggaggaaggagaattctcggaggccagagaggacctggccgccctggagaaagattacgaggaggtgggagtggactccgtggaagctgaggcagaagagggagaggaatactag

SEQ ID NO: 231193 - DNA, 1257 bp, Artificial Sequence
  derived and/or modified sequence
atgcgggagtgcatcagcatccacgtgggccaggccggcgtgcagatcggcaatgcctgttgggagctttattgtctcgagcacgggattcagcccgatggacaaatgccgtccgacaagactataggggggggggatgatagcttcaatacattcttttctgaaaccggtgccggcaaacacgtgccaagagccgtgttcgtagacctcgagccaacagttgttgatgaggtgcgaactggaacttatagacagctctttcatccagagcaactgattaccggcaaagaggacgccgctaacaactatgcgagaggccactatactattggcaaggaaattgtcgatttggtgcttgaccgcatccgcaagctggcagacctgtgcaccggattacagggatttctgatatttcattccttcggaggcggtactggcagcggtttcgcatccctcctgatggagagactgtctgtggattatgggaaaaagtccaaactcgagttcgccatttaccccgcccctcaggtctctaccgcagttgtggaaccttataactcaatcctaacaacacacacaacattggaacactcagattgcgcattcatggtggacaacgaagctatctatgatatttgtagacgtaacctcgacatcgaaagacctacatatacgaatctgaatcgcctcattggccaaatcgtttcaagtattaccgctagtctgagattcgacggagccctgaacgtcgatctgaccgaatttcagacgaatcttgtcccatatccacggatccactttcccctcgccacatatgcacccgtaataagcgcagagaaggcttatcacgaacagctgtctgtcgccgaaatcaccaatgcttgtttcgagccagccaaccagatggtgaaatgcgatccgaggcatggaaaatacatggcctgctgcatgctgtatcgcggtgacgtggtcccgaaggatgtcaacgctgccatcgcgacaattaaaacaaaaagaaccatccagttcgttgactggtgccctacggggtttaaggtgggaatcaattaccagccaccaaccgtagtacccggcggtgaccttgcaaaggtgcagagagccgtgtgtatgctgtctaatactaccgcgatcgcagaggcctgggctcgtctggacctggctgccctcgaaaaagactatgaagaagtaggtgtggattcagtggaagccgaggctgaggagggtgaagagtattag

SEQ ID NO: 231194 - DNA, 1257 bp, Artificial Sequence
  derived and/or modified sequence
atgcgggagtgcatcagcatccacgtgggccaggccggcgtgcagatcggtaatgcttgttgggagctgtactgcttggagcatggcattcagcctgatggacaaatgccctcggacaagaccattggtggtggagatgactcttttaatacatttttcagtgaaacaggtgcaggaaaacatgtcccgcgtgccgtcttcgtggatttggaaccaacggtggtggacgaagtaaggaccgggacctataggcagctgtttcacccggagcagcttattactgggaaagaagatgcggctaataactacgcccgtgggcattatacgattggtaaagaaatcgtggatttagtgctagaccgtatccgtaaattggccgatctttgcacagggttgcagggatttctgatcttccactccttcggaggcgggaccgggtcaggcttcgcctccctcctaatggaaagactctccgtagattatggaaaaaagagcaaactcgagttcgccatttatcctgcaccacaggtatctacagctgtggtggagccgtacaattcaatcctgaccacacatactacgctagaacattcggattgtgccttcatggtcgacaatgaggccatctacgatatatgcagaaggaacttagatattgagcggcccacgtacactaatctgaaccgcctcatagggcagattgtgagctctattaccgcgtcccttaggttcgatggggcactaaacgtggacctcactgagttccagacaaacttagtgccatatccaagaattcactttcctttggctacctacgccccagtcattagtgctgaaaaggcatatcacgaacagctttctgtagccgagattactaacgcgtgctttgagccagctaaccaaatggtgaaatgcgatccacggcacggaaaatacatggcctgttgcatgctgtataggggtgatgtggttccgaaagatgtgaacgcggctattgctactattaagacaaaacgcacaattcagttcgtggactggtgtccaaccgggttcaaggtcggcattaattaccagccacccaccgtggttcctggcggtgatctggctaaagtgcagagagccgtatgtatgctctcaaatacaaccgcaatagccgaagcatgggcaagactggatctggccgcgctggaaaaagattacgaagaggttggagtcgatagtgtggaggctgaggcggaggaaggtgaggagtactag

SEQ ID NO: 231195 - DNA, 1353 bp, Artificial Sequence
  derived and/or modified sequence
atgcgggagtgcatcagcatccacgtgggccaggccggcgtgcagatcggcaacgcatgttgggaactctattgcctggagcatggaatccaacctgatggacagatgccctctgataagaccatcggaggaggcgatgactcttttaacaccttcttctctgaaacaggggccggcaaacacgtcccaagagcagtgttcgtggacctggagcctactgtcgtggacgaagttcgcacaggaacatatcgccaattatttcatcctgagcagttaatcaccggtaaagaggatgcggcgaataactacgcacgcgggcactatactattggtaaggaaatcgtcgacctggtgctggaccgcatccgcaagctcgctgatctgtgcaccggccttcaggggttcctcattttccacagcttcggaggggggaccggatccggcttcgctagtctcctaatggagaggctgagtgtggattacggtaagaaatccaagctggaatttgcaatctacccagccccccaggttagcaccgccgtggtggagccttacaatagcatactgacaacccacactaccttggaacacagtgactgcgctttcatggtcgataatgaagcgatttatgacatttgcaggagaaatctcgacattgaaagacctacctacaccaaccttaataggctaattggtcagatcgtgagcagtatcacagcgagcctgagatttgatggagctttgaacgtggatcttaccgagttccagactaatctcgtcccatacccacgaatccacttcccccttgccacctatgccccagtgatcagtgctgaaaaagcgtaccacgaacaactctccgtagcggagataactaacgcctgttttgagccagctaatcagatggtgaagtgcgacccacgccatggaaagtatatggcatgttgcatgctctatcgtggagacgtggttccaaaagacgtaaacgcagcaatagccaccatcaagaccaaacgaaccattcagtttgtcgattggtgtccgacaggatttaaagtgggaatcaactaccagccaccaactgttgtgccgggcggcgatttggctaaggtacagcgggccgtgtgtatgcttagtaacaccacagcaattgccgaagcctgggccagactcgatcacaagttcgatctgatgtacgcaaagagagcgtttgtccattggtatgtcggcgaaggaatggaggagggcgaattctctgaggcccgggaggacctcgccgcgctggaaaaagattacgaggaggtcggcgttgactccgtggaggccgaggccgaagagggcgaagaatattag

SEQ ID NO: 231196 - DNA, 1551 bp, Artificial Sequence
  derived and/or modified sequence
aatcccagacagcgcacggcgggaggctgtcgttgggcgtgcgcagctgcagcggcggttgaggtcaagtagtagcgttgggctgcggcagcggaggagctcaacatgcgtgagtgtatctctatccacgtggggcaggcaggagtccagatcggcaatgcctgctgggaactgtactgcctggaacatggaattcagcccgatggtcagatgccaagtgataaaaccattggtggtggggacgactccttcaacacgttcttcagtgagactggagctggcaagcacgtgcccagagcagtgtttgtggacctggagcccactgtggtcgatgaagtgcgcacaggaacctataggcagctcttccacccagagcagctgatcaccgggaaggaagatgcggccaataattacgccagaggccattacaccatcggcaaggagatcgtcgacctggtcctggaccggatccgcaaactggcggatctgtgcacgggactgcagggcttcctcatcttccacagttttgggggtggcactggctctgggttcgcatctctgctcatggagcggctctcagtggattacggcaagaagtccaagctagaatttgccatttacccagccccccaggtctccacggccgtggtggagccctacaactccatcctgaccacccacacgaccctggaacattctgactgtgccttcatggtcgacaatgaagccatctatgacatatgtcggcgcaacctggacatcgagcgtcccacgtacaccaacctcaatcgcctgattgggcagatcgtgtcctccatcacggcctccctgcgatttgacggggccctgaatgtggacttgacggaattccagaccaacctagtgccgtacccccgcatccacttccccctggccacctacgccccggtcatctcagccgagaaggcctaccacgagcagctgtccgtggctgagatcaccaatgcctgcttcgagccagccaatcagatggtcaagtgtgaccctcgccacggcaagtacatggcctgctgcatgttgtacaggggggatgtggtcccgaaagatgtcaacgcggccatcgccaccatcaagaccaagcgcaccatccagtttgtagattggtgcccaactggatttaaggtgggcattaactaccagccccccacggtggtccctgggggagacctggccaaggtgcagcgggctgtgtgcatgctgagcaacaccacggccatcgcggaggcctgggctcgcctggaccataagttcgatctcatgtatgccaagcgggcctttgtgcactggtacgtgggagaaggcatggaggagggggagttctctgaggcccgcgaggacctggcagctctggagaaggattatgaagaggtgggcgtggattccgtggaagccgaggctgaagaaggtgaagaatactgaggggagggtgtggtgggttctccactccactgccacccccagcgtggctgctttcaagttctttgcaattaaaggttctgtataaaaccaaga

SEQ ID NO: 231197 - DNA, 1353 bp, Artificial Sequence
  derived and/or modified sequence
atgcgggagtgcatcagtattcacgtcggacaggcgggtgtgcagatcggaaacgcttgttgggagttgtactgtctggagcacgggatacaaccggatgggcaaatgccctccgataagacaatcggcggaggcgatgactcatttaatacctttttttcagagaccggagcaggcaagcacgttccacgagccgtgtttgtggacctggagcctacagtcgtcgatgaagtgcgcaccggcacctaccgccagctttttcaccccgagcagctgataaccggaaaggaagatgcagccaacaattatgcacggggacattataccatcggaaaggaaattgtcgatctggttttggataggatcagaaagcttgccgacctctgcacaggtctccaggggtttttgatcttccacagcttcggcggaggcacaggaagcggatttgcttcactgctgatggaacgtctgagcgttgactacggtaaaaagagcaaactagaattcgctatttaccctgccccacaggtctctacggccgtagtggagccatacaattccattttgactacccatacaacactggaacactctgactgtgcctttatggtagacaatgaagccatttacgatatttgccgaagaaacctggatatcgaaaggccaacctacaccaacctgaaccgccttatcggtcagattgtctcctccattactgcgtccttgcgcttcgacggtgctctgaacgtagatctgacggagtttcagaccaatctcgtgccatatcctaggattcacttcccactggccacgtacgcaccggtgatatctgcggaaaaggcctaccacgaacagctgagcgtcgccgagattaccaacgcttgtttcgagccggcaaatcagatggtgaagtgcgacccccgacacggcaagtatatggcgtgttgtatgctgtatcggggtgatgtcgtgcccaaagatgtgaatgccgcaatcgccacaattaagaccaagagaactatccaattcgtggactggtgtcctactggctttaaagtgggcatcaactaccaacccccaaccgtggtgcctggcggtgacctggctaaagtgcaaagagccgtctgcatgctgagcaatacaaccgccatcgccgaagcttgggcgagactggatcacaaatttgatctgatgtacgcaaagagggcctttgtccactggtacgtaggcgagggaatggaggagggcgagttctcagaagcacgtgaggatttagctgctcttgagaaagattatgaggaagttggcgtggacagtgttgaagccgaggcagaggagggcgaagagtactag

SEQ ID NO: 231198 - DNA, 1257 bp, Artificial Sequence
  derived and/or modified sequence
atgcgcgaatgcatttcgattcatgtggggcaggccggtgttcaaatcggcaatgcctgctgggaactctactgcctcgagcacggtattcagcccgacggacagatgcccagtgataaaaccattggcggaggcgatgattccttcaataccttcttctcagagaccggcgctggaaaacatgtcccccgagctgtgttcgtcgacctggaacccactgtggtcgacgaagtgcggaccggcacttatcggcaattgtttcatcccgagcagttgattaccgggaaagaggacgccgcaaacaactacgcgaggggacactacaccattggcaaagaaatagtcgatttggttcttgacagaattcgaaaactggctgacctctgcacagggttgcaaggcttcctgattttccacagcttcggtggcggaacaggctcaggatttgcctctctcctgatggagcgtctgagcgtggattatgggaagaagagcaagctcgaatttgcaatttacccagcaccgcaggtatctaccgctgttgtggaaccctataacagcattttaacgactcacaccacactggaacactctgattgtgcgttcatggtggataacgaggccatctatgacatctgcaggcggaacctcgacattgagaggcccacctataccaatctgaatcggctgatcggacaaattgtatcctccattacagctagccttagatttgacggagcgctcaacgtggatttaaccgaattccagaccaatctggtaccttaccctaggatccactttcccctggctacatatgcccctgttatctccgcggagaaggcatatcacgagcagctgtccgtggccgaaattacaaacgcgtgtttcgagcctgctaatcagatggtcaagtgcgatccacggcatggtaagtacatggcttgctgtatgctgtaccgcggtgatgttgtaccaaaggatgtcaacgccgctatcgctacaatcaagaccaaaaggacaatccagttcgtggactggtgccccaccggcttcaaagtgggcataaactatcaaccccctactgtggtgcccggtggcgacctggccaaagtgcaaagggccgtttgtatgttgtcaaatactactgccattgctgaggcatgggcgagacttgacctggcagcactggaaaaggactatgaagaggtaggcgtggattcggtagaagcggaagcagaggaaggtgaagaatattag

SEQ ID NO: 231199 - DNA, 1257 bp, Artificial Sequence
  derived and/or modified sequence
atgcgagagtgcatcagcatccacgttggacaggcgggagtacagatcggaaacgcctgctgggagctctattgcttggagcacgggatccaaccggatgggcaaatgccctctgacaaaaccattggcggtggggatgactcgttcaacacgttcttttccgagactggtgccggtaagcacgtcccacgcgcagtgtttgtcgatttagaaccaactgtggtggacgaagttcggaccgggacctatcgacagctcttccacccagaacaactgatcacaggcaaggaagatgccgctaataattatgcaagggggcattacactataggcaaagagatcgtggatctggtgttggacagaatccgcaagctcgccgacctatgtaccggcctccaaggcttcttgattttccacagcttcggcggaggaacagggtccggttttgcaagtctgcttatggaaaggctctcggtcgactacggaaagaagtctaagcttgaatttgctatctaccctgcaccccaggtgtcgaccgccgtggtagagccctataactccatactgacgacacacaccacgctggagcattcagactgcgcatttatggtggataatgaggctatttatgacatttgtagaagaaacctcgatattgagcgacctacctatacaaacctgaaccgattaatcggccagatcgtgagctccattacagcttcccttagatttgacggggctctaaatgtggacttaaccgaattccagaccaacttagtcccttaccctaggatccattttcccttggcaacctacgcaccagtcatctcggccgagaaagcctatcacgagcagctatctgtggccgagattacaaacgcgtgcttcgagcctgcaaatcagatggtcaaatgtgatcctcgccacggcaagtatatggcatgctgtatgctgtataggggagatgtggtccctaaggatgtgaacgctgccatcgcaacaattaaaactaagcggaccatccagtttgtggactggtgcccgacgggcttcaaagtgggaatcaattatcagccccctacagtcgtgcctggtggcgacctggcgaaggttcagagagctgtctgcatgctgagtaatacgacagccatcgccgaggcctgggccaggttagacctggcagcgctcgaaaaagattatgaggaagtgggtgtggattcggttgaggccgaggctgaagaaggagaggagtactag

SEQ ID NO: 231200 - DNA, 1353 bp, Artificial Sequence
  derived and/or modified sequence
atgcgagagtgtatctcaatacatgtggggcaggcaggagtgcaaattggaaatgcgtgctgggaattatattgcctggagcatggcattcagccagatgggcagatgccctccgacaagaccatcggcggtggcgacgattcgttcaacaccttcttttctgaaacgggcgctggcaagcatgtaccccgtgcagtgttcgtggatctggaaccgacagtggtcgatgaggtaaggacaggcacctatcggcagctgttccacccagaacaactgatcactgggaaggaggacgcggctaacaactatgcaaggggtcactacacaattggcaaggagatcgtggatctggtgctggataggatcaggaagctggcagacttgtgtactggcctgcagggattcctgatattccattcatttgggggaggcacaggctctggcttcgcatccttattgatggaacgccttagcgtcgactatggtaaaaaatccaaactggaattcgctatctaccccgctccccaggtttcaactgccgtagtggagccgtacaacagcatccttaccacacacacaaccctcgaacattcagactgcgccttcatggtggacaatgaggctatctatgacatctgccgtcgaaacttggacatagaaagacccacctatactaatttaaatcgattgatcggccagattgtctcttccatcaccgcttcgctgaggtttgacggcgctctcaacgtggatctcacggagtttcagactaacctcgtgccgtacccaaggatccattttcctctggctacctatgctccagtcatttccgctgaaaaggcttaccatgaacagctctccgtggcggaaatcacaaacgcatgttttgagccagccaatcaaatggtcaaatgtgatcctcggcatggtaaatatatggcatgctgtatgctgtataggggtgatgtagttcctaaagatgttaacgcagccattgccacaatcaagacaaagcgaacaattcagtttgtagactggtgccccactggtttcaaagtgggaattaattatcaaccaccgacagttgtgcccggaggggatctagccaaagttcagcgagcagtatgtatgttgagcaacactactgctatagctgaggcttgggccaggctggaccacaagttcgatcttatgtacgccaaaagagcctttgtgcactggtacgtgggggaggggatggaagagggcgagttctcagaggcacgtgaggatctcgccgcacttgagaaggattacgaagaggtgggcgtcgacagcgttgaagcggaggccgaggagggcgaggagtattag

SEQ ID NO: 231201 - DNA, 1546 bp, Artificial Sequence
  derived and/or modified sequence
aatcccgtgcggcgcgcacaggcaggaggttgcagttgggcgctcagcagctgtggcagccggttgaggtctggcagtagcgttgggctgaagcagcggagttcgccatgcgcgagtgtatctctatccacgtggggcaggcgggtgtccagatcggcaatgcctgctgggaactgtactgccttgaacatggaattcagcccgatggccaaatgccaagtgataaaaccattggtggcggggacgactccttcaacacgttcttcagtgagactggagctggcaagcacgtgcccagagcagtgtttgtggacctggagcccactgtggtcgatgaagtgcgcacagggacctacaggcagctcttccacccggagcagctgatcaccgggaaggaagatgcagccaataattacgccaggggccattacaccatcggcaaggagattgttgacctagtcctggaccggatccgcaaactggcggatctgtgcacaggactgcagggcttcctcatcttccacagctttgggggcggcactggctctgggttcgcatctctgctcatggagcggctctcagtggattacggcaagaagtccaagctagagtttgccatttacccagccccccaggtctccacagccgtggtggagccctacaactccatcctgaccacccacacgaccctggaacattctgactgtgccttcatggtcgacaatgaagccatctatgacatatgtcggcgcaacctggacattgaacgtcccacgtacaccaacctcaatcgcctgattgggcagatcgtgtcctccatcacagcctccctgcgatttgatggggccctgaatgtggacttgacggaattccagaccaacctagtgccgtacccccgcatccacttccccctggccacctatgccccagtcatctcagctgagaaggcctaccacgagcagctgtctgtggccgagatcaccaatgcctgcttcgagccagccaatcaaatggtcaagtgtgaccctcgccacggcaagtacatggcctgctgcatgttgtacaggggggacgtggtccccaaagacgtcaacgcggccatcgccaccatcaagaccaagcgcaccatccagtttgtggattggtgcccgactggatttaaggtgggcattaactaccagccccccacagtggtccccgggggagacctggccaaggtgcagcgggccgtgtgcatgctgagcaacaccacggccattgcggaggcctgggcccgcctggaccataagttcgatctcatgtatgccaagcgggcctttgtgcactggtacgtgggcgaaggcatggaagagggagagttctctgaggcccgcgaggacctggcagctctagagaaggattatgaagaggtgggcgtggattccgtggaagctgaggctgaagaaggcgaagaatactgaggggagggtgtggtgggttctcccctgccacccccgggatggctgcttccaagttgtttgcaattaaaggttctgtataaaaccaa

SEQ ID NO: 231202 - DNA, 1353 bp, Artificial Sequence
  derived and/or modified sequence
atgagagagtgcatcagcatccacgtgggccaggccggcgtgcagatcggcaacgcctgctgggagctgtactgcctggagcacggcatccagcccgacggccagatgcccagcgacaagaccatcggcggcggcgacgacagcttcaacaccttcttcagcgagaccggcgccggcaagcacgtgcccagagccgtgttcgtggacctggagcccaccgtggtggacgaggtgagaaccggcacctacagacagctgttccaccccgagcagctgatcaccggcaaggaggacgccgccaacaactacgccagaggccactacaccatcggcaaggagatcgtggacctggtgctggacagaatcagaaagctggccgacctgtgcaccggcctgcagggcttcctgatcttccacagcttcggcggcggcaccggcagcggcttcgccagcctgctgatggagagactgagcgtggactacggcaagaagagcaagctggagttcgccatctaccccgccccccaggtgagcaccgccgtggtggagccctacaacagcatcctgaccacccacaccaccctggagcacagcgactgcgccttcatggtggacaacgaggccatctacgacatctgcagaagaaacctggacatcgagagacccacctacaccaacctgaacagactgatcggccagatcgtgagcagcatcaccgccagcctgagattcgacggcgccctgaacgtggacctgaccgagttccagaccaacctggtgccctaccccagaatccacttccccctggccacctacgcccccgtgatcagcgccgagaaggcctaccacgagcagctgagcgtggccgagatcaccaacgcctgcttcgagcccgccaaccagatggtgaagtgcgaccccagacacggcaagtacatggcctgctgcatgctgtacagaggcgacgtggtgcccaaggacgtgaacgccgccatcgccaccatcaagaccaagagaaccatccagttcgtggactggtgccccaccggcttcaaggtgggcatcaactaccagccccccaccgtggtgcccggcggcgacctggccaaggtgcagagagccgtgtgcatgctgagcaacaccaccgccatcgccgaggcctgggccagactggaccacaagttcgacctgatgtacgccaagagagccttcgtgcactggtacgtgggcgagggcatggaggagggcgagttcagcgaggccagagaggacctggccgccctggagaaggactacgaggaggtgggcgtggacagcgtggaggccgaggccgaggagggcgaggagtactag

SEQ ID NO: 231203 - protein, 215 aa, Artificial Sequence
  derived and/or modified sequence
MGLEKPQSKLEGGMHPQLIPSVIAVVFILLLSVCFIASCLVTHHNFSRCKRGTGVHKLEHHAKLKCIKEKSELKSAEGSTWNCCPIDWRAFQSNCYFPLTDNKTWAESERNCSGMGAHLMTISTEAEQNFIIQFLDRRLSYFLGLRDENAKGQWRWVDQTPFNPRRVFWHKNEPDNSQGENCVVLVYNQDKWAWNDVPCNFEASRICKIPGTTLN

SEQ ID NO: 231204 - protein, 144 aa, Artificial Sequence
  derived and/or modified sequence
MGLEKPQSKLEGGMHPQLIPSVIAVVFILLLSVCFIASCLVTHHNFSRCKRGTGVHKLEHHAKLKCIKEKSELKSAEGSTWNCCPIDWRAFQSNCYFPLTDNKTWAESERNCSGMGAHLMTISTEAEQNFIIQFLDRRLSYFLG

SEQ ID NO: 231205 - DNA, 648 bp, Artificial Sequence
  derived and/or modified sequence
atgggtcttgaaaagcctcagtccaagctggaaggagggatgcatcctcagctgattcccagtgtaatcgcggtggtttttatcttgcttctttctgtctgttttattgcgtcatgtctcgtgacacaccacaatttttcgagatgcaaacgaggcactggggtccacaaattagaacatcatgctaagctgaaatgcatcaaggaaaaatccgagctcaagtctgccgaggggtctacatggaactgttgtccaattgattggagagcctttcagtctaactgctatttccccctgaccgataacaagacgtgggcagaaagtgaacgcaactgctcagggatgggagctcacttaatgacaatttccaccgaagcggagcagaactttatcatccagtttttggataggagattgagctattttctcgggctgagggacgaaaacgcgaagggacagtggaggtgggtcgatcagactccattcaacccacggcgagtcttctggcacaagaacgagccggataattcccagggagagaactgcgtggtgctggtttacaatcaagacaaatgggcctggaacgacgttccttgtaatttcgaagcttcccgtatctgcaagattcccggcaccacactgaactag

SEQ ID NO: 231206 - DNA, 435 bp, Artificial Sequence
  derived and/or modified sequence
atgggattagaaaaacctcaatctaagctggaggggggaatgcatccccagctgatcccttctgtgatcgccgtggtcttcatcttgctcctttccgtctgctttatcgcctcttgcctcgtgacacatcacaactttagccgctgtaaaaggggaaccggtgtgcacaagctggagcaccacgccaagttaaagtgcatcaaggaaaaatcagaactcaagagcgccgaggggagcacttggaactgctgtcccatagactggagggcattccaaagcaattgttactttccacttacagacaataagacctgggcagagagcgaacggaactgctcaggtatgggagctcacttgatgaccatttctactgaggccgagcagaacttcatcattcaatttctagatcggagactctcctattttctgggttag

SEQ ID NO: 231207 - DNA, 648 bp, Artificial Sequence
  derived and/or modified sequence
atgggcctggagaagccccagagcaagctggagggcggcatgcacccccagctgatccccagcgtgattgctgtggtgttcatcctgctgctgtctgtgtgcttcatcgccagctgcctggtgacccaccacaacttcagccgctgcaagaggggcactggagtgcacaagctggagcaccacgccaagctgaagtgcatcaaggagaagtctgagctgaagtctgctgagggcagcacctggaactgctgccccatcgactggagggccttccagagcaactgctacttccccctgacagacaacaagacctgggccgagagcgagaggaactgcagcggcatgggcgcccacctgatgaccatcagcacagaggccgagcagaacttcatcatccagttcctggaccggcggctgagctacttcctgggcctgagagatgaaaatgccaagggccagtggcgctgggtggaccagacccccttcaaccccaggagggtcttctggcacaagaatgaaccagacaacagccagggcgagaactgtgtggtgctggtgtacaaccaggacaagtgggcctggaatgatgtgccctgcaactttgaggccagccgcatctgcaagatccctggcaccaccctgaactag

SEQ ID NO: 231208 - DNA, 435 bp, Artificial Sequence
  derived and/or modified sequence
atgggcctggagaagccccagagcaagctggagggcggcatgcacccccagctgatccccagcgtgattgctgtggtgttcatcctgctgctgtctgtgtgcttcatcgccagctgcctggtgacccaccacaacttcagccgctgcaagaggggcactggagtgcacaagctggagcaccacgccaagctgaagtgcatcaaggagaagtctgagctgaagtctgctgagggcagcacctggaactgctgccccatcgactggagggccttccagagcaactgctacttccccctgacagacaacaagacctgggccgagagcgagaggaactgcagcggcatgggcgcccacctgatgaccatcagcacagaggccgagcagaacttcatcatccagttcctggaccggcggctgagctacttcctgggctag

SEQ ID NO: 231209 - DNA, 648 bp, Artificial Sequence
  derived and/or modified sequence
atgggcctggagaagccccagagcaagctggagggcggcatgcacccacagctgatcccatctgttatagcggtggtctttatcctgctccttagtgtttgttttattgcttcctgtctcgtgactcaccacaacttttccagatgcaagcgtggcacaggcgtccacaaactggaacatcatgctaaactgaagtgcatcaaagaaaaaagcgagctgaagtctgctgaagggagcacttggaactgttgtccaattgattggcgggcattccaaagcaattgttactttcctctgaccgacaataagacctgggccgaatccgagaggaattgcagcggaatgggagcgcatctgatgacaatcagcaccgaggcagaacagaacttcataatccagttcctagatagacgtttaagttactttcttgggctgagagatgaaaacgctaagggacagtggagatgggtcgatcaaacgcctttcaatcctcgcagagtattttggcacaaaaatgagccggacaacagccaaggggagaactgcgtcgtgctcgtgtacaaccaggacaaatgggcgtggaacgatgtcccatgtaacttcgaagcctcccgaatctgtaaaatccctgggaccaccctcaattag

SEQ ID NO: 231210 - DNA, 435 bp, Artificial Sequence
  derived and/or modified sequence
atgggcctggagaagccccagagcaagctggagggcggcatgcaccctcagctgattccttctgtcatcgccgtggtctttattttactgttgtctgtatgctttatagcgtcctgtctggtgacacaccataacttcagtcgctgcaagcggggcacaggagtgcacaagctggaacaccatgctaagctgaagtgcataaaagagaaaagcgagctgaaaagcgcagaaggaagtacatggaactgctgtcctatagactggagggcttttcagtctaactgctattttccgctcacagataataaaacctgggccgagagcgagcgcaattgttcaggaatgggcgcccacttgatgactatcagtacggaagccgagcagaacttcatcatccaatttcttgaccgacgtctgagctacttcctcgggtag

SEQ ID NO: 231211 - DNA, 648 bp, Artificial Sequence
  derived and/or modified sequence
atgggtctcgaaaagcctcagtctaagttagagggaggtatgcatccacagctgatccccagtgtgattgcggtggtgtttatcctgctcctgtccgtctgcttcattgctagctgtctggttacacaccataatttctcgcgttgtaagagagggacaggagtccacaagctcgagcaccacgctaagttaaaatgcatcaaggaaaaaagtgaactgaaaagtgcagaagggtctacatggaactgctgccccatcgactggcgggcattccagtccaactgctatttccccctgacagacaacaaaacctgggccgaatcggagcgtaactgttccggcatgggggctcacttaatgacaatctccaccgaagccgaacagaattttatcatccaattcttagacaggaggttaagctatttcttaggcttacgagatgagaatgctaagggccagtggcgttgggtcgatcagacaccattcaatccgcgtcgcgtgttctggcacaagaatgagccagacaatagccagggcgagaattgcgttgttctggtatacaaccaggataaatgggcgtggaatgatgtgccgtgcaacttcgaggcatccaggatctgtaaaattccagggactactttgaactag

SEQ ID NO: 231212 - DNA, 435 bp, Artificial Sequence
  derived and/or modified sequence
atggggctggagaaaccacaatcaaaattagagggcggtatgcacccccaactgattccaagcgtcatcgctgtggtattcatcctgctcttatcagtgtgcttcatcgcttcctgtttggtcacgcaccacaatttctccagatgtaaacgcggaacaggggtacataaattggagcaccacgccaagttgaaatgtatcaaagagaagagtgagctcaaaagtgcagaaggctcgacgtggaactgctgccccattgattggcgcgcattccagtccaattgttacttccctttgacagataacaagacatgggctgagtccgagagaaattgcagcggcatgggggcacatctgatgacaatctccaccgaggccgagcagaatttcattatacagtttctcgatcggagactgagctactttctgggctag

SEQ ID NO: 231213 - DNA, 1936 bp, Artificial Sequence
  derived and/or modified sequence
ctttgaaaaagacttcttttgagctaactttcttatactggtacctttctaatctcactacaatatgtaacattggtgttcgatctcaagtatttctgaatatattcccctatccacagaaatatactctgggggaaaaaaaatagaacaaattcttgccgtcctgaccattgaacaagagactaattagacaatggggctagaaaaacctcaaagtaaactggaaggaggcatgcatccccagctgataccttcggttattgctgtagttttcatcttacttctcagtgtctgttttattgcaagttgtttggtgactcatcacaacttttcacgctgtaagagaggcacaggagtgcacaagttagagcaccatgcaaagctcaaatgcatcaaagagaaatcagaactgaaaagtgctgaagggagcacctggaactgttgtcctattgactggagagccttccagtccaactgctattttcctcttactgacaacaagacgtgggctgagagtgaaaggaactgttcagggatgggggcccatctgatgaccatcagcacggaagctgagcagaactttattattcagtttctggatagacggctttcctatttccttggacttagagatgagaatgccaaaggtcagtggcgttgggtggaccagacgccatttaacccacgcagagtattctggcataagaatgaacccgacaactctcagggagaaaactgtgttgttcttgtttataaccaagataaatgggcctggaatgatgttccttgtaactttgaagcaagtaggatttgtaaaatacctggaacaacattgaactagaaactcagaaagtggtccttgtgatggaaagagaaaagaaaaaccaattagaataaggcagaatgtacgtgcgtcattggaacacagaaaacatgctggttcatacagcgtttttagtcataatggtcttttttattttgtttgattcattcgagacaacatgtgtgtatgtgtgtgtgtgtgtgtgtagataatgtggtttttgtatggtgtttgatggaaggaataatctttctttgctttcttagtagtatttcaaggtgtttacttttcaattggtgtgcactgaatgcatgtatggaagaatagcgtgaataatgcaatctctttgtcatttttccccttctcagactcttagctcttaaaattcaaagatgggatattctaactggtagtggtgcatcatttttaacccaaatattgcaagcactttaaagatttgaaaccacatttttattgtttgatgtttcattttcagactttttaatgtcagtcattacaattacattgcatgaggaaaatttttccagaacaacagtgtggaatagttctgaattatgctgttctacagatagaaaaaaagtccaaatgcctttaaaaatttacttcttactccacccaacacgtttttgcaaagcaagaagtctttgtaagacaccttaaacaaagtccttcaattctacagcagaggaaataaaatcccccagaagccaaagggctcaccttcacattgttagttcatgacagacccaggtgtgcttcattagagataacatacattccctttggtatcacaggaagttactggggattactcgacctcattacttagctaacgactggataaaatttcttaattgtttgaagtaacattgtattcgtgtttgcattattaatttgaatagaaaataatcacattttcaacccatttatacaaattgttaatgtttctttagagctgtataactatagtttgaactagcaaggaagttattgttttgacaaccagaaattatgcttttctggtgcatgaaacattaattgcaaagggcagtcacatccaactttaataaaatatggtggtctttcttaaaa

SEQ ID NO: 231214 - DNA, 583 bp, Artificial Sequence
  derived and/or modified sequence
gcctggcaaggtttagcggaggcctgcagtctgtctgctcctcagcaccatgaattcgactccatgcagctctccataaatatactctgggggaaaaaaaatagaacaaattcttgccgtcctgaccattgaacaagagactaattagacaatggggctagaaaaacctcaaagtaaactggaaggaggcatgcatccccagctgataccttcggttattgctgtagttttcatcttacttctcagtgtctgttttattgcaagttgtttggtgactcatcacaacttttcacgctgtaagagaggcacaggagtgcacaagttagagcaccatgcaaagctcaaatgcatcaaagagaaatcagaactgaaaagtgctgaagggagcacctggaactgttgtcctattgactggagagccttccagtccaactgctattttcctcttactgacaacaagacgtgggctgagagtgaaaggaactgttcagggatgggggcccatctgatgaccatcagcacggaagctgagcagaactttattattcagtttctggatagacggctttcctatttccttgga

SEQ ID NO: 231215 - DNA, 648 bp, Artificial Sequence
  derived and/or modified sequence
atgggcctggagaagccccagagcaagctggagggcggcatgcacccccagctgatccccagcgtgatcgccgtggtgttcatcctgctgctgagcgtgtgcttcatcgccagctgcctggtgacccaccacaacttcagcagatgcaagagaggcaccggcgtgcacaagctggagcaccacgccaagctgaagtgcatcaaggagaagagcgagctgaagagcgccgagggcagcacctggaactgctgccccatcgactggagagccttccagagcaactgctacttccccctgaccgacaacaagacctgggccgagagcgagagaaactgcagcggcatgggcgcccacctgatgaccatcagcaccgaggccgagcagaacttcatcatccagttcctggacagaagactgagctacttcctgggcctgagagacgagaacgccaagggccagtggagatgggtggaccagacccccttcaaccccagaagagtgttctggcacaagaacgagcccgacaacagccagggcgagaactgcgtggtgctggtgtacaaccaggacaagtgggcctggaacgacgtgccctgcaacttcgaggccagcagaatctgcaagatccccggcaccaccctgaactag

SEQ ID NO: 231216 - DNA, 435 bp, Artificial Sequence
  derived and/or modified sequence
atgggcctggagaagccccagagcaagctggagggcggcatgcacccccagctgatccccagcgtgatcgccgtggtgttcatcctgctgctgagcgtgtgcttcatcgccagctgcctggtgacccaccacaacttcagcagatgcaagagaggcaccggcgtgcacaagctggagcaccacgccaagctgaagtgcatcaaggagaagagcgagctgaagagcgccgagggcagcacctggaactgctgccccatcgactggagagccttccagagcaactgctacttccccctgaccgacaacaagacctgggccgagagcgagagaaactgcagcggcatgggcgcccacctgatgaccatcagcaccgaggccgagcagaacttcatcatccagttcctggacagaagactgagctacttcctgggctag

SEQ ID NO: 231217 - DNA, 312 bp, Artificial Sequence
  derived and/or modified sequence
atgagcgactgctacaccgagctggagaaggccgtgatcgtgctggtggagaacttctacaagtacgtgagcaagtacagcctggtgaagaacaagatcagcaagagcagcttcagagagatgctgcagaaggagctgaaccacatgctgagcgacaccggcaacagaaaggccgccgacaagctgatccagaacctggacgccaaccacgacggcagaatcagcttcgacgagtactggaccctgatcggcggcatcaccggccccatcgccaagctgatccacgagcaggagcagcagagcagcagctag

SEQ ID NO: 231218 - DNA, 312 bp, Artificial Sequence
  derived and/or modified sequence
atgagcgattgctacacagagctggagaaagcggttatcgtcttggttgagaatttctataaatacgtctctaaatacagcttggtgaagaacaaaatctccaagagttctttcagggagatgctgcagaaagagcttaatcacatgctgagtgacactggtaaccgcaaagcagctgacaagttaatccagaacctggatgctaatcatgacggacggatttcctttgacgagtattggaccctgattggtggaataactggcccaatagcaaaattaatccacgagcaagaacagcagagcagctcctag

SEQ ID NO: 231219 - DNA, 312 bp, Artificial Sequence
  derived and/or modified sequence
atgagtgattgctatacggaactcgaaaaggcagtaattgttctggtggaaaacttctataaatacgtgtcgaagtactccttggttaagaataaaatttctaagagctctttccgggagatgctgcagaaggaacttaaccatatgctctcggataccgggaataggaaggccgcagacaaactaatccagaacttagatgcaaaccacgatggtaggatctcctttgacgaatactggaccctcatcgggggcatcacaggacccatcgctaagctcattcatgagcaggagcagcagtctagcagctag

SEQ ID NO: 231220 - DNA, 312 bp, Artificial Sequence
  derived and/or modified sequence
atgagcgactgttataccgagctggagaaggctgtgattgtactagtggaaaacttctacaagtatgtgtccaagtattcccttgtgaaaaacaaaattagcaaaagttcttttcgcgagatgctgcagaaggagctgaaccatatgctgtctgacaccggcaaccggaaggccgccgacaaacttatccagaacctcgacgccaatcacgatgggaggatttcatttgatgagtactggacactcatcgggggtatcacgggacctattgccaagctgattcacgagcaggagcagcagtcctccagttag

SEQ ID NO: 231221 - DNA, 312 bp, Artificial Sequence
  derived and/or modified sequence
atgtctgattgttataccgagctagagaaggcggtgattgtgctagtggagaatttctacaaatatgtatcgaaatattccttggttaagaataagatctctaaaagttcattccgggagatgctgcaaaaagagttgaaccacatgctgagcgacaccggcaaccgtaaagctgcagacaaactgatacaaaacctggatgccaatcacgacggaaggataagtttcgacgaatattggacattgataggtggcatcacagggccaattgcaaaactgattcacgaacaggaacagcaaagctccagttag

SEQ ID NO: 231222 - DNA, 312 bp, Artificial Sequence
  derived and/or modified sequence
atgtctgactgctacacagagctggagaaggctgtgattgtgctggtggagaacttctacaagtatgtgtccaagtacagcctggtgaagaacaagatcagcaagagcagcttccgggagatgctgcagaaggagctgaaccacatgctgagtgacaccggcaacaggaaggctgctgacaagctgatccagaacctggatgccaaccatgatggccgcatcagctttgatgagtactggaccctgattggaggcatcaccggccccatcgccaagctgattcatgagcaggagcagcagagcagcagctag

SEQ ID NO: 231223 - DNA, 312 bp, Artificial Sequence
  derived and/or modified sequence
atgagcgactgctacaccgagctggagaaggccgtgatcgtgctggtcgaaaacttttacaaatatgtctcaaagtacagcctagttaagaataaaatctctaaaagcagcttcagggaaatgctccagaaagagctaaaccatatgttgagcgatactgggaatcgtaaagccgcagataaactgattcagaatttggacgccaatcatgacggccggatctcttttgatgaatattggacactaatcgggggcattaccggtccgattgcaaaactgattcatgaacaggagcagcaatcgagcagctag

SEQ ID NO: 231224 - DNA, 312 bp, Artificial Sequence
  derived and/or modified sequence
atgagcgactgctacaccgagctggagaaggccgtgatcgtgctggttgagaatttttataaatacgtatccaaatacagccttgttaagaataaaatttccaaaagttcctttcgcgaaatgttgcagaaagaactcaaccacatgctgtctgataccggtaaccggaaagctgctgataaactgattcagaacctggacgctaaccatgacggtcggatatcctttgatgaatattggacactgataggcggcatcacgggtccgatagctaaacttattcatgagcaagaacagcagagcagctcctag

SEQ ID NO: 231225 - DNA, 312 bp, Artificial Sequence
  derived and/or modified sequence
atgagcgactgctacaccgagctggagaaggccgtgatcgtgctggtcgaaaatttctacaaatatgtaagcaaatattctcttgtgaagaacaaaataagcaagtccagtttccgtgagatgcttcaaaaggaactaaatcacatgttgagtgatacgggaaatcgcaaagccgcagataagttgatccaaaacttggatgccaaccacgacggaagaattagtttcgacgagtattggacacttatcgggggtatcactgggccaatcgctaaactcattcacgagcaagaacagcagtcctctagctag

SEQ ID NO: 231226 - DNA, 312 bp, Artificial Sequence
  derived and/or modified sequence
atgagcgactgctacaccgagctggagaaggccgtgatcgtgctggttgagaacttctataaatacgtctccaagtactccctcgtgaaaaataagataagcaaatcatcattcagggagatgctccagaaggagctcaaccacatgctgagtgatactgggaatcggaaagctgctgacaagctgattcagaaccttgacgctaatcatgacggaaggatatcgttcgatgagtattggacacttattggcggcatcaccggtcccatcgccaagctcatccatgagcaggagcagcagtcttcttcctag

SEQ ID NO: 231227 - DNA, 312 bp, Artificial Sequence
  derived and/or modified sequence
atgtctgattgttacaccgaattagaaaaggccgtaattgtcctcgtggagaatttctataaatacgtgtctaagtacagcttggtaaaaaataaaattagtaaatctagcttccgcgagatgctgcagaaggagctgaatcacatgctaagtgacactggcaatcgaaaggctgccgataagctgatccagaatctggatgccaaccacgatggcaggataagttttgatgaatactggactctcataggagggataacaggcccaattgcaaagttaatccacgaacaggaacagcaatccagttcctag

SEQ ID NO: 231228 - DNA, 312 bp, Artificial Sequence
  derived and/or modified sequence
atgagcgactgttataccgaacttgagaaggccgttatagtgctggtggagaatttctacaaatatgtctccaagtatagccttgttaagaacaaaatttcaaagagttcattcagggagatgctgcaaaaagagcttaatcacatgctctctgatacgggtaaccgaaaagctgccgataaactcattcagaacctagacgccaaccacgatggccgtattagcttcgatgagtactggacactgattggaggcatcacagggccaatcgccaagttaatccatgagcaagaacagcagtccagcagctag

SEQ ID NO: 231229 - DNA, 312 bp, Artificial Sequence
  derived and/or modified sequence
atgtcggactgctatactgagctggaaaaagccgtgattgtgctggttgaaaacttttataaatatgtcagtaaatattccctcgtcaagaacaaaattagcaagagtagttttcgggagatgctccaaaaggaactgaaccacatgctttcagatacgggcaatcgcaaggcagccgacaaactgatacagaacctggacgctaaccacgacggcaggatttcctttgatgagtactggacactcatcggagggattaccggacctatcgccaagcttatccatgaacaggagcagcagtctagtagctag

SEQ ID NO: 231230 - DNA, 312 bp, Artificial Sequence
  derived and/or modified sequence
atgtcagactgttatacagaactcgaaaaagcagtgatcgtgcttgtggagaacttttacaagtatgtgtcaaagtactccctagtgaagaacaaaatatcaaaatcatcctttagggaaatgctccaaaaggaactgaaccacatgctgtccgacacgggtaaccggaaggccgcagataagttaattcagaacctcgacgctaaccatgatggtagaatctcctttgacgaatattggactctgataggtggcattaccgggcctattgccaaactcatacacgagcaagaacagcagtcaagctcttag

SEQ ID NO: 231231 - protein, 227 aa, Artificial Sequence
  derived and/or modified sequence
MEKLFNENEGMPSNQGKIDNEEQPPHEGKPEVACILEDKKLENEGNTENTGKRVEEPLKDKEKPESAGKAKGEGKSERKGKSEMQGGSKTEGKPERGGRAEGEGEPDSEREPESEGEPESETRAAGKRPAEDDIPRKAKRKTNKGLAQYLKQYKEAIHDMNFSNEDMIREFDNMARVEDKRRKSKQKLGAFLWMQRNLQDPFYPRGPREFRGGCRAPRRDTEDIPYV

SEQ ID NO: 231232 - DNA, 684 bp, Artificial Sequence
  derived and/or modified sequence
atggagaaattgtttaacgagaacgagggcatgccttccaaccaggggaagatcgacaacgaggaacagccgcctcacgaggggaagccagaagtagcttgcattctggaggataaaaagctcgagaacgagggcaatacagaaaatacggggaagagggtggaagagcctctgaaggataaagagaaaccggagagcgccgggaaagcaaagggagaagggaagtctgaacggaagggcaaatccgagatgcaaggtggcagcaagaccgaaggtaaacctgaacgcggaggacgcgccgaaggggagggcgagccagattcggaacgagaacccgagtccgaaggggagccagaaagcgagacccgggctgctggaaaacggccagctgaggatgacattcccaggaaagccaaacgaaagacaaacaagggtctagctcagtatctcaaacagtataaggaggccatccacgatatgaatttcagtaacgaggacatgatacgggagttcgataacatggctagagtcgaggacaagcgccgcaagtccaagcagaaattgggagcatttctatggatgcagcgtaatctccaagatccattctacccacgaggacctagggaattccgcggtgggtgccgagctccccgccgcgacactgaagacattccctatgtgtag

SEQ ID NO: 231233 - DNA, 684 bp, Artificial Sequence
  derived and/or modified sequence
atggaaaagctgttcaatgagaatgaaggcatgccctctaatcagggaaaaatcgataacgaagagcagccgccacatgagggcaagcctgaagttgcctgcatcctggaggacaagaagctggagaacgaaggcaacacagaaaacactggaaagcgcgttgaggaaccactgaaggataaggagaagcctgagagtgcaggtaaagctaagggcgaaggaaagtcagagaggaagggcaagagcgaaatgcaaggagggtcaaaaaccgagggtaaacccgagcggggcggaagagcagaaggcgagggcgaacccgactctgaacgggaaccggagtcagagggcgagcctgagagcgagactagggccgccggtaagcggccagccgaagacgatatccctcgcaaggccaaaagaaaaacaaataagggtcttgcacagtatcttaagcagtataaagaggcaatccacgacatgaattttagcaatgaagacatgatcagggaattcgataacatggcacgtgtggaggacaaacgcagaaaatccaagcagaagcttggggcctttctatggatgcaacgcaacctccaagacccgttttatccccggggaccaagggagttcaggggcgggtgtcgggccccgcggcgagacacagaggacataccttacgtttag

SEQ ID NO: 231234 - DNA, 684 bp, Artificial Sequence
  derived and/or modified sequence
atggagaagctgttcaatgaaaatgaaggcatgcccagcaaccagggcaagattgacaatgaggagcagccccctcatgagggcaagccagaggtggcctgcatcctggaggacaagaagctggagaatgaaggcaacacagagaacacaggcaagagggtggaggagcccctgaaggacaaggagaagccagagagcgctgggaaggccaagggggagggcaagtctgagaggaagggcaagtctgagatgcagggcggcagcaagacagagggcaagccagagcggggcggccgggcagagggggagggggagccagacagcgagcgggagcctgagagcgagggggagcctgagagcgagaccagggctgctgggaagaggcctgcagaagatgacatccccaggaaggccaagaggaagaccaacaagggcctggcccagtacctgaagcagtacaaggaggccatccatgacatgaacttcagcaatgaagacatgatccgggagtttgacaacatggcccgggtggaggacaagaggaggaagagcaagcagaagctgggcgccttcctgtggatgcagaggaacctgcaggaccccttctacccccggggcccccgggagttccggggcggctgccgggccccccggcgggacacagaggacatcccctacgtgtag

SEQ ID NO: 231235 - DNA, 684 bp, Artificial Sequence
  derived and/or modified sequence
atggagaagctgttcaacgagaacgagggcatgcccagcaaccagggcaaaatcgacaacgaggaacagcccccccatgaagggaagccagaagtggcctgcatcctcgaggacaagaagctggaaaacgagggaaataccgaaaatactggaaagagggtggaggaaccactcaaggataaagagaaaccagagtccgccggaaaggccaagggcgaaggcaagagtgagcggaaaggcaagagcgagatgcagggaggaagcaaaacagagggtaagcccgagaggggcggtcgcgccgagggcgaaggtgaacctgattctgaacgggagcctgagtccgagggtgagccagaatctgagacacgcgcagctgggaagaggcctgctgaagacgacataccacggaaggccaagagaaagactaataagggactagcgcagtatttgaaacagtacaaggaagcaatccatgacatgaatttttcaaacgaggacatgatccgcgagtttgataatatggcgcgcgtggaagataaaagaaggaagagtaagcagaaactcggcgccttcttgtggatgcaaagaaaccttcaggatcctttttacccgcgaggaccaagagaatttagaggcggatgtcgcgcaccccgtagagatactgaggacataccatacgtttag

SEQ ID NO: 231236 - DNA, 684 bp, Artificial Sequence
  derived and/or modified sequence
atggagaagctgttcaacgagaacgagggcatgcccagcaaccagggaaagatcgataatgaggagcagcccccgcacgagggaaagcccgaagttgcatgcatactggaggacaagaagctggagaacgagggaaacacagagaacaccggaaagagggtggaggagccattgaaagataaagagaagcctgaaagcgccggcaaagctaagggagaaggcaagtctgaaagaaagggtaagagcgagatgcagggaggaagcaaaaccgaggggaagccagagcgtggcggaagagcagaaggggaaggggagccagattcagaaagggaaccagagtcagagggagagccagagtctgaaactagagcagccgggaagaggcccgctgaagatgacatcccgaggaaagccaagcgaaaaaccaacaaggggctcgcacagtacttaaagcaatacaaagaggcgattcatgacatgaattttagcaacgaagatatgatacgggagttcgataacatggctagagttgaagacaaaagaaggaagtctaaacagaagcttggcgccttcctttggatgcagcgcaatctgcaggacccgttctacccgagaggaccgcgggaattcaggggtggctgtcgagctccacgtagggacactgaggacattccttacgtttag

SEQ ID NO: 231237 - DNA, 1080 bp, Artificial Sequence
  derived and/or modified sequence
gcgcccgcgcagaatcagctgtctgagctgcccaggcggcgggggagcagcgagcgggcttcagcgagccgcaggaggcacaggcctgtcctgggtccccgcaggtctgcgcgtctgttgttcccagcgctctgagaggcctgaaaaggaagagcaacctgtccagaatccccgcaggaaaaggaggggaaatctcgacatggaaaaactcttcaatgaaaatgaaggaatgccttcgaatcaaggaaagatagacaatgaagaacagccaccgcacgagggaaagccagaagtagcttgtattctggaagacaagaagttagaaaacgagggaaacacagaaaacacgggcaagagagttgaggaaccgttaaaggataaagaaaagccagagagtgcgggaaaggcaaaaggagaaggaaagtcagagaggaagggaaagtcagagatgcagggaggatcaaagacagagggaaagccagagagagggggaagggcagagggtgaaggagagccagacagtgaaagagagccagagagtgagggagagccagaaagtgaaacaagggctgcaggaaagcgcccagctgaggatgatatacccaggaaagccaaaagaaaaaccaacaaggggctggctcagtacctcaagcaatataaggaagccatacatgatatgaatttcagcaatgaggacatgataagagaatttgacaacatggctagggtggaggataaaaggagaaaaagcaaacagaaattgggggcgtttttgtggatgcaaagaaatttacaggaccccttctatcctaggggtccaagggaattcaggggtggctgcagggccccacgaagggacactgaagacattccttatgtgtagtgtccctggcaggcatttgtcaggccatatgttttaaccttatggtaatactttgctttagtcgttcctcctgctaccagtagcgttttgacccacctgccagtgtttgcttgctctatgtttcagtagcagattttcacacatgtgcattgcagagacgtcatgattcgtggaaaaataaagcagcttataatatc

SEQ ID NO: 231238 - DNA, 1100 bp, Artificial Sequence
  derived and/or modified sequence
agcggtcgggtccgggcgcccgcgcagaatcagctgtctgagctgcccaggcggcgggggagcagcgagcgggcttcagcgagccgcaggaggcacaggcctgtcctgggtccccgcaggtctgcgcgtctgttgttcccagcgctctgagaggcctgaaaaggaagagcaacctgtccagaatccccgcaggaaaggaaaaggaggggaaatctcgacatggaaaaactcttcaatgaaaatgaaggaatgccttcgaatcaaggaaagatagacaatgaagaacagccaccgcacgagggaaagccagaagtagcttgtattctggaagacaagaagttagaaaacgagggaaacacagaaaacacgggcaagagagttgaggaaccgttaaaggataaagaaaagccagagagtgcgggaaaggcaaaaggagaaggaaagtcagagaggaagggaaagtcagagatgcagggaggatcaaagacagagggaaagccagagagagggggaagggcagagggtgaaggagagccagacagtgaaagagagccagagagtgagggagagccagaaagtgaaacaagggctgcaggaaagcgcccagctgaggatgatatacccaggaaagccaaaagaaaaaccaacaaggggctggctcagtacctcaagcaatataaggaagccatacatgatatgaatttcagcaatgaggacatgataagagaatttgacaacatggctagggtggaggataaaaggagaaaaagcaaacagaaattgggggcgtttttgtggatgcaaagaaatttacaggaccccttctatcctaggggtccaagggaattcaggggtggctgcagggccccacgaagggacactgaagacattccttatgtgtagtgtccctggcaggcatttgtcaggccatatgttttaaccttatggtaatactttgctttagtcgttcctcctgctaccagtagcgttttgacccacctgccagtgtttgcttgctctatgtttcagtagcagattttcacacatgtgcattgcagagacgtcatgattcgtggaaaaataaagcagcttataatatc

SEQ ID NO: 231239 - DNA, 684 bp, Artificial Sequence
  derived and/or modified sequence
atggaaaagctttttaacgagaacgagggcatgccatccaatcagggtaagatcgataatgaggaacaacctccacatgaaggcaagcctgaagtggcttgcattcttgaggacaagaagttggaaaacgaggggaataccgaaaacaccggcaagagggtcgaagaacccctcaaggataaagagaaacctgagtctgctgggaaggccaaaggggaagggaagtctgaaagaaagggcaagtccgagatgcaaggaggtagcaaaaccgaaggaaaacccgagaggggagggcgtgctgagggcgagggtgagccggattcagaacgcgaacccgaaagtgaaggggagcctgaatcagagaccagagcggcagggaaacgaccagcggaggacgatatccccagaaaggcgaaaaggaaaaccaacaagggccttgcccaatacctcaagcagtacaaggaggccatccacgacatgaattttagtaacgaagatatgattagggaattcgacaatatggcaagggttgaggacaaacgacgaaagtccaagcagaagcttggagcctttctttggatgcagagaaacctgcaagacccattctaccccagaggccctcgcgagtttcggggaggatgtcgagccccacgtagggatactgaggacatcccttacgtgtag

SEQ ID NO: 231240 - DNA, 684 bp, Artificial Sequence
  derived and/or modified sequence
atggagaagttgtttaatgagaatgaggggatgccttccaatcaaggcaaaattgacaacgaggagcagccacctcacgaggggaagcccgaggtggcttgcattttggaagataagaagttggaaaacgaaggaaacacggaaaacacaggtaagagggttgaggagccccttaaggacaaagagaagcctgaatcagctggcaaggcaaagggagagggaaagagcgaacgcaagggcaagtcagaaatgcagggagggtccaagactgaggggaagcctgagcgtggcggacgggcagagggcgagggcgaacccgactcagagagggagccagaaagcgaaggcgagccagagtccgagacgagagccgctggcaaaagacccgctgaggatgatattccaagaaaagctaaacggaaaacgaacaagggactggcacagtacctgaagcagtacaaggaagccatacacgacatgaatttcagtaatgaagacatgatccgcgagttcgacaacatggcgagggtggaagacaagcgaaggaagtccaagcagaaattaggcgcatttctgtggatgcagaggaaccttcaagacccattctatccccgaggtccgagagagttccgcggaggatgccgagccccaagacgggacactgaggatataccatatgtttag

SEQ ID NO: 231241 - DNA, 684 bp, Artificial Sequence
  derived and/or modified sequence
atggagaagctgttcaacgagaacgagggcatgcccagcaaccagggcaagatcgacaacgaggagcagcccccccacgagggcaagcccgaggtggcctgcatcctggaggacaagaagctggagaacgagggcaacaccgagaacaccggcaagagagtggaggagcccctgaaggacaaggagaagcccgagagcgccggcaaggccaagggcgagggcaagagcgagagaaagggcaagagcgagatgcagggcggcagcaagaccgagggcaagcccgagagaggcggcagagccgagggcgagggcgagcccgacagcgagagagagcccgagagcgagggcgagcccgagagcgagaccagagccgccggcaagagacccgccgaggacgacatccccagaaaggccaagagaaagaccaacaagggcctggcccagtacctgaagcagtacaaggaggccatccacgacatgaacttcagcaacgaggacatgatcagagagttcgacaacatggccagagtggaggacaagagaagaaagagcaagcagaagctgggcgccttcctgtggatgcagagaaacctgcaggaccccttctaccccagaggccccagagagttcagaggcggctgcagagcccccagaagagacaccgaggacatcccctacgtgtag

SEQ ID NO: 231242 - protein, 274 aa, Artificial Sequence
  derived and/or modified sequence
MIKRFLEDTTDDGELSKFVKDFSGNASCHPPEAKTWASRPQVPEPRPQAPDLYDDDLEFRPPSRPQSSDNQQYFCAPAPLSPSARPRSPWGKLDPYDSSEDDKEYVGFATLPNQVHRKSVKKGFDFTLMVAGESGLGKSTLVNSLFLTDLYRDRKLLGAEERIMQTVEITKHAVDIEEKGVRLRLTIVDTPGFGDAVNNTECWKPVAEYIDQQFEQYFRDESGLNRKNIQDNRVHCCLYFISPFGHGYGPSLRLLAPPGAVKGTGQEHQGQGCH

SEQ ID NO: 231243 - DNA, 825 bp, Artificial Sequence
  derived and/or modified sequence
atgatcaagagattcctggaggacaccaccgacgacggcgagctgagcaagttcgtgaaggacttcagcggcaacgccagctgccacccccccgaggccaagacctgggccagcagaccccaggtgcccgagcccagaccccaggcccccgacctgtacgacgacgacctggagttcagaccccccagcagaccccagagcagcgacaaccagcagtacttctgcgcccccgcccccctgagccccagcgccagacccagaagcccctggggcaagctggacccctacgacagcagcgaggacgacaaggagtacgtgggcttcgccaccctgcccaaccaggtgcacagaaagagcgtgaagaagggcttcgacttcaccctgatggtggccggcgagagcggcctgggcaagagcaccctggtgaacagcctgttcctgaccgacctgtacagagacagaaagctgctgggcgccgaggagagaatcatgcagaccgtggagatcaccaagcacgccgtggacatcgaggagaagggcgtgagactgagactgaccatcgtggacacccccggcttcggcgacgccgtgaacaacaccgagtgctggaagcccgtggccgagtacatcgaccagcagttcgagcagtacttcagagacgagagcggcctgaacagaaagaacatccaggacaacagagtgcactgctgcctgtacttcatcagccccttcggccacggctacggccccagcctgagactgctggccccccccggcgccgtgaagggcaccggccaggagcaccagggccagggctgccactag

SEQ ID NO: 231244 - DNA, 825 bp, Artificial Sequence
  derived and/or modified sequence
atgattaagagatttctcgaagacaccactgacgatggggaactgtctaagttcgtgaaagatttctccggcaacgctagctgtcacccccccgaggccaagacttgggcatctcgtccacaggtgcctgaacccaggcctcaggcccctgatctgtacgacgacgatctggagtttagacctccaagccgaccccagtcatccgataatcagcagtacttttgcgcgccagcgccactgagcccctccgcacggccaaggtccccttggggtaagctcgacccatatgactcaagtgaggatgataaggagtatgtcggttttgccaccctcccaaatcaggtacatcggaagtcagtaaagaaaggcttcgatttcacactcatggtagctggagagtcgggcctcggaaagtcaaccttggtgaactcactctttctgactgacttgtatcgggatcgtaagctgctgggggccgaggagaggatcatgcaaacagtggagattaccaagcatgccgtggatattgaggaaaaaggtgttcgcctacgactgacaatcgtagatacccctggttttggagacgctgttaacaacaccgaatgctggaagccagtggctgagtacatagatcagcaatttgagcagtactttagggacgaatctggccttaatcggaagaatattcaggacaatcgggttcactgttgcctgtacttcatcagcccatttggtcacgggtatgggccaagtctccgcctcctggcccccccaggcgccgtgaaaggtaccggccaggagcatcagggccaagggtgccactag

SEQ ID NO: 231245 - DNA, 825 bp, Artificial Sequence
  derived and/or modified sequence
atgatcaagcgcttcctggaggacaccacagatgatggagagctgagcaagtttgtgaaggacttctctggaaatgccagctgccaccccccagaggccaagacctgggccagccggccccaggtgcctgagccccggccccaggccccagacctgtatgatgatgacctggagttccggccccccagccggccccagagcagtgacaaccagcagtacttctgtgccccagcccccctgagccccagcgcccggcccaggagcccctggggcaagctggacccctatgacagcagtgaagatgacaaggagtatgtgggctttgccaccctgcccaaccaggtgcacaggaagtctgtgaagaagggctttgacttcaccctgatggtggccggggagagcggcctgggcaagagcaccctggtgaacagcctcttcctgacagacctgtacagagacaggaagctgctgggcgctgaggagcgcatcatgcagacagtggagatcaccaagcatgctgtggacatcgaggagaagggcgtgcggctgcggctgaccatcgtggacaccccaggctttggagatgctgtgaacaacacagagtgctggaagcctgtggccgagtacatcgaccagcagtttgagcagtacttcagagatgagagcggcctgaacaggaagaacatccaggacaacagagtgcactgctgcctgtacttcatcagccccttcggccacggctacggccccagcctgcggctgctggcccctcctggagctgtgaagggcaccggccaggagcaccagggccagggctgccactag

SEQ ID NO: 231246 - DNA, 825 bp, Artificial Sequence
  derived and/or modified sequence
atgatcaagcggttcctggaggacaccaccgacgacggcgagctgagtaagttcgtgaaggattttagcggtaatgcctcatgccaccctccggaggcaaaaacctgggctagccgtcctcaggtgccagaaccacgaccccaggcccccgatctgtatgatgacgacctggaatttagacccccatcccgcccacaatcatccgacaaccagcagtacttttgtgcccctgcacctctgtccccctctgctcggccgagaagcccatggggaaagctggacccttacgacagcagcgaggatgataaagagtatgttggctttgcaacactcccgaaccaggtccacaggaagagcgtaaagaaaggatttgatttcacactcatggtggccggggaaagcggattgggaaagtccacactggtgaactcactattcttaacagacctttaccgtgatagaaagcttctgggtgcagaggagcgcattatgcaaaccgtcgaaatcactaaacacgctgtggacatcgaggaaaaaggggtgcgacttcgactcactatcgtcgatactcccggttttggggacgccgtgaacaataccgaatgctggaaacctgtggccgaatacatcgatcaacaattcgaacaatactttcgggatgaaagcggactcaatagaaaaaatatacaggacaacagagtccattgttgtttatactttatcagccctttcgggcacggatatggtccgagcctgcgcctgctcgcacctcccggcgccgtgaaggggaccggccaggagcaccaggggcagggatgccactag

SEQ ID NO: 231247 - DNA, 825 bp, Artificial Sequence
  derived and/or modified sequence
atgataaaaaggtttctggaagataccacagatgacggagagctatccaaattcgtcaaagacttttcgggaaacgctagttgtcacccaccagaggccaagacgtgggcatccaggccccaggtgccagaaccgagacctcaggccccagatctgtatgacgacgacttggaatttcgcccaccgagtcgccctcaatctagtgataatcagcaatatttttgcgcgccagccccactttccccctctgcaaggcccagaagtccctggggcaagttggacccgtacgattccagcgaggatgacaaggaatatgttggcttcgcaactcttccaaatcaggtgcacagaaagagtgtgaagaaaggatttgactttacactcatggtcgctggcgaaagcgggctgggcaaatccacactggtaaactctttgtttctgaccgatctctaccgcgacaggaaattgttaggagctgaggagcgcattatgcagactgtggaaatcaccaagcatgctgtggacattgaagagaagggagtcaggttgcggctgactattgtggataccccaggattcggagatgccgtgaataatactgaatgttggaaaccggtcgccgaatacatcgatcagcagttcgaacaatattttcgtgacgagtccggattaaaccggaagaacatacaagataaccgtgttcactgctgtctgtacttcatatcacccttcgggcatggttatggcccttccctccggctccttgcgccacccggtgccgtcaaggggacaggccaagagcaccaggggcaaggctgccactag

SEQ ID NO: 231248 - DNA, 822 bp, Artificial Sequence
  derived and/or modified sequence
atgatcaagcgcttcctggaggacaccaccgacgacggcgagctgagcaagttcgtgaaggacttcagcggcaacgccagctgccacccccccgaggccaagacctgggccagccgcccccaggtgcccgagccccgcccccaggcccccgacctgtacgacgacgacctggagttccgcccccccagccgcccccagagcagcgacaaccagcagtacttctgcgcccccgcccccctgagccccagcgcccgcccccgcagcccctggggcaagctggacccctacgacagcagcgaggacgacaaggagtacgtgggcttcgccaccctgcccaaccaggtgcaccgcaagagcgtgaagaagggcttcgacttcaccctgatggtggccggcgagagcggcctgggcaagagcaccctggtgaacagcctgttcctgaccgacctgtaccgcgaccgcaagctgctgggcgccgaggagcgcatcatgcagaccgtggagatcaccaagcacgccgtggacatcgaggagaagggcgtgcgcctgcgcctgaccatcgtggacacccccggcttcggcgacgccgtgaacaacaccgagtgctggaagcccgtggccgagtacatcgaccagcagttcgagcagtacttccgcgacgagagcggcctgaaccgcaagaacatccaggacaaccgcgtgcactgctgcctgtacttcatcagccccttcggccacggctacggccccagcctgcgcctgctggccccccccggcgccgtgaagggcaccggccaggagcaccagggccagggctgccac

SEQ ID NO: 231249 - protein, 387 aa, Artificial Sequence
  derived and/or modified sequence
MPTTIEREFEELDTQRRWQPLYLEIRNESHDYPHRVAKFPENRNRNRYRDVSPYDHSRVKLQNAENDYINASLVDIEEAQRSYILTQGPLPNTCCHFWLMVWQQKTKAVVMLNRIVEKESVKCAQYWPTDDQEMLFKETGFSVKLLSEDVKSYYTVHLLQLENINSGETRTISHFHYTTWPDFGVPESPASFLNFLFKVRESGSLNPDHGPAVIHCSAGIGRSGTFSLVDTCLVLMEKGDDINIKQVLLNMRKYRMGLIQTPDQLRFSYMAIIEGAKCIKGDSSIQKRWKELSKEDLSPAFDHSPNKIMTEKYNGNRIGLEEEKLTGDRCTGLSSKMQDTMEENSESALRKRIREDRKATTAQKVQQMKQRLNENERKRKRPRLTDT

SEQ ID NO: 231250 - DNA, 1164 bp, Artificial Sequence
  derived and/or modified sequence
atgcctactacaatagaacgggagttcgaagagttggacacacaaagacggtggcagccactgtatctcgagattagaaatgagagccacgactacccccaccgcgtggccaagttccctgagaaccggaacagaaaccggtatagagacgtgtcaccatacgaccattccagggtgaaactgcagaacgccgagaatgactatattaacgcatctctggtcgatatcgaagaggcccagaggtcttacattcttactcagggtcccctgcccaacacctgttgtcacttctggctaatggtatggcagcagaagacaaaggccgttgttatgttgaaccgtatcgtcgagaaggaatcggtaaaatgcgctcagtattggcccactgatgaccaggagatgctcttcaaagagacaggattcagcgttaagctgctcagcgaggacgtgaaaagctattacaccgtccatctgctgcagttggagaacattaactccggcgaaacccggacaatcagccattttcactataccacatggccagacttcggcgtgcctgaaagcccagcctccttcctcaatttcctgttcaaggtgcgcgaatctggctctctgaaccctgatcacgggccagcagtgattcattgcagcgcaggtattggaagatcaggaaccttctctctggtagatacatgcttggtgctgatggaaaagggtgatgacattaacatcaagcaggttctgcttaacatgagaaagtacagaatgggactgatccaaactcctgatcaactgcggtttagttatatggcaatcatcgagggtgctaagtgtattaaaggagactccagtattcagaagcgatggaaagaactgtccaaagaggacttgtcgccagcctttgaccattctcctaacaaaatcatgacagaaaaatataatggcaaccgtattggcctggaggaggagaagctcacaggagatagatgtaccggattgtcatccaagatgcaggataccatggaagagaattctgagtcagccctgcggaaaaggatccgagaggatcgaaaagccactactgcccagaaagtgcagcagatgaaacagcgattgaacgagaatgaacggaaaagaaagcggcctcggttgacagacacatag

SEQ ID NO: 231251 - DNA, 1164 bp, Artificial Sequence
  derived and/or modified sequence
atgcccaccaccatcgagcgggagtttgaggagctggacacccagaggcgctggcagcccctgtacctggagatcagaaatgaaagccatgactacccccaccgggtggccaagttcccagaaaatagaaacagaaaccgctacagagatgtgagcccctatgaccacagccgggtgaagctgcagaatgcagaaaatgactacatcaatgccagcctggtggacatcgaggaggcccagaggagctacatcctgacccagggccccctgcccaacacctgctgccacttctggctgatggtgtggcagcagaagaccaaggctgtggtgatgctgaacagaattgtggagaaggagagcgtgaagtgtgcccagtactggcccacagatgaccaggagatgctgttcaaggagaccggcttctctgtgaagctgctgtctgaagatgtgaagagctactacacagtgcacctgctgcagctggagaacatcaacagcggggagaccaggaccatcagccacttccactacaccacctggccagactttggagtgcctgagagccctgccagcttcctgaacttcctgttcaaggtgcgggagagcggcagcctgaacccagaccacggccctgctgtgatccactgcagcgctggcatcggccgcagcggcaccttcagcctggtggacacctgcctggtgctgatggagaagggagatgacatcaacatcaagcaggtgctgctgaacatgaggaagtacaggatgggcctcatccagaccccagaccagctgcgcttctcctacatggccatcattgaaggagccaagtgcatcaagggggacagcagcatccagaagcgctggaaggagctgagcaaagaagacctgagccctgcctttgaccacagccccaacaagatcatgacagagaagtacaacggcaaccgcatcggcctggaggaggagaagctgaccggggaccgctgcaccggcctgagcagcaagatgcaggacaccatggaggagaacagcgagagcgccctgaggaagaggatccgggaggacaggaaggccaccacagcccagaaggtgcagcagatgaagcagaggctgaatgaaaatgaaaggaagaggaagaggccccggctgacagacacctag

SEQ ID NO: 231252 - DNA, 1164 bp, Artificial Sequence
  derived and/or modified sequence
atgcccaccaccatcgagcgggagttcgaggagctggacacccagagacggtggcagccgttgtatctggagatcagaaatgaaagtcacgactacccccacagggtagccaaatttcctgagaaccgcaatagaaataggtacagagacgtgtcaccctatgaccactctcgcgtgaagctccagaacgctgagaacgactacatcaacgcctctttagtggacatcgaggaggcccaaagatcttacattctgactcaggggccactgcctaatacatgctgtcacttctggttaatggtgtggcagcagaagacaaaagcagtggtcatgctcaaccgaatagtggaaaaggaatcggtcaaatgcgcgcagtactggccaaccgatgatcaagagatgttatttaaggagactggcttctccgtcaaactgttgagtgaagacgttaagtcttattacactgtacatctgttgcagcttgaaaatatcaatagcggggaaacccggacaatttcacattttcactataccacgtggcctgattttggcgtcccagagtcacctgcttcattcctcaactttctattcaaggtgagggagtcaggctctctgaatccggatcacggacctgccgttatacattgttccgctggcatcggcaggtccgggactttctctctagtcgatacctgtctggtgttgatggaaaagggggacgacatcaacattaagcaggtgcttctcaatatgcggaaataccgcatgggactgattcagactccggaccagctgagattttcttatatggctatcattgagggggccaagtgcattaagggtgactctagcattcaaaaacgctggaaggagctgagcaaggaggacttatcccccgcattcgatcactctcccaataaaattatgaccgagaagtataacggcaatagaatcggtcttgaggaagagaagttaactggcgatcggtgcaccggactgagttctaaaatgcaggatacgatggaggagaatagcgagagcgccctgcggaagagaatacgggaggatcgtaaagcaactaccgctcagaaggtacagcaaatgaagcaacggctcaacgaaaatgaacgcaagcgcaaacgaccacgtcttacagacacttag

SEQ ID NO: 231253 - DNA, 1164 bp, Artificial Sequence
  derived and/or modified sequence
atgccaacaaccatcgaaagggagtttgaagagttagacacccagagacgttggcaaccactgtatcttgaaatacggaacgaaagccatgactacccacatagggtcgctaagtttcctgaaaataggaatcggaataggtaccgggacgtgtctccttacgaccacagtcgggtgaaattgcagaatgccgagaacgactatattaatgcaagcctggtcgatattgaagaggcccagagatcttatattctgacccagggtcctctgcctaacacctgctgccacttttggctgatggtgtggcagcagaaaactaaagctgtagtgatgctgaatagaattgtggagaaagaaagcgtaaagtgcgctcagtattggcccacggatgaccaggaaatgctgtttaaggagaccgggttctcagttaagttgttgagtgaagacgtcaaatcctattatactgttcatctgctccagcttgagaatattaactctggtgagacccgtacaatctcccactttcattacactacatggccagattttggcgtgccagaaagccccgcatctttcttgaattttctcttcaaagtgagagagagcggttccctaaatcccgatcacggtcctgccgtgattcattgttcagccggaatcggcagaagcggcacatttagtctggttgacacctgcttggtgctcatggaaaagggagacgatatcaacattaagcaggtactgctgaacatgcggaagtatagaatggggttgattcagaccccagatcagctgaggtttagttacatggctattattgaaggagccaagtgcataaagggagacagttcgattcagaaaaggtggaaagaattaagcaaagaggacctatcgcctgctttcgaccattcccctaacaaaattatgaccgaaaaatacaatgggaatagaattggcttggaagaagaaaagttgaccggcgaccgctgcacaggcctgtcaagcaagatgcaggacacaatggaggagaacagtgagagcgccctccggaagcggattcgggaagaccggaaagcaactactgcccagaaggtgcagcagatgaagcagcgcttaaacgagaacgagcgcaaacgtaaacggccacgactcacagatacctag

SEQ ID NO: 231254 - DNA, 1706 bp, Artificial Sequence
  derived and/or modified sequence
cgcgctcgggcgccgagtctgcgcgctgacgtccgacgctccaggtactttccccacggccgacagggcttggcgtgggggcggggcgcggcgcgcagcgcgcatgcgccgcagcgccagcgctctccccggatcgtgcggggcctgagcctctccgccggcgcaggctctgctcgcgccagctcgctcccgcagccatgcccaccaccatcgagcgggagttcgaagagttggatactcagcgtcgctggcagccgctgtacttggaaattcgaaatgagtcccatgactatcctcatagagtggccaagtttccagaaaacagaaatcgaaacagatacagagatgtaagcccatatgatcacagtcgtgttaaactgcaaaatgctgagaatgattatattaatgccagtttagttgacatagaagaggcacaaaggagttacatcttaacacagggtccacttcctaacacatgctgccatttctggcttatggtttggcagcagaagaccaaagcagttgtcatgctgaaccgcattgtggagaaagaatcggttaaatgtgcacagtactggccaacagatgaccaagagatgctgtttaaagaaacaggattcagtgtgaagctcttgtcagaagatgtgaagtcgtattatacagtacatctactacaattagaaaatatcaatagtggtgaaaccagaacaatatctcactttcattatactacctggccagattttggagtccctgaatcaccagcttcatttctcaatttcttgtttaaagtgagagaatctggctccttgaaccctgaccatgggcctgcggtgatccactgtagtgcaggcattgggcgctctggcaccttctctctggtagacacttgtcttgttttgatggaaaaaggagatgatattaacataaaacaagtgttactgaacatgagaaaataccgaatgggtcttattcagaccccagatcaactgagattctcatacatggctataatagaaggagcaaaatgtataaagggagattctagtatacagaaacgatggaaagaactttctaaggaagacttatctcctgcctttgatcattcaccaaacaaaataatgactgaaaaatacaatgggaacagaataggtctagaagaagaaaaactgacaggtgaccgatgtacaggactttcctctaaaatgcaagatacaatggaggagaacagtgagagtgctctacggaaacgtattcgagaggacagaaaggccaccacagctcagaaggtgcagcagatgaaacagaggctaaatgagaatgaacgaaaaagaaaaaggccaagattgacagacacctaatattcatgacttgagaatattctgcagctataaattttgaaccattgatgtgcaaagcaagacctgaagcccactccggaaactaaagtgaggctcgctaaccctctagattgcctcacagttgtttgtttacaaagtaaactttacatccaggggatgaagagcacccaccagcagaagactttgcagaacctttaattggatgtgttaagtgtttttaatgagtgtatgaaatgtagaaagatgtacaagaaataaattaggggagattactttgtattgtactgccattcctactgtatttttatactttttggcagcattaaatatttttgttaaatagtc

SEQ ID NO: 231255 - DNA, 1164 bp, Artificial Sequence
  derived and/or modified sequence
atgcccaccaccatcgagagagagttcgaggagctggacacccagagaagatggcagcccctgtacctggagatcagaaacgagagccacgactacccccacagagtggccaagttccccgagaacagaaacagaaacagatacagagacgtgagcccctacgaccacagcagagtgaagctgcagaacgccgagaacgactacatcaacgccagcctggtggacatcgaggaggcccagagaagctacatcctgacccagggccccctgcccaacacctgctgccacttctggctgatggtgtggcagcagaagaccaaggccgtggtgatgctgaacagaatcgtggagaaggagagcgtgaagtgcgcccagtactggcccaccgacgaccaggagatgctgttcaaggagaccggcttcagcgtgaagctgctgagcgaggacgtgaagagctactacaccgtgcacctgctgcagctggagaacatcaacagcggcgagaccagaaccatcagccacttccactacaccacctggcccgacttcggcgtgcccgagagccccgccagcttcctgaacttcctgttcaaggtgagagagagcggcagcctgaaccccgaccacggccccgccgtgatccactgcagcgccggcatcggcagaagcggcaccttcagcctggtggacacctgcctggtgctgatggagaagggcgacgacatcaacatcaagcaggtgctgctgaacatgagaaagtacagaatgggcctgatccagacccccgaccagctgagattcagctacatggccatcatcgagggcgccaagtgcatcaagggcgacagcagcatccagaagagatggaaggagctgagcaaggaggacctgagccccgccttcgaccacagccccaacaagatcatgaccgagaagtacaacggcaacagaatcggcctggaggaggagaagctgaccggcgacagatgcaccggcctgagcagcaagatgcaggacaccatggaggagaacagcgagagcgccctgagaaagagaatcagagaggacagaaaggccaccaccgcccagaaggtgcagcagatgaagcagagactgaacgagaacgagagaaagagaaagagacccagactgaccgacacctag

SEQ ID NO: 231256 - protein, 353 aa, Artificial Sequence
  derived and/or modified sequence
MPTTIEREFEELDTQRRWQPLYLEIRNESHDYPHRVAKFPENRNRNRYRDVSPYDHSRVKLQNAENDYINASLVDIEEAQRSYILTQGPLPNTCCHFWLMVWQQKTKAVVMLNRIVEKESVKCAQYWPTDDQEMLFKETGFSVKLLSEDVKSYYTVHLLQLENINSGETRTISHFHYTTWPDFGVPESPASFLNFLFKVRESGSLNPDHGPAVIHCSAGIGRSGTFSLVDTCLVLMEKGDDINIKQVLLNMRKYRMGLIQTPDQLRFSYMAIIEGAKCIKGDSSIQKRWKELSKEDLSPAFDHSPNKIMTEKYNGNRIGLEEEKLTGDRCTGLSSKMQDTMEENSERPRLTDT

SEQ ID NO: 231257 - DNA, 1062 bp, Artificial Sequence
  derived and/or modified sequence
atgcccaccaccattgaacgcgaattcgaagaattggacacccagcgacggtggcaacccctgtatctggagatcaggaacgaaagccacgactatccacatcgagtagccaagttccctgaaaaccggaaccgcaacaggtatcgtgatgtatctccgtacgaccactcacgcgtgaagctgcagaacgcagagaacgactatatcaatgccagtctggtggacatcgaagaggcccagcggtcctacatcttgacccagggaccactgcctaacacttgttgtcacttctggctcatggtgtggcagcagaaaaccaaagccgtggtgatgctcaatagaatcgtggaaaaggagtcagttaagtgcgcacagtattggcccactgatgaccaggaaatgctgttcaaagaaaccgggttcagcgtgaaactgttgtccgaagatgttaagagctactataccgtacatttactccagcttgaaaacattaatagcggcgagacacggacgatctcacatttccactacacaacgtggccagatttcggtgtgcctgagtcacccgcctcctttctaaatttcctgtttaaggtgcgagaaagtggaagtctgaatcccgaccacggcccggctgtcatccactgcagtgccggaatcggacgctctggcacgttctcattggtggatacttgcctggtgttgatggagaagggggatgatattaatattaagcaagtgctgttgaacatgaggaaataccggatgggtttgatccaaacccccgaccagctccggttctcttacatggccattattgagggcgccaagtgcattaaaggcgatagctccatacaaaaaagatggaaagagttatctaaagaagatctctctcctgctttcgaccattcgccaaataagattatgacagaaaaatacaacggaaaccgtattggcctcgaggaagagaagctcacaggcgataggtgtacgggtctatcctcaaaaatgcaggacacaatggaagagaactcagagcgcccacgcttgacagatacctag

SEQ ID NO: 231258 - DNA, 1062 bp, Artificial Sequence
  derived and/or modified sequence
atgcccaccaccatcgagcgggagtttgaggagctggacacccagaggcgctggcagcccctgtacctggagatcagaaatgaaagccatgactacccccaccgggtggccaagttcccagaaaatagaaacagaaaccgctacagagatgtgagcccctatgaccacagccgggtgaagctgcagaatgcagaaaatgactacatcaatgccagcctggtggacatcgaggaggcccagaggagctacatcctgacccagggccccctgcccaacacctgctgccacttctggctgatggtgtggcagcagaagaccaaggctgtggtgatgctgaacagaattgtggagaaggagagcgtgaagtgtgcccagtactggcccacagatgaccaggagatgctgttcaaggagaccggcttctctgtgaagctgctgtctgaagatgtgaagagctactacacagtgcacctgctgcagctggagaacatcaacagcggggagaccaggaccatcagccacttccactacaccacctggccagactttggagtgcctgagagccctgccagcttcctgaacttcctgttcaaggtgcgggagagcggcagcctgaacccagaccacggccctgctgtgatccactgcagcgctggcatcggccgcagcggcaccttcagcctggtggacacctgcctggtgctgatggagaagggagatgacatcaacatcaagcaggtgctgctgaacatgaggaagtacaggatgggcctcatccagaccccagaccagctgcgcttctcctacatggccatcattgaaggagccaagtgcatcaagggggacagcagcatccagaagcgctggaaggagctgagcaaagaagacctgagccctgcctttgaccacagccccaacaagatcatgacagagaagtacaacggcaaccgcatcggcctggaggaggagaagctgaccggggaccgctgcaccggcctgagcagcaagatgcaggacaccatggaggagaacagcgagcggccccggctgacagacacctag

SEQ ID NO: 231259 - DNA, 1062 bp, Artificial Sequence
  derived and/or modified sequence
atgcccaccaccatcgagcgggagttcgaggagctggacacccagcggagatggcaacctctctacctggaaattaggaacgaatcacacgactacccacaccgcgtcgccaaatttccagaaaaccgcaatagaaatcggtaccgagatgtatccccttatgatcacagccgggtgaaattacagaacgccgagaatgactacatcaacgcctctctggtggatatcgaggaggcacagagaagctacattctgacccaggggccactgccaaatacgtgttgtcacttctggcttatggtgtggcagcagaagaccaaggccgtggttatgctcaaccgtatcgtggaaaaagaatctgttaagtgtgctcagtactggcccaccgacgaccaggaaatgttattcaaagaaaccggcttcagcgtgaagcttctgtccgaagacgtgaaaagctactacacagtccatctgttgcagctggagaatatcaatagcggagagacaagaactatatcccatttccattatacaacatggcccgattttggagtgcctgaatctcccgcctcattcctgaactttttattcaaagttcgagagagcgggtctctgaaccccgatcacgggccagccgtaattcattgctctgcgggtatcgggagatccgggaccttctccctggtagacacttgcttggtgctgatggagaagggcgacgatataaacatcaagcaggttctgcttaatatgcggaagtatcgcatgggcttaatccaaactccagatcagctgcgtttcagttatatggccattatcgaaggtgctaagtgtattaagggtgactccagcatacagaagcggtggaaagagctttcaaaggaggatctgtccccagcgttcgaccactcacctaataagattatgacagaaaagtataacggtaacaggattggactcgaggaggagaagttaacaggagaccggtgcactggcctctcttccaaaatgcaggatactatggaagagaactccgagcggcccaggctgactgatacttag

SEQ ID NO: 231260 - DNA, 1062 bp, Artificial Sequence
  derived and/or modified sequence
atgccaaccaccattgaacgcgagttcgaggagctggatactcagaggagatggcagcctctgtatttggagatcagaaatgaaagccatgattacccccaccgcgtcgccaagttccccgagaaccggaacaggaaccgataccgcgacgtgtctccatatgaccacagtcgggtgaaactccagaacgcagagaatgactacatcaacgctagcctggtggacattgaggaggcacaaagatcctacatcctcacgcaggggccactgccaaacacttgctgtcatttttggctgatggtgtggcagcagaagaccaaggccgtggtaatgctgaatagaatagttgagaaggaatccgtgaaatgcgcccaatactggcctacagacgaccaggagatgcttttcaaagaaacaggctttagtgtgaagttgctctccgaggacgtgaagtcttactatacggtacacctgctccagctcgagaacattaatagtggagagacacgcacaatctcacactttcattacaccacgtggcccgatttcggtgtgccagagtccccagctagttttcttaatttcctattcaaggtgcgcgagagtggttcattgaatccagatcacggacctgcagtgatccactgttcagcagggataggcaggtccggaactttctcgctggttgatacatgcttggtactaatggagaagggggatgacatcaacattaagcaagttcttcttaatatgaggaagtaccgtatgggcttgatccagactcccgaccaacttagattttcatacatggctattattgaaggcgcaaagtgcattaagggtgacagcagcattcagaaacggtggaaggagctgtctaaggaagacctgtctccagcttttgatcactctcccaataagatcatgaccgagaagtataatggcaaccgtatcgggcttgaggaggaaaagctcaccggggacaggtgtacaggtctgtcctcaaagatgcaggacaccatggaggaaaactcggagaggcccaggctgaccgacacctag

SEQ ID NO: 231261 - DNA, 1503 bp, Artificial Sequence
  derived and/or modified sequence
agcgcgcatgcgccgcagcgccagcgctctccccggatcgtgcggggcctgagcctctccgccggcgcaggctctgctcgcgccagctcgctcccgcagccatgcccaccaccatcgagcgggagttcgaagagttggatactcagcgtcgctggcagccgctgtacttggaaattcgaaatgagtcccatgactatcctcatagagtggccaagtttccagaaaacagaaatcgaaacagatacagagatgtaagcccatatgatcacagtcgtgttaaactgcaaaatgctgagaatgattatattaatgccagtttagttgacatagaagaggcacaaaggagttacatcttaacacagggtccacttcctaacacatgctgccatttctggcttatggtttggcagcagaagaccaaagcagttgtcatgctgaaccgcattgtggagaaagaatcggttaaatgtgcacagtactggccaacagatgaccaagagatgctgtttaaagaaacaggattcagtgtgaagctcttgtcagaagatgtgaagtcgtattatacagtacatctactacaattagaaaatatcaatagtggtgaaaccagaacaatatctcactttcattatactacctggccagattttggagtccctgaatcaccagcttcatttctcaatttcttgtttaaagtgagagaatctggctccttgaaccctgaccatgggcctgcggtgatccactgtagtgcaggcattgggcgctctggcaccttctctctggtagacacttgtcttgttttgatggaaaaaggagatgatattaacataaaacaagtgttactgaacatgagaaaataccgaatgggtcttattcagaccccagatcaactgagattctcatacatggctataatagaaggagcaaaatgtataaagggagattctagtatacagaaacgatggaaagaactttctaaggaagacttatctcctgcctttgatcattcaccaaacaaaataatgactgaaaaatacaatgggaacagaataggtctagaagaagaaaaactgacaggtgaccgatgtacaggactttcctctaaaatgcaagatacaatggaggagaacagtgagaggccaagattgacagacacctaatattcatgacttgagaatattctgcagctataaattttgaaccattgatgtgcaaagcaagacctgaagcccactccggaaactaaagtgaggctcgctaaccctctagattgcctcacagttgtttgtttacaaagtaaactttacatccaggggatgaagagcacccaccagcagaagactttgcagaacctttaattggatgtgttaagtgtttttaatgagtgtatgaaatgtagaaagatgtacaagaaataaattaggggagattactttgtattgtactgccattcctactgtatttttatactttttggcagcattaaatatttttgttaaa

SEQ ID NO: 231262 - DNA, 1062 bp, Artificial Sequence
  derived and/or modified sequence
atgcccaccaccatcgagagagagttcgaggagctggacacccagagaagatggcagcccctgtacctggagatcagaaacgagagccacgactacccccacagagtggccaagttccccgagaacagaaacagaaacagatacagagacgtgagcccctacgaccacagcagagtgaagctgcagaacgccgagaacgactacatcaacgccagcctggtggacatcgaggaggcccagagaagctacatcctgacccagggccccctgcccaacacctgctgccacttctggctgatggtgtggcagcagaagaccaaggccgtggtgatgctgaacagaatcgtggagaaggagagcgtgaagtgcgcccagtactggcccaccgacgaccaggagatgctgttcaaggagaccggcttcagcgtgaagctgctgagcgaggacgtgaagagctactacaccgtgcacctgctgcagctggagaacatcaacagcggcgagaccagaaccatcagccacttccactacaccacctggcccgacttcggcgtgcccgagagccccgccagcttcctgaacttcctgttcaaggtgagagagagcggcagcctgaaccccgaccacggccccgccgtgatccactgcagcgccggcatcggcagaagcggcaccttcagcctggtggacacctgcctggtgctgatggagaagggcgacgacatcaacatcaagcaggtgctgctgaacatgagaaagtacagaatgggcctgatccagacccccgaccagctgagattcagctacatggccatcatcgagggcgccaagtgcatcaagggcgacagcagcatccagaagagatggaaggagctgagcaaggaggacctgagccccgccttcgaccacagccccaacaagatcatgaccgagaagtacaacggcaacagaatcggcctggaggaggagaagctgaccggcgacagatgcaccggcctgagcagcaagatgcaggacaccatggaggagaacagcgagagacccagactgaccgacacctag

SEQ ID NO: 231263 - protein, 160 aa, Artificial Sequence
  derived and/or modified sequence
MGCLGNSKTEDQRNEEKAQREANKEDNQTNRLQEALNLFKSIWNNRWLRTISVILFLNKQDLLAEKVLAGKSKIEDYFPEFARYTTPEDATPEPGEDPRVTRAKYFIRDEFLRISTASGDGRHYCYPHFTCAVDTENIRRVFNDCRDIIQRMHLRQYELL

SEQ ID NO: 231264 - protein, 1037 aa, Artificial Sequence
  derived and/or modified sequence
MGVRNCLYGNNMSGQRDIPPEIGEQPEQPPLEAPGAAAPGAGPSPAEEMETEPPHNEPIPVENDGEACGPPEVSRPNFQVLNPAFREAGAHGSYSPPPEEAMPFEAEQPSLGGFWPTLEQPGFPSGVHAGLEAFGPALMEPGAFSGARPGLGGYSPPPEEAMPFEFDQPAQRGCSQLLLQVPDLAPGGPGAAGVPGAPPEEPQALRPAKAGSRGGYSPPPEETMPFELDGEGFGDDSPPPGLSRVIAQVDGSSQFAAVAASSAVRLTPAANAPPLWVPGAIGSPSQEAVRPPSNFTGSSPWMEISGPPFEIGSAPAGVDDTPVNMDSPPIALDGPPIKVSGAPDKRERAERPPVEEEAAEMEGAADAAEGGKVPSPGYGSPAAGAASADTAARAAPAAPADPDSGATPEDPDSGTAPADPDSGAFAADPDSGAAPAAPADPDSGAAPDAPADPDSGAAPDAPADPDAGAAPEAPAAPAAAETRAAHVAPAAPDAGAPTAPAASATRAAQVRRAASAAPASGARRKIHLRPPSPEIQAADPPTPRPTRASAWRGKSESSRGRRVYYDEGVASSDDDSSGDESDDGTSGCLRWFQHRRNRRRRKPQRNLLRNFLVQAFGGCFGRSESPQPKASRSLKVKKVPLAEKRRQMRKEALEKRAQKRAEKKRSKLIDKQLQDEKMGYMCTHRLLLLGAGESGKSTIVKQMRILHVNGFNGEGGEEDPQAARSNSDGEKATKVQDIKNNLKEAIETIVAAMSNLVPPVELANPENQFRVDYILSVMNVPDFDFPPEFYEHAKALWEDEGVRACYERSNEYQLIDCAQYFLDKIDVIKQADYVPSDQDLLRCRVLTSGIFETKFQVDKVNFHMFDVGGQRDERRKWIQCFNDVTAIIFVVASSSYNMVIREDNQTNRLQEALNLFKSIWNNRWLRTISVILFLNKQDLLAEKVLAGKSKIEDYFPEFARYTTPEDATPEPGEDPRVTRAKYFIRDEFLRISTASGDGRHYCYPHFTCAVDTENIRRVFNDCRDIIQRMHLRQYELL

SEQ ID NO: 231265 - DNA, 3114 bp, Artificial Sequence
  derived and/or modified sequence
atgggcgtgcgtaattgtctctatgggaataatatgagcggccagcgggacattccccccgaaattggagagcagcctgaacagccacccctggaagcgcccggtgccgccgcaccaggcgctgggccttctccagcagaagagatggagacagaacctccacataacgaaccaattcctgtggagaatgatggtgaagcatgcgggccccccgaggtatcccggcccaacttccaggtcctcaaccctgccttcagggaggcgggggcccatgggtcatatagtcctccacccgaggaagcaatgccatttgaagccgagcaaccgtctctagggggattttggccaactctagagcaaccaggcttcccgtcgggtgttcacgctggacttgaagcttttggccctgcactgatggagcccggggcatttagtggagccagacccgggctgggcggttactcaccccccccagaggaggccatgccattcgaattcgatcagccggcccagagggggtgctcccagctcctcttacaggtgcccgacctggcaccaggcggccctggagccgcaggggtgcccggagcaccaccagaagagccacaagctctgaggccagccaaggctggcagccgcggaggctactcccctccacctgaggagacaatgcctttcgagctggatggcgagggctttggagatgactcgccaccccccgggttaagtcgcgtgattgcgcaggtcgatgggagctctcaatttgctgccgtggccgcttcttcagctgtaagactaaccccagcggccaatgctcctcccttatgggtacccggggccattgggagcccttcgcaggaggccgtaaggcccccgagcaacttcacaggctcctcgccgtggatggaaatttccggtccgcctttcgagattggcagtgcccctgccggcgtggacgacacacccgtgaacatggactctcctccaatcgctctggacggaccgccaattaaagtctcaggcgcccccgacaagcgggaacgcgctgagaggccgccagttgaagaagaagcggctgagatggaaggagccgctgatgcagcagaggggggtaaagttcctagcccaggttatggcagtccagccgccggtgccgctagcgccgacaccgctgcgagagctgccccggccgcgcccgccgaccctgatagtggcgctacccctgaggaccccgattcgggcacagccccagctgatcctgacagcggggcattcgcagccgaccctgacagcggagctgctcctgccgcgcctgcagatccagacagcggtgctgcccctgacgcaccagcagacccagattccggggcggctccggacgccccagctgatcccgatgcaggggccgcccctgaagccccggctgccccagccgcggcagaaacccgagctgcccatgtggctcccgctgccccggacgccggtgcccctaccgcaccggcggcgtcagctacgcgagcagcccaggtgcggcgggctgcttccgcagcccctgcttctggagctaggagaaaaatccaccttaggcctccaagcccagagattcaggcagctgatccaccaacgccaagaccaaccagggcttccgcatggcggggtaagtcggaatctagtcggggcaggcgcgtttattacgacgaaggcgtggcgagtagcgacgacgattcaagtggagacgagagcgatgatggaacctctggttgcctgagatggtttcagcaccgcagaaaccggcgccggcgcaagccccagcgcaatctgcttaggaacttcctggtacaggccttcggtggctgtttcggacgatcagaatctccacagccaaaggccagccgcagcttgaaagtgaagaaagtgcctctggctgagaagcgacgccagatgagaaaggaagccttagagaaacgggcccagaagcgagccgagaaaaaacggagcaaactgatcgacaaacagttgcaggacgagaaaatgggctatatgtgtacccatcggcttctgctgcttggtgccggcgaaagtggaaagtccaccatcgtgaagcagatgcgcattttgcacgttaacggtttcaatggtgagggtggagaagaggacccgcaagcggctaggtcgaattcagacggagagaaggctacgaaagtacaggacatcaagaacaatctaaaggaagctatcgaaaccatcgtggctgccatgtccaatctggtcccacccgtggagcttgccaaccctgagaaccaattccgcgtggattatattctgtccgtgatgaacgttcctgatttcgactttcctcctgaattctatgaacatgcaaaggctctctgggaggacgagggtgtgcgggcctgctatgaaagatcaaacgagtatcagctgattgactgtgcgcaatactttctggataaaatcgacgttatcaagcaggccgactatgtgccaagcgaccaggatctcctgcggtgccgtgtactcacaagcggcatcttcgaaaccaagtttcaggtagataaagtcaattttcacatgttcgatgtcggaggtcagagggacgaacgcaggaagtggatccagtgctttaacgatgtcaccgctatcatcttcgtggtcgcaagtagttcttataacatggtcattcgcgaggacaatcaaacaaataggctgcaggaagcattgaatttgttcaagtccatttggaacaataggtggctccgtacaatcagcgtgatcctctttctcaacaaacaggacctcctagcggaaaaggtgctggctgggaaatcgaagatcgaggactacttcccggaatttgctaggtacacgacacctgaggacgcgacacccgagcctggcgaagaccctcgcgtgacccgagcaaaatactttatcagagatgagttcctcaggatctccacagcaagcggggacggacggcattattgttaccctcacttcacctgcgccgtggacacggagaatattagacgagtgtttaacgactgtcgtgatatcatacagcgaatgcaccttagacagtacgagctgttatag

SEQ ID NO: 231266 - DNA, 3114 bp, Artificial Sequence
  derived and/or modified sequence
atgggcgtgaggaactgcctgtatggcaacaacatgagcggccagagggacatccccccagagatcggggagcagcctgagcagccccccctggaggcccctggagctgctgcccctggagctggccccagccctgctgaggagatggagacagagcccccccacaatgagcccatccctgtggagaatgatggagaggcctgtggccccccagaggtgtcccggcccaacttccaggtgctgaacccagccttccgggaggccggggcccacggcagctacagccccccacctgaggaggccatgccctttgaggccgagcagcccagcctgggcggcttctggcccaccctggagcagcccggcttccccagcggcgtgcatgctggcctggaggccttcggccctgccctgatggagcccggggccttcagcggggcccggcccggcctgggcggctacagccccccacctgaggaggccatgccctttgaatttgaccagcctgcccagaggggctgcagccagctgctgctgcaggtgcctgacctggcccctgggggccctggagctgctggggtgcctggggcccctcctgaggagccccaggccctgcggcctgccaaggccggcagccggggcggctacagccccccacctgaggagaccatgccctttgagctggatggagagggctttggagatgacagccccccacctggcctgagcagggtcatcgcccaggtggatggcagcagccagtttgctgctgtggccgccagcagcgctgtgcggctgaccccagctgccaatgccccacccctgtgggtgcctggggccatcggcagccccagccaggaggccgtgcggccccccagcaacttcaccggcagcagcccctggatggagatcagcggccccccatttgaaattggcagcgccccagctggggtggatgacacccctgtgaacatggacagcccccccatcgccctggatggcccccccatcaaggtgtctggggccccagacaagcgggagagagctgagcggccccctgtggaggaggaggccgctgagatggagggcgctgctgatgctgctgagggcggcaaggtgcccagccctggctacggcagccctgctgctggagctgccagcgctgacacagctgcccgggccgccccagctgccccagctgaccctgacagcggggccaccccagaagatcctgattctggaacagccccagctgaccctgacagcggggcctttgctgctgaccctgattctggagctgccccagctgccccagctgaccctgattctggagctgccccagatgccccagctgaccctgattctggagctgccccagatgccccagctgaccctgatgctggagctgcccctgaggccccagctgccccagctgctgctgagacccgggccgcccacgtggccccagctgccccagatgctggggcccccacagccccagctgccagcgccaccagggctgcccaggtgagaagagctgccagcgctgccccagccagcggggcccggaggaagatccacctgcggccccccagccctgagatccaggccgctgacccccccaccccccggcccacccgggccagcgcctggaggggcaagtctgagagcagccggggcagaagagtgtactatgatgagggcgtggccagcagtgatgatgacagcagtggagatgaaagtgatgatggcaccagcggctgcctgcgctggttccagcacagaagaaacagaagaagaaggaagccccagaggaacctgctgaggaacttcctggtgcaggccttcggcggctgcttcggccgctctgagagcccccagcccaaggccagccgcagcctgaaggtgaagaaggtgcccctggccgagaagaggcggcagatgaggaaggaggccctggagaagagggcccagaagagagctgagaagaagaggagcaagctgattgacaagcagctgcaggatgagaagatgggctacatgtgcacccaccggctgctgctgctgggcgctggggagagcggcaagagcaccatcgtgaagcagatgaggatcctgcacgtgaatggcttcaacggggagggcggggaggaggacccccaggccgcccggagcaacagtgatggagagaaggccaccaaggtgcaggacatcaagaacaacctgaaggaggccatcgagaccatcgtggccgccatgagcaacctggtgccccctgtggagctggccaaccctgagaaccagttccgggtggactacatcctgtctgtgatgaatgtgcctgactttgacttccccccagagttctatgagcacgccaaggccctgtgggaggatgaaggagtgcgggcctgctatgaaagaagcaatgagtaccagctgattgactgtgcccagtacttcctggacaagattgatgtgatcaagcaggccgactatgtgcccagcgaccaggacctgctgcgctgccgggtgctgaccagcggcatctttgagaccaagttccaggtggacaaggtgaacttccacatgtttgatgtgggcggccagagagatgagaggaggaagtggatccagtgcttcaatgatgtgacagccatcatctttgtggtggccagcagcagctacaacatggtgatccgggaggacaaccagaccaaccggctgcaggaggccctgaacctcttcaagagcatctggaacaaccgctggctgcggaccatcagcgtcatcctcttcctgaacaagcaggacctgctggccgagaaggtgctggccggcaagagcaagattgaggactacttccctgagtttgcccgctacaccaccccagaagatgccaccccagagcctggagaggacccccgggtgacccgggccaagtacttcatcagagatgagttcctgcgcatcagcacagccagcggagatggccgccactactgctacccccacttcacctgtgctgtggacacagagaacatccggcgggtcttcaatgactgccgggacatcatccagaggatgcacctgcggcagtatgagctgctgtag

SEQ ID NO: 231267 - DNA, 3114 bp, Artificial Sequence
  derived and/or modified sequence
atgggcgtgcggaactgcctgtacggcaacaacatgagcggccagcgtgacattccacccgagatcggggagcagcctgagcagcctccactggaggctcccggggccgcagcacccggcgctggccctagcccagccgaggagatggagaccgagcccccccataacgagcctattcccgtggagaacgatggggaggcctgcgggccacctgaagtgagtcgccctaactttcaggttttgaatcctgcgttcagggaagctggtgctcatggaagctattctccgccgcctgaagaagccatgccgttcgaagccgagcagccatctctgggagggttttggcctaccctcgaacaaccagggtttcccagtggggtccacgcaggtctagaagctttcggcccggcactgatggagcccggcgcgttttccggggcacgaccaggtctgggcggttactcaccccctccagaagaagcaatgccctttgagtttgaccagccagcgcaacgcggctgcagtcagcttctacttcaagtgccagaccttgctccagggggacctggcgctgctggcgttcccggagccccccctgaagaaccccaggctcttcgccctgctaaggctgggagcaggggaggatattcaccacctcccgaggagaccatgcctttcgaattagacggcgagggatttggtgatgactctccaccacctggtctctcccgggtgatcgctcaggtcgatggctctagtcaattcgccgctgtggccgcctcatcggcagtgcggctcacccccgcagccaatgcaccacctttgtgggtacccggagcaattggctccccttcacaggaagccgtacgtccaccgagtaattttaccggctcgtccccgtggatggaaatcagtgggcctccttttgagatcggctccgccccagctggagtcgacgataccccagtcaatatggactctccccccattgcactagatggaccacctataaaagtgtcaggggccccggataaaagagaacgggctgagcgcccaccagtggaagaggaggccgcagagatggagggggctgctgacgccgctgagggcgggaaggtgccatctcccgggtatggatcgcctgcggcgggggccgcctctgccgacacagccgcacgcgccgcgccagcagctccagctgacccagattcgggcgcgactccagaagaccccgatagcgggactgcacctgccgaccccgactctggcgctttcgcagccgaccccgatagtggcgcagctcctgcagcaccggctgacccggacagtggggctgctccagacgcccccgccgaccccgacagtggcgcggctcctgacgccccagcagatccggacgccggagctgccccagaggcacctgccgctcccgccgctgcggaaaccagagcagctcatgttgctccagcggcgccagacgccggcgctccaaccgcccccgctgcaagtgcaactcgcgctgcacaggtgaggcgagctgcgagcgctgccccggcatcgggcgctagacgtaaaatacatctccggcccccttctcccgagattcaagctgccgatccgccgactccgcgccctactcgcgccagcgcgtggcgtggcaaaagcgagtcctcgaggggtagacgggtgtattatgatgagggcgttgccagctctgacgacgacagttctggggacgaatccgatgatggtacatcaggctgccttcgctggtttcaacacaggagaaaccgacggcgtcgcaaaccacagagaaaccttcttcggaacttcctggtacaagccttcgggggatgtttcggtagatctgagtccccccagcccaaagctagccggtcccttaaagtgaagaaagttccgctggccgagaaacggaggcagatgcgcaaggaagctcttgaaaaacgcgctcagaagcgcgccgagaaaaagcggagcaaacttatagacaagcagttacaagacgagaagatggggtacatgtgtacccacagactgctgcttctgggcgccggggagagcggcaagagcaccattgttaaacagatgagaattcttcacgtcaatggatttaacggagagggcggagaagaggacccccaggcagcacggagtaactccgacggcgagaaggcaaccaaagttcaggatattaagaataacctcaaggaggccatcgaaaccatcgtggccgccatgtccaacctggtacctcccgtagaactggcgaaccctgagaaccagtttagggttgactatattttgagcgtgatgaacgtgccggatttcgactttccccctgagttctacgagcacgctaaggccctatgggaggatgagggtgtgcgggcttgctacgaacgcagcaatgagtaccaattgattgattgtgcccaatattttctggataagatagatgtcatcaagcaggctgattacgtaccatcagatcaggatttgctgcggtgcagggtcctgacgtccggtatttttgagactaaatttcaggtggacaaggtaaatttccatatgttcgatgtggggggccagagagatgaaagaaggaagtggatccaatgtttcaacgatgtgactgcaattatttttgttgtggccagttctagctataacatggtgatcagagaggacaaccagaccaataggctgcaagaggccctgaacctcttcaaaagcatctggaacaaccgctggctgagaacaatcagtgtgatactgttcctcaacaaacaggatttgctcgccgaaaaagttttggcaggcaaatccaaaatcgaggactatttccctgaattcgccaggtacaccaccccagaggacgcgactcctgagcctggagaggatcccagggtgacccgagctaaatatttcatccgtgacgagttcctgaggatctcgaccgcaagtggcgatgggaggcactattgctaccctcattttacatgcgctgttgacacggagaacatcagacgggtgtttaacgactgtcgtgacatcattcaacgaatgcacctgcgccagtatgaactcctgtag

SEQ ID NO: 231268 - DNA, 3114 bp, Artificial Sequence
  derived and/or modified sequence
atgggggttcgaaattgcctgtacgggaataatatgagcggtcaacgtgatatcccgccagagattggagagcagcccgagcagccacctctggaggcaccaggcgcagccgcacctggggcaggtccttcaccagccgaggaaatggaaaccgaaccaccccataacgaacccatcccggtggaaaacgatggggaggcctgtgggcctcccgaggtcagccgccctaatttccaggtcctcaatccggcatttcgggaggccggagcccacgggtcttattcacctccgcctgaggaggctatgccattcgaagcggaacaaccttctctgggaggattttggcctaccctcgagcagccaggcttccctagtggcgtgcatgccggtcttgaggcattcggccctgccttgatggaaccaggcgctttctcaggagccaggccagggttaggtggttacagccctcctcccgaagaagccatgccattcgagttcgatcagcctgcacagcggggttgtagtcagctgctgctccaggtacccgacctggcccctggtggcccaggagccgcaggtgttccgggtgcacccccagaagagccacaggccctccgcccagcgaaggccggaagccgcggagggtacagtcctcccccagaagaaacaatgcccttcgaactggacggcgagggcttcggtgatgattcacctccgcctggcctgtccagagtgatcgcccaggtggacggaagttcccagttcgccgctgtggctgctagctcagccgtgcgtctgacaccagccgctaacgccccaccactctgggtacctggagcaatcggctccccatcccaggaggcggtgcgaccaccatctaacttcactggctcaagcccttggatggagatctcgggtcccccattcgagatcgggagcgctcccgctggcgtcgacgacactccggtaaacatggacagtcctcccatcgctctggacggacccccaatcaaagtgagtggcgcacctgataagagggagcgagctgagagaccaccagtggaggaggaggccgcagagatggaaggcgcagccgatgcagctgaagggggaaaagtgccctctcctggttacggcagtcctgccgcaggcgctgccagcgctgacactgccgcaagagccgctcctgctgcacccgctgatcctgattcaggtgctaccccggaagacccggatagcggaactgcccctgccgatccagattccggtgcttttgccgcagaccctgatagcggtgccgcacctgctgcccctgccgatcctgactccggagcggcacccgacgcacctgccgaccccgatagcggggctgcccctgacgcaccagcagatccagacgcaggtgccgcacctgaagcgcctgccgctccggctgccgcagagactcgcgctgcccacgttgctccagccgctccggacgctggcgctcctaccgcgccagccgcttctgcaactcgggctgcccaggtgcgcagggccgcatcggcagcccctgcctccggcgctagacgtaaaattcacctgagaccaccatcccctgaaatccaggcggctgatccgcctacccccaggccaaccagggcctccgcgtggcgtgggaagtctgagtctagccgaggcagacgtgtctactacgatgagggcgtcgccagttccgacgacgatagcagtggggacgagtctgatgatggtacttccggctgcttgcggtggtttcagcatcgtcgtaacaggcgccgaaggaagccccaaaggaacctgcttcggaattttttggttcaggccttcggaggatgcttcggccgatccgagagcccccagcccaaagctagcagaagcctgaaggtgaagaaagtccctttggcagaaaagaggaggcagatgagaaaagaggcgttggaaaaacgcgcacaaaaacgagctgaaaaaaaaagatccaagttgatcgataagcagcttcaagatgagaagatggggtacatgtgtactcaccggttgttgctactgggcgcaggagagtctgggaaatccacgatcgttaagcagatgcgaatcttgcacgtaaatggttttaatggagagggcggagaagaagacccacaagcagctcgctccaattcggatggggagaaggcaaccaaagttcaggatattaaaaacaacttaaaggaggcaattgagactattgtagcagccatgagcaacctggttcccccagtagagctggcaaaccccgagaaccagttccgcgtcgattacattctcagcgtgatgaacgtgcctgattttgactttcctcctgaattttacgagcatgccaaagcgttatgggaggacgagggggttcgcgcatgctatgaaagatctaacgaataccagctcatcgactgtgcccaatatttccttgataaaattgacgtgattaagcaggcagattacgtgccatctgaccaggatctcctgagatgtagagtcttgacatctggtattttcgagacgaagtttcaggtggacaaggtgaatttccacatgttcgacgtggggggacagagggatgagcgcaggaagtggatccagtgttttaacgatgtaaccgctatcattttcgtcgtggctagctcatcctacaacatggtgattagggaggataatcaaacaaatcgcctgcaggaagctctgaacctcttcaagtctatatggaataatagatggctcaggactatatctgtgattctgttcctgaacaagcaggacctgctagcggagaaggtcctagccggaaaatccaagatagaggactatttccctgagttcgcaaggtacaccacgccagaagatgcaacaccagagccaggagaggaccctagggtgaccagagccaaatacttcattcgggatgaatttctacgcattagcactgcatccggcgacggacgccattattgttacccacactttacttgtgcagtagataccgagaacataagaagagtgtttaacgattgccgcgatattattcagagaatgcacttgagacagtatgagctgctgtag

SEQ ID NO: 231269 - DNA, 3114 bp, Artificial Sequence
  derived and/or modified sequence
atgggcgtgagaaactgcctgtacggcaacaacatgagcggccagagagacatcccccccgagatcggcgagcagcccgagcagccccccctggaggcccccggcgccgccgcccccggcgccggccccagccccgccgaggagatggagaccgagcccccccacaacgagcccatccccgtggagaacgacggcgaggcctgcggcccccccgaggtgagcagacccaacttccaggtgctgaaccccgccttcagagaggccggcgcccacggcagctacagccccccccccgaggaggccatgcccttcgaggccgagcagcccagcctgggcggcttctggcccaccctggagcagcccggcttccccagcggcgtgcacgccggcctggaggccttcggccccgccctgatggagcccggcgccttcagcggcgccagacccggcctgggcggctacagccccccccccgaggaggccatgcccttcgagttcgaccagcccgcccagagaggctgcagccagctgctgctgcaggtgcccgacctggcccccggcggccccggcgccgccggcgtgcccggcgccccccccgaggagccccaggccctgagacccgccaaggccggcagcagaggcggctacagccccccccccgaggagaccatgcccttcgagctggacggcgagggcttcggcgacgacagccccccccccggcctgagcagagtgatcgcccaggtggacggcagcagccagttcgccgccgtggccgccagcagcgccgtgagactgacccccgccgccaacgccccccccctgtgggtgcccggcgccatcggcagccccagccaggaggccgtgagaccccccagcaacttcaccggcagcagcccctggatggagatcagcggcccccccttcgagatcggcagcgcccccgccggcgtggacgacacccccgtgaacatggacagcccccccatcgccctggacggcccccccatcaaggtgagcggcgcccccgacaagagagagagagccgagagaccccccgtggaggaggaggccgccgagatggagggcgccgccgacgccgccgagggcggcaaggtgcccagccccggctacggcagccccgccgccggcgccgccagcgccgacaccgccgccagagccgcccccgccgcccccgccgaccccgacagcggcgccacccccgaggaccccgacagcggcaccgcccccgccgaccccgacagcggcgccttcgccgccgaccccgacagcggcgccgcccccgccgcccccgccgaccccgacagcggcgccgcccccgacgcccccgccgaccccgacagcggcgccgcccccgacgcccccgccgaccccgacgccggcgccgcccccgaggcccccgccgcccccgccgccgccgagaccagagccgcccacgtggcccccgccgcccccgacgccggcgcccccaccgcccccgccgccagcgccaccagagccgcccaggtgagaagagccgccagcgccgcccccgccagcggcgccagaagaaagatccacctgagaccccccagccccgagatccaggccgccgacccccccacccccagacccaccagagccagcgcctggagaggcaagagcgagagcagcagaggcagaagagtgtactacgacgagggcgtggccagcagcgacgacgacagcagcggcgacgagagcgacgacggcaccagcggctgcctgagatggttccagcacagaagaaacagaagaagaagaaagccccagagaaacctgctgagaaacttcctggtgcaggccttcggcggctgcttcggcagaagcgagagcccccagcccaaggccagcagaagcctgaaggtgaagaaggtgcccctggccgagaagagaagacagatgagaaaggaggccctggagaagagagcccagaagagagccgagaagaagagaagcaagctgatcgacaagcagctgcaggacgagaagatgggctacatgtgcacccacagactgctgctgctgggcgccggcgagagcggcaagagcaccatcgtgaagcagatgagaatcctgcacgtgaacggcttcaacggcgagggcggcgaggaggacccccaggccgccagaagcaacagcgacggcgagaaggccaccaaggtgcaggacatcaagaacaacctgaaggaggccatcgagaccatcgtggccgccatgagcaacctggtgccccccgtggagctggccaaccccgagaaccagttcagagtggactacatcctgagcgtgatgaacgtgcccgacttcgacttcccccccgagttctacgagcacgccaaggccctgtgggaggacgagggcgtgagagcctgctacgagagaagcaacgagtaccagctgatcgactgcgcccagtacttcctggacaagatcgacgtgatcaagcaggccgactacgtgcccagcgaccaggacctgctgagatgcagagtgctgaccagcggcatcttcgagaccaagttccaggtggacaaggtgaacttccacatgttcgacgtgggcggccagagagacgagagaagaaagtggatccagtgcttcaacgacgtgaccgccatcatcttcgtggtggccagcagcagctacaacatggtgatcagagaggacaaccagaccaacagactgcaggaggccctgaacctgttcaagagcatctggaacaacagatggctgagaaccatcagcgtgatcctgttcctgaacaagcaggacctgctggccgagaaggtgctggccggcaagagcaagatcgaggactacttccccgagttcgccagatacaccacccccgaggacgccacccccgagcccggcgaggaccccagagtgaccagagccaagtacttcatcagagacgagttcctgagaatcagcaccgccagcggcgacggcagacactactgctacccccacttcacctgcgccgtggacaccgagaacatcagaagagtgttcaacgactgcagagacatcatccagagaatgcacctgagacagtacgagctgctgtag

SEQ ID NO: 231270 - protein, 380 aa, Artificial Sequence
  derived and/or modified sequence
MGCLGNSKTEDQRNEEKAQREANKKIEKQLQKDKQVYRATHRLLLLGAGESGKSTIVKQMRILHVNGFNGDSEKATKVQDIKNNLKEAIETIVAAMSNLVPPVELANPENQFRVDYILSVMNVPDFDFPPEFYEHAKALWEDEGVRACYERSNEYQLIDCAQYFLDKIDVIKQADYVPSDQDLLRCRVLTSGIFETKFQVDKVNFHMFDVGGQRDERRKWIQCFNDVTAIIFVVASSSYNMVIREDNQTNRLQEALNLFKSIWNNRWLRTISVILFLNKQDLLAEKVLAGKSKIEDYFPEFARYTTPEDATPEPGEDPRVTRAKYFIRDEFLRISTASGDGRHYCYPHFTCAVDTENIRRVFNDCRDIIQRMHLRQYELL

SEQ ID NO: 231271 - DNA, 1143 bp, Artificial Sequence
  derived and/or modified sequence
atgggctgtttgggtaactccaaaacggaggatcaacggaatgaggaaaaggcccagagagaagcgaataagaagattgaaaagcagctgcagaaggataaacaggtttaccgcgctacccatcgtctcttgctgttgggcgctggcgagtccgggaagagcacgattgtcaagcagatgcgcatactccacgtgaacggtttcaatggcgatagcgaaaaagctaccaaggtccaagatatcaagaataacctgaaggaagcaattgaaacaatcgtcgccgccatgtctaatctggtccctcccgtggaactggctaatcctgaaaatcagttccgcgttgattacatactctcggtcatgaatgtgcccgacttcgatttccccccggagttctacgagcacgcaaaagccctgtgggaagatgagggcgtgagagcatgctacgagcggagcaatgagtaccaactcatcgactgcgcccagtactttctggacaaaatcgacgtcatcaagcaggcagattatgtgccttctgaccaggatctgctgcgctgccgcgtcctaacctccggcatatttgaaactaaattccaggtggacaaagttaactttcacatgtttgacgtcgggggacagagagatgaaagaagaaagtggatccagtgttttaacgacgtaactgccatcatcttcgtagttgcctcctcctcctacaacatggtgataagggaggacaaccagacaaatagactccaggaagcattgaacctgtttaaatccatctggaataataggtggctgcgtaccatttccgtgattctttttctgaataagcaggaccttttggcggaaaaagtactggccggaaagagcaaaatcgaggactactttcccgaattcgcacgctatactactcccgaagatgccacgcctgaaccaggcgaagatccgagagtgacacgcgccaaatactttattcgggacgagttcttgcgcattagcaccgctagtggagacggccgccattactgctatcctcattttacatgcgcggtagacaccgagaatatacgtagggtctttaacgattgcagggatattattcagaggatgcacttgaggcaatacgagctgctctag

SEQ ID NO: 231272 - DNA, 1143 bp, Artificial Sequence
  derived and/or modified sequence
atgggctgcttgggaaactccaagaccgaggatcagcgcaacgaagagaaggctcagagggaagccaataagaagattgagaagcaattacaaaaggacaaacaagtgtatagggccactcatcgcctgctgctactcggcgccggcgaaagcggcaagtcaacaatagtaaagcagatgcgcattttacacgtgaacgggtttaatggggattctgaaaaggcaacaaaagtccaggatattaagaataatctcaaagaggccatcgagaccatcgtcgcggcaatgagcaacttggtgccccctgtggagctcgccaatccagaaaatcagttcagagtcgactacattctctctgtaatgaacgttccagacttcgatttcccgcctgagttttacgagcacgcaaaagctctatgggaagatgagggggtgcgcgcctgttacgagcgaagcaatgagtaccaattgatcgattgcgcacaatacttcctggacaagatcgacgtgatcaaacaagccgattatgtaccatcagatcaggaccttcttagatgccgggtcctgacctctggcatctttgagaccaaattccaggtggacaaggtgaacttccatatgtttgatgtgggcgggcagcgcgacgagcggcgcaaatggatccagtgtttcaacgatgtcaccgccatcatctttgtggtggctagctcttcctacaatatggttatccgggaggacaatcagacaaatcgcctccaggaagcattgaatttgtttaaaagcatttggaacaatcgttggttgaggaccatctcagtgatactctttctcaataagcaggatttacttgctgagaaggtgcttgcgggtaaatctaaaattgaggattactttcctgagttcgcaaggtatacaacccctgaggatgctacgcctgagccgggcgaagacccccgcgttaccagagcgaagtacttcatacgggatgaattcttgaggatatccaccgcaagtggggacggcagacactattgttacccccactttacctgcgcagttgataccgagaacataaggagagttttcaacgattgtcgggatatcattcagagaatgcacctgcgacagtacgaactgttatag

SEQ ID NO: 231273 - DNA, 1642 bp, Artificial Sequence
  derived and/or modified sequence
cagcggcggcagcagctcccgcagctcctgctctggtccgcctcggcccggcggcggccatcagccccctcggcctcggctcgaggggcggggagctgcgcgcgcccctcggtccgaccgacaccctccccttcccgcccccatgggctgcctcgggaacagtaagaccgaggaccagcgcaacgaggagaaggcgcagcgtgaggccaacaaaaagatcgagaagcagctgcagaaggacaagcaggtctaccgggccacgcaccgcctgctgctgctgggtgctggagaatctggtaaaagcaccattgtgaagcagatgaggatcctgcatgttaatgggtttaatggagacagtgagaaggcaaccaaagtgcaggacatcaaaaacaacctgaaagaggcgattgaaaccattgtggccgccatgagcaacctggtgccccccgtggagctggccaaccccgagaaccagttcagagtggactacatcctgagtgtgatgaacgtgcctgactttgacttccctcccgaattctatgagcatgccaaggctctgtgggaggatgaaggagtgcgtgcctgctacgaacgctccaacgagtaccagctgattgactgtgcccagtacttcctggacaagatcgacgtgatcaagcaggctgactatgtgccgagcgatcaggacctgcttcgctgccgtgtcctgacttctggaatctttgagaccaagttccaggtggacaaagtcaacttccacatgtttgacgtgggtggccagcgcgatgaacgccgcaagtggatccagtgcttcaacgatgtgactgccatcatcttcgtggtggccagcagcagctacaacatggtcatccgggaggacaaccagaccaaccgcctgcaggaggctctgaacctcttcaagagcatctggaacaacagatggctgcgcaccatctctgtgatcctgttcctcaacaagcaagatctgctcgctgagaaagtccttgctgggaaatcgaagattgaggactactttccagaatttgctcgctacactactcctgaggatgctactcccgagcccggagaggacccacgcgtgacccgggccaagtacttcattcgagatgagtttctgaggatcagcactgccagtggagatgggcgtcactactgctaccctcatttcacctgcgctgtggacactgagaacatccgccgtgtgttcaacgactgccgtgacatcattcagcgcatgcaccttcgtcagtacgagctgctctaagaagggaacccccaaatttaattaaagccttaagcacaattaattaaaagtgaaacgtaattgtacaagcagttaatcacccaccatagggcatgattaacaaagcaacctttcccttcccccgagtgattttgcgaaacccccttttcccttcagcttgcttagatgttccaaatttagaaagcttaaggcggcctacagaaaaaggaaaaaaggccacaaaagttccctctcactttcagtaaaaataaataaaacagcagcagcaaacaaataaaatgaaataaaagaaacaaatgaaataaatattgtgttgtgcagcattaaaaaaaatcaaaataaaaattaaatgtgagc

SEQ ID NO: 231274 - DNA, 1931 bp, Artificial Sequence
  derived and/or modified sequence
ctcgccgccgccgcctcctcctccccccgcctccccccgcccgccgcggcgcttttggctcggggcggcggcgggggcccggccgaggcaataagagcggcggcggcggcagcggcggcagcagctcccgcagctcctgctctggtccgcctcggcccggcggcggccatcagccccctcggcctcggctcgaggggcggggagctgcgcgcgcccctcggtccgaccgacaccctccccttcccgcccgtccgcgcgccccgcggcccgcggcccgcagtccgccccgcgcgctccttgccgaggagccgagcccgcgcccggcccgcccgcccggcgctgccccggccctcccggcccgcgtgaggccgcccgcgcccgccgccgccgcagcccggccgcgccccgccgccgccgccgccgccatgggctgcctcgggaacagtaagaccgaggaccagcgcaacgaggagaaggcgcagcgtgaggccaacaaaaagatcgagaagcagctgcagaaggacaagcaggtctaccgggccacgcaccgcctgctgctgctgggtgctggagaatctggtaaaagcaccattgtgaagcagatgaggatcctgcatgttaatgggtttaatggagacagtgagaaggcaaccaaagtgcaggacatcaaaaacaacctgaaagaggcgattgaaaccattgtggccgccatgagcaacctggtgccccccgtggagctggccaaccccgagaaccagttcagagtggactacatcctgagtgtgatgaacgtgcctgactttgacttccctcccgaattctatgagcatgccaaggctctgtgggaggatgaaggagtgcgtgcctgctacgaacgctccaacgagtaccagctgattgactgtgcccagtacttcctggacaagatcgacgtgatcaagcaggctgactatgtgccgagcgatcaggacctgcttcgctgccgtgtcctgacttctggaatctttgagaccaagttccaggtggacaaagtcaacttccacatgtttgacgtgggtggccagcgcgatgaacgccgcaagtggatccagtgcttcaacgatgtgactgccatcatcttcgtggtggccagcagcagctacaacatggtcatccgggaggacaaccagaccaaccgcctgcaggaggctctgaacctcttcaagagcatctggaacaacagatggctgcgcaccatctctgtgatcctgttcctcaacaagcaagatctgctcgctgagaaagtccttgctgggaaatcgaagattgaggactactttccagaatttgctcgctacactactcctgaggatgctactcccgagcccggagaggacccacgcgtgacccgggccaagtacttcattcgagatgagtttctgaggatcagcactgccagtggagatgggcgtcactactgctaccctcatttcacctgcgctgtggacactgagaacatccgccgtgtgttcaacgactgccgtgacatcattcagcgcatgcaccttcgtcagtacgagctgctctaagaagggaacccccaaatttaattaaagccttaagcacaattaattaaaagtgaaacgtaattgtacaagcagttaatcacccaccatagggcatgattaacaaagcaacctttcccttcccccgagtgattttgcgaaacccccttttcccttcagcttgcttagatgttccaaatttagaaagcttaaggcggcctacagaaaaaggaaaaaaggccacaaaagttccctctcactttcagtaaaaataaataaaacagcagcagcaaacaaataaaatgaaataaaagaaacaaatgaaataaatattgtgttgtgcagcattaaaaaaaatcaaaataaaaattaaatgtgagcaaagaa

SEQ ID NO: 231275 - DNA, 1143 bp, Artificial Sequence
  derived and/or modified sequence
atgggctgcctgggcaacagcaagacagaggaccagagaaatgaggagaaggcccagcgggaggccaacaagaagattgagaagcagctgcagaaggacaagcaggtgtaccgggccacccaccggctgctgctgctgggcgctggggagagcggcaagagcaccatcgtgaagcagatgaggatcctgcacgtgaatggcttcaatggagacagcgagaaggccaccaaggtgcaggacatcaagaacaacctgaaggaggccatcgagaccatcgtggccgccatgagcaacctggtgccccctgtggagctggccaaccctgagaaccagttccgggtggactacatcctgtctgtgatgaatgtgcctgactttgacttccccccagagttctatgaacatgccaaggccctgtgggaggatgagggcgtgcgggcctgctatgaaagaagcaatgagtaccagctgattgactgtgcccagtacttcctggacaagattgatgtgatcaagcaggccgactatgtgcccagcgaccaggacctgctgcgctgccgggtgctgaccagcggcatctttgagaccaagttccaggtggacaaggtgaacttccacatgtttgatgtgggcggccagagagatgaaagaaggaagtggatccagtgcttcaatgatgtgacagccatcatctttgtggtggccagcagcagctacaacatggtgatccgggaggacaaccagaccaaccggctgcaggaggccctgaacctcttcaagagcatctggaacaaccgctggctgcggaccatcagcgtcatcctcttcctgaacaagcaggacctgctggccgagaaggtgctggccggcaagagcaagattgaggactacttccctgagtttgcccgctacaccaccccagaagatgccaccccagagcccggggaggacccccgggtgacccgggccaagtacttcatcagagatgagttcctgcgcatcagcacagccagcggagatggccgccactactgctacccccacttcacctgtgctgtggacacagagaacatcagaagagtcttcaatgactgccgggacatcatccagaggatgcacctgcggcagtatgagctgctgtag

SEQ ID NO: 231276 - DNA, 1143 bp, Artificial Sequence
  derived and/or modified sequence
atgggctgcctgggcaacagcaagaccgaggaccagcggaacgaggaaaaggctcagcgcgaggcaaacaagaagatcgaaaagcagctgcaaaaggacaagcaggtgtatcgggcaacacacagactgttgctccttggagcgggcgaaagtggtaagtcgaccatcgtgaaacagatgcggattttgcacgtgaatggtttcaacggggattcagagaaggccaccaaggtgcaagacatcaaaaataacctgaaggaagctatcgagacaatagtggccgccatgtcaaaccttgtccctcctgtggagctggccaatccagagaaccagtttcgcgtcgactatatcctttcagtcatgaatgtccctgatttcgactttccccctgaattttatgagcacgccaaggccctgtgggaggatgagggggttcgagcctgctacgagcgtagtaacgagtatcaactgattgactgcgcccagtacttcctcgacaagatcgacgtgattaaacaagccgactatgtgccaagtgatcaggaccttctacggtgccgggtgttgacttctggcatcttcgaaactaagtttcaggtggacaaggtcaactttcatatgtttgatgtagggggccagagagatgagcgcaggaagtggattcagtgcttcaacgatgtaacggccatcatctttgtcgtggcctcttcatcctacaacatggtgataagagaggataatcagacaaacaggctccaagaagcccttaatcttttcaagtccatatggaataacaggtggctgagaacgatctccgtgatactcttcctgaacaagcaggacctcctggccgaaaaggtgctggcaggtaaatctaagatagaagattatttccccgaatttgctcggtacactacaccagaagacgcaaccccagaaccaggcgaggacccaagagtcacaagagcaaaatatttcattcgggacgagttcctccgcatctccacagcaagtggcgacgggcgccactactgctaccctcatttcacctgtgcagtagacacggagaatattcgccgtgtgttcaatgactgccgtgacattattcagagaatgcatctgagacagtacgagctgttgtag

SEQ ID NO: 231277 - DNA, 1143 bp, Artificial Sequence
  derived and/or modified sequence
atgggctgcctgggcaacagcaagaccgaggaccagcggaacgaggagaaggcacaaagagaggctaataaaaaaatagaaaagcagttgcaaaaggacaagcaagtctatcgagccactcatcgcctgctgctcttgggcgcaggcgagagcgggaaaagcaccatagtgaagcaaatgagaatacttcacgtcaatggattcaacggcgatagcgagaaggctactaaagttcaagacatcaagaataacttgaaagaagccattgaaaccatcgtcgcagcgatgagtaatctggtccctcccgtggagctggcaaatccggagaatcagtttcgggtggactacatcctgtccgtgatgaatgtcccagactttgatttcccgcccgagttttacgaacatgccaaagccctttgggaggatgagggcgtccgcgcatgctatgagaggagcaatgaatatcagctcatagactgtgcacagtactttctagacaagatcgatgtcatcaagcaggcggactatgtcccaagcgatcaggatctcctgcggtgtagggtgctcacgagcggaatctttgagactaagttccaggttgacaaggttaattttcacatgttcgacgtcggaggacagcgcgatgagcggagaaagtggatccaatgcttcaacgacgtgactgccattatttttgttgtcgcctcatcttcctacaacatggtgatccgagaagataaccagaccaaccgtctgcaggaagccctgaatctgttcaagtcgatctggaataaccgctggttgcgcacgatatccgtgatactgttcttgaacaaacaagatctgctcgcggaaaaggtacttgccgggaagtccaagatcgaggactacttccctgaatttgcccggtatactaccccagaagatgccacccctgaacctggcgaggaccctagagtcacccgggctaagtattttattcgggatgagtttctcaggatcagcactgcatctggagatggacgacactactgttacccacatttcacatgcgccgttgacacggagaacatcagacgagtttttaacgattgtagggacattattcagcgcatgcatttgcgccagtacgagctcctgtag

SEQ ID NO: 231278 - DNA, 1143 bp, Artificial Sequence
  derived and/or modified sequence
atggggtgcttggggaatagcaagaccgaggatcaacgcaacgaggagaaggcccagcgggaggctaataagaaaattgagaagcagctgcagaaagataagcaagtgtaccgcgctacccaccgcctgctccttcttggcgcaggcgagagcgggaaaagcaccattgttaagcagatgcgaatcctccacgttaatgggttcaatggtgactctgaaaaagcaaccaaagtgcaggacatcaagaacaacctgaaggaggccatcgaaaccatcgtggcagccatgtctaacctggtgccgccagtggaactggcgaacccggaaaaccagtttcgagtagactacattctttctgtaatgaacgtgccagactttgactttccacccgagttctatgaacacgccaaagctctatgggaggacgaaggcgttcgggcttgctacgagcgctcaaacgaataccagctaatcgattgcgcccagtactttctcgacaaaattgacgtgattaaacaggctgattacgtaccatctgatcaggatcttctcagatgtcgggtgctgacgtcagggattttcgagacaaagtttcaagtagataaggtcaactttcacatgttcgacgtcggaggacaacgggatgagcgtagaaagtggatacagtgttttaatgatgtaaccgccatcatattcgtggttgccagttccagttataatatggtaatccgagaggacaatcagacaaacagattacaagaggcattgaacctcttcaagtccatttggaacaaccgttggctgcgcacgattagcgtaatcctgttcctgaacaaacaagaccttttagccgaaaaggttttggctggcaagtcaaagatcgaggactatttcccagagttcgccagatacaccactccggaagatgcaacaccagagcccggtgaggaccctagggtgacaagagcgaagtacttcatccgcgacgagtttcttaggatctctaccgcctccggagacggacgtcactactgttacccacacttcacatgtgccgtcgacacagagaatatccgccgagtatttaatgattgtcgcgacataattcagcgcatgcacctgagacagtatgagttgttgtag

SEQ ID NO: 231279 - DNA, 1143 bp, Artificial Sequence
  derived and/or modified sequence
atggggtgtctcgggaactcaaagactgaagaccaaagaaatgaagaaaaggcccagcgtgaagctaataagaagattgaaaagcagctgcagaaggataaacaggtgtaccgggctactcataggctgctgctgttgggcgctggagagtccgggaaatctactatcgtgaaacagatgaggatcctccatgtcaatggctttaacggggattctgaaaaagctacaaaagttcaagacatcaagaacaatctaaaagaggctattgagaccatcgtcgccgctatgtctaacctcgtcccacccgtggaattggcgaatcccgaaaaccagtttagggtagattacattcttagtgtgatgaacgttcccgatttcgacttcccccctgaattttacgagcacgctaaggccttatgggaggacgaaggagtgcgggcttgctacgagagatccaacgaatatcagctaatcgactgcgcccagtacttcttggataagattgacgtgattaaacaggctgattacgtcccatccgaccaggacctgctgcgatgtcgggtactgacctctggaatctttgagacaaagttccaggtggataaggtgaatttccacatgtttgacgtgggaggacagcgtgatgagcgaagaaagtggatccaatgtttcaacgatgtcacagcaataatctttgttgtagcctccagttcatataatatggtgatcagggaggacaatcagacaaaccgactgcaggaggctctcaaccttttcaagtcaatctggaacaaccggtggctgagaacaattagtgtgattctgtttttaaataaacaggatctgttagccgaaaaagtgcttgcaggaaagtccaaaatcgaggattattttccagagtttgctaggtatactactccggaggacgctacaccagaacccggtgaggaccccagagtgactcgggctaaatactttatccgtgatgagtttttaaggatcagtaccgcttctggtgatggacggcattactgctatccacatttcacctgtgctgttgataccgagaacatcagaagggtgttcaacgactgccgagacattatccagcgcatgcacctgcggcagtatgagctgctttag

SEQ ID NO: 231280 - DNA, 1143 bp, Artificial Sequence
  derived and/or modified sequence
atgggctgcctgggcaacagcaagaccgaggaccagagaaacgaggagaaggcccagagagaggccaacaagaagatcgagaagcagctgcagaaggacaagcaggtgtacagagccacccacagactgctgctgctgggcgccggcgagagcggcaagagcaccatcgtgaagcagatgagaatcctgcacgtgaacggcttcaacggcgacagcgagaaggccaccaaggtgcaggacatcaagaacaacctgaaggaggccatcgagaccatcgtggccgccatgagcaacctggtgccccccgtggagctggccaaccccgagaaccagttcagagtggactacatcctgagcgtgatgaacgtgcccgacttcgacttcccccccgagttctacgagcacgccaaggccctgtgggaggacgagggcgtgagagcctgctacgagagaagcaacgagtaccagctgatcgactgcgcccagtacttcctggacaagatcgacgtgatcaagcaggccgactacgtgcccagcgaccaggacctgctgagatgcagagtgctgaccagcggcatcttcgagaccaagttccaggtggacaaggtgaacttccacatgttcgacgtgggcggccagagagacgagagaagaaagtggatccagtgcttcaacgacgtgaccgccatcatcttcgtggtggccagcagcagctacaacatggtgatcagagaggacaaccagaccaacagactgcaggaggccctgaacctgttcaagagcatctggaacaacagatggctgagaaccatcagcgtgatcctgttcctgaacaagcaggacctgctggccgagaaggtgctggccggcaagagcaagatcgaggactacttccccgagttcgccagatacaccacccccgaggacgccacccccgagcccggcgaggaccccagagtgaccagagccaagtacttcatcagagacgagttcctgagaatcagcaccgccagcggcgacggcagacactactgctacccccacttcacctgcgccgtggacaccgagaacatcagaagagtgttcaacgactgcagagacatcatccagagaatgcacctgagacagtacgagctgctgtag

SEQ ID NO: 231281 - protein, 301 aa, Artificial Sequence
  derived and/or modified sequence
MVFTQAPAEIMGHLRIRSLLARQCLAEFLGVFVLMLLTQGAVAQAVTSGETKGNFFTMFLAGSLAVTIAIYVGGNVSGAHLNPAFSLAMCIVGRLPWVKLPIYILVQLLSAFCASGATYVLYHDALQNYTGGNLTVTGPKETASIFATYPAPYLSLNNGFLDQVLGTGMLIVGLLAILDRRNKGVPAGLEPVVVGMLILALGLSMGANCGIPLNPARDLGPRLFTYVAGWGPEVFSAGNGWWWVPVVAPLVGATVGTATYQLLVALHHPEGPEPAQDLVSAQHKASELETPASAQMLECKL

SEQ ID NO: 231282 - protein, 264 aa, Artificial Sequence
  derived and/or modified sequence
MVFTQAPAEIMGHLRIRSLLARQCLAEFLGVFVLMLLTQGAVAQAVTSGETKGNFFTMFLAGSLAVTIAIYVGGNVSGAHLNPAFSLAMCIVGRLPWVKLPIYILVQLLSAFCASGATYVLYHDALQNYTGGNLTVTGPKETASIFATYPAPYLSLNNGFLDQVLGTGMLIVGLLAILDRRNKGVPAGLEPVVVGMLILALGLSMGANCGIPLNPARDLGPRLFTYVAGWGPEVFRWETDSPGAGLHSPSSAKGSVPGSTALCL

SEQ ID NO: 231283 - DNA, 906 bp, Artificial Sequence
  derived and/or modified sequence
atggtgttcacccaggcccccgccgagatcatgggccacctgagaatcagaagcctgctggccagacagtgcctggccgagttcctgggcgtgttcgtgctgatgctgctgacccagggcgccgtggcccaggccgtgaccagcggcgagaccaagggcaacttcttcaccatgttcctggccggcagcctggccgtgaccatcgccatctacgtgggcggcaacgtgagcggcgcccacctgaaccccgccttcagcctggccatgtgcatcgtgggcagactgccctgggtgaagctgcccatctacatcctggtgcagctgctgagcgccttctgcgccagcggcgccacctacgtgctgtaccacgacgccctgcagaactacaccggcggcaacctgaccgtgaccggccccaaggagaccgccagcatcttcgccacctaccccgccccctacctgagcctgaacaacggcttcctggaccaggtgctgggcaccggcatgctgatcgtgggcctgctggccatcctggacagaagaaacaagggcgtgcccgccggcctggagcccgtggtggtgggcatgctgatcctggccctgggcctgagcatgggcgccaactgcggcatccccctgaaccccgccagagacctgggccccagactgttcacctacgtggccggctggggccccgaggtgttcagcgccggcaacggctggtggtgggtgcccgtggtggcccccctggtgggcgccaccgtgggcaccgccacctaccagctgctggtggccctgcaccaccccgagggccccgagcccgcccaggacctggtgagcgcccagcacaaggccagcgagctggagacccccgccagcgcccagatgctggagtgcaagctgtag

SEQ ID NO: 231284 - DNA, 795 bp, Artificial Sequence
  derived and/or modified sequence
atggtgttcacccaggcccccgccgagatcatgggccacctgagaatcagaagcctgctggccagacagtgcctggccgagttcctgggcgtgttcgtgctgatgctgctgacccagggcgccgtggcccaggccgtgaccagcggcgagaccaagggcaacttcttcaccatgttcctggccggcagcctggccgtgaccatcgccatctacgtgggcggcaacgtgagcggcgcccacctgaaccccgccttcagcctggccatgtgcatcgtgggcagactgccctgggtgaagctgcccatctacatcctggtgcagctgctgagcgccttctgcgccagcggcgccacctacgtgctgtaccacgacgccctgcagaactacaccggcggcaacctgaccgtgaccggccccaaggagaccgccagcatcttcgccacctaccccgccccctacctgagcctgaacaacggcttcctggaccaggtgctgggcaccggcatgctgatcgtgggcctgctggccatcctggacagaagaaacaagggcgtgcccgccggcctggagcccgtggtggtgggcatgctgatcctggccctgggcctgagcatgggcgccaactgcggcatccccctgaaccccgccagagacctgggccccagactgttcacctacgtggccggctggggccccgaggtgttcagatgggagaccgacagccccggcgccggcctgcacagccccagcagcgccaagggcagcgtgcccggcagcaccgccctgtgcctgtag

SEQ ID NO: 231285 - DNA, 906 bp, Artificial Sequence
  derived and/or modified sequence
atggtttttacacaagccccagctgaaattatgggccatctgcggataagatccctgctggccaggcagtgtctcgctgagttcctgggggtttttgtccttatgcttttgactcaaggcgctgtggcccaggccgtgacttccggcgagacaaaggggaacttcttcacaatgttccttgccggcagtctggccgtcacgatcgccatctatgttggggggaatgtctccggagcccatcttaatccagcctttagcctggcaatgtgcatcgtggggaggcttccatgggtgaagctccctatctatatcctggtgcagctgctgagcgccttctgcgcttccggcgcgacatatgtgctctaccatgatgccctacagaattacaccgggggcaatttaacagtcactggtccgaaggagacggccagcatcttcgcgacttaccctgccccatatctgtcattaaacaatggattcctcgatcaagtcctcgggactggaatgctcattgttggactgctggctatcctggatagaagaaacaagggtgtacccgccggactcgagccagttgtggtcggcatgctcatcctggctcttggcctatctatgggtgctaactgcggtatccccctcaatccagcccgagacctagggccacgactctttacctacgtggcgggctggggaccagaggtgttcagcgccgggaacgggtggtggtgggtgcccgtcgtcgccccattggtgggcgccactgttggaaccgccacctaccagctgcttgtagccttgcatcatccagaggggcccgagcctgctcaggatctagtgagcgctcagcataaggcctccgaactggaaacccccgcaagcgcgcagatgctggagtgcaagctctag

SEQ ID NO: 231286 - DNA, 795 bp, Artificial Sequence
  derived and/or modified sequence
atggtcttcacccaggccccagccgaaattatgggtcatctaaggattcgtagcctgctggcacgtcagtgtctagctgaattcctgggcgttttcgtgctcatgctactgacccaaggcgctgtggcgcaggcagtcacgtctggggagacaaaggggaatttttttaccatgtttctagctgggagcctggctgtaactattgccatttacgtaggaggcaatgtgtcgggggcccatctgaaccccgctttctccttggccatgtgcattgtagggaggctaccatgggttaagctgcctatttacatcttggtgcagctgctctccgcattttgtgcgagcggtgccacatacgttctttaccatgatgccctgcagaactatacaggcgggaatctcaccgtcaccggtcctaaggagacagcttccatcttcgctacataccccgctccctacctgagcttgaataacggtttcctggatcaggtccttgggaccggcatgctgatcgtgggattgctggcaattctcgaccggagaaacaagggcgttccggccggcctcgagcccgtggttgtggggatgctgatcctagccctgggcctgtctatgggagctaactgcggcatcccattaaaccccgcgcgcgatttgggacccaggctgttcacatatgtcgctggatggggccccgaagtgttcagatgggaaacagattcccccggtgctggtttgcattccccaagttccgccaagggctccgtccctggctcgaccgcactctgcttgtag

SEQ ID NO: 231287 - DNA, 906 bp, Artificial Sequence
  derived and/or modified sequence
atggtgttcacccaggccccagctgagatcatgggccacctgcgcatccgcagcctgctggcccggcagtgcctggccgagttcctgggcgtgtttgtgctgatgctgctgacccagggcgctgtggcccaggccgtgaccagcggggagaccaagggcaacttcttcaccatgttcctggccggcagcctggccgtgaccatcgccatctacgtgggcggcaatgtgtctggggcccacctgaacccagccttcagcctggccatgtgcatcgtgggccgcctgccctgggtgaagctgcccatctacatcctggtgcagctgctgagcgccttctgtgccagcggggccacctacgtgctgtaccatgatgccctgcagaactacacaggaggcaacctgactgtgacaggccccaaggagacagccagcatctttgccacctacccagccccctacctgagcctgaacaacggcttcctggaccaggtgctgggcaccggcatgctgattgtgggcctgctggccatcctggacagaagaaataaaggagtgcctgctggcctggagcctgtggtggtgggcatgctgatcctggccctgggcctgtccatgggcgccaactgtggcatccccctgaacccagcccgggacctgggccccaggctcttcacctacgtggccggctggggccctgaggtgttttctgctggaaatggctggtggtgggtgcctgtggtggcccccctggtgggcgccaccgtgggcacagccacctaccagctgctggtggccctgcaccaccctgagggccctgagcccgcccaggacctggtgtctgcccagcacaaggccagcgagctggagaccccagccagcgcccagatgctggagtgcaagctgtag

SEQ ID NO: 231288 - DNA, 795 bp, Artificial Sequence
  derived and/or modified sequence
atggtgttcacccaggccccagctgagatcatgggccacctgcgcatccgcagcctgctggcccggcagtgcctggccgagttcctgggcgtgtttgtgctgatgctgctgacccagggcgctgtggcccaggccgtgaccagcggggagaccaagggcaacttcttcaccatgttcctggccggcagcctggccgtgaccatcgccatctacgtgggcggcaatgtgtctggggcccacctgaacccagccttcagcctggccatgtgcatcgtgggccgcctgccctgggtgaagctgcccatctacatcctggtgcagctgctgagcgccttctgtgccagcggggccacctacgtgctgtaccatgatgccctgcagaactacacaggaggcaacctgactgtgacaggccccaaggagacagccagcatctttgccacctacccagccccctacctgagcctgaacaacggcttcctggaccaggtgctgggcaccggcatgctgattgtgggcctgctggccatcctggacagaagaaataaaggagtgcctgctggcctggagcctgtggtggtgggcatgctgatcctggccctgggcctgtccatgggcgccaactgtggcatccccctgaacccagcccgggacctgggccccaggctcttcacctacgtggccggctggggccctgaggtgttccgctgggagacagacagccctggggccggcctgcacagccccagcagcgccaagggctctgtgcccggcagcacagccctgtgcctgtag

SEQ ID NO: 231289 - DNA, 906 bp, Artificial Sequence
  derived and/or modified sequence
atggtgttcacccaggcccccgccgagatcatgggccacctgcggatccgttctctgctggcgcggcaatgcctggccgaattcctgggagttttcgttcttatgctgttaactcagggggccgtcgcgcaggccgtgacctcaggtgaaactaagggtaacttctttacaatgttcctcgctggcagtcttgctgtaactatcgcaatttatgtgggaggcaacgtctccggagcacacttaaatcccgcattctctctggctatgtgcatcgtagggagactcccctgggtgaaactgcctatctatatcctggtgcagttattaagcgctttttgtgcatcaggtgctacatatgtgctgtaccatgacgccctgcagaattatacggggggcaatttgacagtgaccggccctaaggaaaccgcctcaatctttgctacttatcctgctccctatctgtccctgaataacggtttcctggaccaggttctgggtactggtatgctgattgtggggctgctcgcaatcctggatcggagaaacaagggcgttccagcgggtttagagcccgtagtggtgggcatgctgatcctagcactcggcctgtccatgggagccaactgtgggatacccctgaaccccgctagggacttaggaccgcgcttgtttacttatgttgcaggctgggggccagaggtgttctctgcaggaaatggatggtggtgggtgcccgtggtggcgcctctagtgggtgccaccgttggtaccgcaacttatcagctattagtcgccctgcatcaccccgaaggaccagaacccgctcaagatctcgtcagcgcccagcataaggcttctgaattagagactccagccagtgcccagatgttggagtgcaaactttag

SEQ ID NO: 231290 - DNA, 795 bp, Artificial Sequence
  derived and/or modified sequence
atggtgttcacccaggcccccgccgagatcatgggccacctgcggattcggtcattgctggccaggcagtgtctggctgagtttctcggcgtctttgtgcttatgctcttaacacagggggcagtggcgcaggctgtcacatccggagagactaagggcaattttttcacaatgttcctggcagggtccttggccgtgactattgccatctatgttggcggcaatgtgtcaggcgcccaccttaacccagctttttccctggcaatgtgcattgtggggcgtcttccttgggtcaagttacccatttacatcttggtccagttgctctctgccttttgtgcttctggggcaacctatgtcctgtaccatgatgcccttcaaaactacacaggtggcaatttgaccgtcacagggcctaaagagacagcttccattttcgctacatatcctgctccatacctgtccctcaataacggttttctggaccaggtactgggaaccggtatgctaatcgtgggcctactagcaatccttgaccgtcgcaacaagggagtccccgcgggactcgaacctgtcgtcgtggggatgctaatcttggcgctcggactatcgatgggagccaattgcggaatcccactcaatcctgctagagatcttggcccccgactgttcacctatgtggcaggatgggggcctgaggtgtttaggtgggaaactgatagccctggcgccgggctccattctccttcatcggccaaagggagtgtaccgggatctaccgctctttgcctatag

SEQ ID NO: 231291 - DNA, 1791 bp, Artificial Sequence
  derived and/or modified sequence
agacagagggagcagtgaatagcaatagggtgtttccaccatggtcttcactcaggccccggctgaaatcatgggccacctccggatacgcagcctcctggcccggcagtgcctggcagagtttctgggtgtgtttgtactcatgctcctcacccaaggagctgtggcccaggctgtcaccagtggagaaaccaaaggcaacttcttcaccatgtttctggctggctctctggccgttacgatagccatctacgtgggtggtaacgtctcaggggcccacctgaatccagccttctccctggccatgtgcatcgttggacgcctcccctgggtcaagctccccatttacatcttggtgcagttgctgtctgctttctgtgcttcgggagccacctatgttctctaccatgatgccctacagaactatacaggtgggaacctgacagtgactggccccaaggagacagcctccatttttgccacctatcctgccccctatctgtccctgaacaatggcttcctggatcaggttctgggcactgggatgctgattgtggggctcttggccatcctggacagacggaacaagggagtccctgcgggtctggagcctgtggtggtggggatgctgatcctggccctcgggttatccatgggtgccaactgcgggattccactcaaccctgcccgggacctgggcccacgtctcttcacctacgtggctggctggggtcctgaagtcttcagtgctggtaatggctggtggtgggtgcctgtggtggcccctctggtgggggccaccgttggcacagccacttaccagctgttggtggctctgcaccaccctgagggcccagagccagctcaggatctggtgtctgctcaacacaaagcctcagagttggaaactcctgcctcagctcagatgctggagtgtaagctatgattaggacaaccctcacttcactcatggaccctggagccagccactgaccccgcctgggaacaacagtcattcttcctctttgttaatgtgccagaacctgggaggcttctctgtttatctgtttggcatcccttcctcctaaactaagaaggatcctggacagggagaagtggaggaggataaggtaccaggactcaggcttctcatcccctcctcccgcaaagcggttttctgaccctcagggcctctcggaatgtagttgctcgaggtaaccgctagagggtgcgcacctggatgctggatggggacggctgcgggcatctgcagggtggagggggccaccatccagtgtagggcacaaccctggggactgccctccatagcctgtcccgactgccgactcctagctctcatcgcctcggcgcctcccaccttcaccctctcggggatgcctccccaagagggtagttaggggtggggaagccgcctccacccagggggcgtggtgggggcggagggaaggagggcggcggggcacagagacagagagcaaggctgtgaaactgaggcaccgttcctagacatctcggtgctgtgtcgttcattcaaggagagttgagatacagtgaaatgagccagggcgaggagggagggtgaaggaacggagggcgggcggctccgaggagcgagagtcgggctgagggcaacctggcgccagggaaaattctggttattcaccacttctacagctctcctgccgctccctgcagaggatgctcgttttgcagagaaggcagtgttcctctattcccttcttccgaattaaaaataccccctcagagcga

SEQ ID NO: 231292 - DNA, 2262 bp, Artificial Sequence
  derived and/or modified sequence
agagggagcagtgaatagcaatagggtgtttccaccatggtcttcactcaggccccggctgaaatcatgggccacctccggatacgcagcctcctggcccggcagtgcctggcagagtttctgggtgtgtttgtactcatgctcctcacccaaggagctgtggcccaggctgtcaccagtggagaaaccaaaggcaacttcttcaccatgtttctggctggctctctggccgttacgatagccatctacgtgggtggtaacgtctcaggggcccacctgaatccagccttctccctggccatgtgcatcgttggacgcctcccctgggtcaagctccccatttacatcttggtgcagttgctgtctgctttctgtgcttcgggagccacctatgttctctaccatgatgccctacagaactatacaggtgggaacctgacagtgactggccccaaggagacagcctccatttttgccacctatcctgccccctatctgtccctgaacaatggcttcctggatcaggttctgggcactgggatgctgattgtggggctcttggccatcctggacagacggaacaagggagtccctgcgggtctggagcctgtggtggtggggatgctgatcctggccctcgggttatccatgggtgccaactgcgggattccactcaaccctgcccgggacctgggcccacgtctcttcacctacgtggctggctggggtcctgaagtcttcaggtgggagacagactctcctggtgctggcctccactcaccttcctctgctaagggctctgtccctgggtccacagcactctgcctttaaaatagctctcttggcttcttaggacagtgttctttctccaagtcatattctccccctttctcccttgcttccctcccaacttttcactgaaacagtaagatttagaggttgtgttcttaggcatgccacattacttccatgcacattagtgacttcatcagcaaaattaatatattcagataattccctaaggcaagaggctggaccaagctctcctggggttccctcttctaaatactatgctttggtgacaaggcaatcctcttcctggtgtctaccaccctgggaacaactttagggcactctcttgttactgccccccgtccttggagaggggaaggctaagggagtcactcctgataccttcccactgtccttcttttgcagtgctggtaatggctggtggtgggtgcctgtggtggcccctctggtgggggccaccgttggcacagccacttaccagctgttggtggctctgcaccaccctgagggcccagagccagctcaggatctggtgtctgctcaacacaaagcctcagagttggaaactcctgcctcagctcagatgctggagtgtaagctatgattaggacaaccctcacttcactcatggaccctggagccagccactgaccccgcctgggaacaacagtcattcttcctctttgttaatgtgccagaacctgggaggcttctctgtttatctgtttggcatcccttcctcctaaactaagaaggatcctggacagggagaagtggaggaggataaggtaccaggactcaggcttctcatcccctcctcccgcaaagcggttttctgaccctcagggcctctcggaatgtagttgctcgaggtaaccgctagagggtgcgcacctggatgctggatggggacggctgcgggcatctgcagggtggagggggccaccatccagtgtagggcacaaccctggggactgccctccatagcctgtcccgactgccgactcctagctctcatcgcctcggcgcctcccaccttcaccctctcggggatgcctccccaagagggtagttaggggtggggaagccgcctccacccagggggcgtggtgggggcggagggaaggagggcggcggggcacagagacagagagcaaggctgtgaaactgaggcaccgttcctagacatctcggtgctgtgtcgttcattcaaggagagttgagatacagtgaaatgagccagggcgaggagggagggtgaaggaacggagggcgggcggctccgaggagcgagagtcgggctgagggcaacctggcgccagggaaaattctggttattcaccacttctacagctctcctgccgctccctgcagaggatgctcgttttgcagagaaggcagtgttcctctattcccttcttccgaattaaaaataccccctcagagcga

SEQ ID NO: 231293 - DNA, 906 bp, Artificial Sequence
  derived and/or modified sequence
atggtgttcactcaggccccagcagagatcatggggcacttgaggattaggtcactgctcgcacggcaatgcctagccgaatttctcggcgtcttcgtgctgatgctactaactcagggagccgtcgcccaggcagtgaccagcggagagacaaagggcaacttctttacgatgttcctcgcaggctccttggctgtgactatcgccatttacgtcgggggtaatgtatctggcgcacacctcaaccccgcattttccctcgctatgtgtattgttggacgcctcccttgggtaaaacttcctatttatatcctagtgcaactgctttctgccttttgcgcttcaggggctacatatgtcctctaccacgacgctctgcagaattacactggagggaatctcaccgtcaccggtccgaaggaaacagccagtatttttgcgacttatcccgctccttacctgagcctcaataacgggtttttggaccaggtgctggggacagggatgcttatcgtgggcctcctcgctatcttggatcggaggaacaagggcgttccagccggactcgagcccgtcgtggtggggatgctcatcctggccctcggcctgtctatgggggctaattgcggaatccccctcaacccggcaagagacctcggccctcggctttttacatatgtcgcgggatggggtcctgaggtcttttcagccggaaacggctggtggtgggtgccagttgtcgcccctctggtgggcgcaaccgtggggactgccacttatcagctgctcgtagctctgcaccacccggaagggcctgagcctgcccaggatttagtgtctgcccagcataaagcgagtgagctcgagactcctgcttccgcccaaatgcttgaatgtaaactatag

SEQ ID NO: 231294 - DNA, 795 bp, Artificial Sequence
  derived and/or modified sequence
atggtgttcactcaagcacctgctgaaattatgggtcatttgcgcattagaagtttactggcacggcagtgtttagcagagttcctgggtgtatttgtcctcatgctgctgacccagggggctgtcgcccaggcggtgacctctggggagacaaagggaaacttctttacgatgtttctagctggatctctggcggtcactattgccatatacgtggggggaaacgtttcgggcgcacatttgaacccagcctttagtctcgccatgtgcatcgtcggccgactgccgtgggtgaaactgcccatatacatcctggtgcaattgctgtctgccttttgcgctagtggtgctacatacgtgctctaccacgatgctctccagaactacaccggtggtaacctgacagtgacaggccctaaggaaaccgcatcgattttcgccacctaccccgctccatacctaagtctgaataacggatttctggatcaggtgttagggacgggcatgctgattgtggggctgctcgccattttagatagaagaaacaagggggtgcccgcaggccttgagccagtggtggtgggcatgctgatattggcactcgggctgtcgatgggcgcaaattgtggtatacctctaaatcccgctcgggatctggggccacggctcttcacatacgtcgcaggttggggcccagaggtgttccgctgggagactgactcgccaggcgctgggctccattctcctagctcagccaagggatccgtccccggaagcacagccctgtgtttgtag

SEQ ID NO: 231295 - protein, 435 aa, Artificial Sequence
  derived and/or modified sequence
MAAPLVLVLVVAVTVRAALFRSSLAEFISERVEVVSPLSSWKRVVEGLSLLDLGVSPYSGAVFHETPLIIYLFHFLIDYAELVFMITDALTAIALYFAIQDFNKVVFKKQKLLLELDQYAPDVAELIRTPMEMRYIPLKVALFYLLNPYTILSCVAKSTCAINNTLIAFFILTTIKGSAFLSAIFLALATYQSLYPLTLFVPGLLYLLQRQYIPVKMKSKAFWIFSWEYAMMYVGSLVVIICLSFFLLSSWDFIPAVYGFILSVPDLTPNIGLFWYFFAEMFEHFSLFFVCVFQINVFFYTIPLAIKLKEHPIFFMFIQIAVIAIFKSYPTVGDVALYMAFFPVWNHLYRFLRNIFVLTCIIIVCSLLFPVLWHLWIYAGSANSNFFYAITLTFNVGQILLISDYFYAFLRREYYLTHGLYLTAKDGTEAMLVLK

SEQ ID NO: 231296 - protein, 415 aa, Artificial Sequence
  derived and/or modified sequence
MAAPLVLVLVVAVTVRAALFRSSLAEFISERVEVVSPLSSWKRVVEGLSLLDLGVSPYSGAVFHEITDALTAIALYFAIQDFNKVVFKKQKLLLELDQYAPDVAELIRTPMEMRYIPLKVALFYLLNPYTILSCVAKSTCAINNTLIAFFILTTIKGSAFLSAIFLALATYQSLYPLTLFVPGLLYLLQRQYIPVKMKSKAFWIFSWEYAMMYVGSLVVIICLSFFLLSSWDFIPAVYGFILSVPDLTPNIGLFWYFFAEMFEHFSLFFVCVFQINVFFYTIPLAIKLKEHPIFFMFIQIAVIAIFKSYPTVGDVALYMAFFPVWNHLYRFLRNIFVLTCIIIVCSLLFPVLWHLWIYAGSANSNFFYAITLTFNVGQILLISDYFYAFLRREYYLTHGLYLTAKDGTEAMLVLK

SEQ ID NO: 231297 - protein, 170 aa, Artificial Sequence [sequence omitted]

SEQ ID NO: 231298 - protein, 423 aa, Artificial Sequence
  derived and/or modified sequence
MAAPLVLVLVVAVTVRAALFRSSLAEFISERVEVVSPLSSWKRVVEGLSLLDLGVSPYSGAVFHETPLIIYLFHFLIDYAELVFMITDALTAIALYFAIQDFNKVVFKKQKLLLELDQYAPDVAELIRTPMEMRYIPLKVALFYLLNPYTILSCVAKSTCAINNTLIAFFILTTIKGSAFLSAIFLALATYQSLYPLTLFVPGLLYLLQRQYIPVKMKSKAFWIFSWEYAMMYVGSLVVIICLSFFLLSSWDFIPAVYGFILSVPDLTPNIGLFWYFFAEMFEHFSLFFVCVFQINVFFYTIPLAIKLKEHPIFFMFIQIAVIAIFKSYPTVGDVALYMAFFPVWNHLYRFLRNIFVLTCIIIVCSLLFPVLWHLWIYAGSANSNFFYAITLTFNVGQMGFCGDRMAGTCPEAIRAAGDRTPS

SEQ ID NO: 231299 - DNA, 1308 bp, Artificial Sequence
  derived and/or modified sequence
atggccgcgcccctcgtgctggtgcttgtggtggctgtaacagtgcgcgcggccctcttcaggtcaagtctcgccgagttcatcagtgaaagggtggaggtggtgtcaccactgagttcttggaagagagtggtggagggcctctcccttctcgatttaggtgtatcgccatactccggagctgtgtttcatgaaaccccactaattatctaccttttccactttctaatcgactacgccgagctggtttttatgataactgatgccctgaccgcgatcgccctgtactttgccatccaggacttcaataaggtggtgttcaagaaacagaaactgttgctagagctggaccaatacgcacccgatgtcgctgaactgatccgcactccgatggagatgcggtatatacccttgaaggttgcgttattctatcttctgaatccctatacaatactttcgtgtgtcgcaaagagtacctgcgccatcaataatacgctgatagccttttttattctgactactattaaaggttcggcctttctgtctgctatcttcctggccctggccacataccaatctctttatccgttgacgctgtttgtgcccggactcctgtatctcctgcagcgtcagtatatcccagtcaagatgaagagcaaagccttctggatcttctcatgggagtacgctatgatgtatgtcggcagcttagtggttatcatttgtttgtccttcttcctattatcgagctgggacttcatccccgcagtgtatgggtttatcttgagcgtgcccgacctgacccccaatatagggctgttttggtactttttcgccgagatgttcgagcatttttccctgttctttgtttgcgttttccagatcaacgtcttcttctataccatcccgctggctatcaagctgaaggagcaccccattttcttcatgttcatccaaatcgccgttatcgcaatctttaagtcctatcctacagtcggagatgtcgcgttatatatggctttcttccctgtgtggaaccacctctacaggtttctacgcaacatcttcgtgttgacatgtatcattattgtgtgttctctgctctttcccgtgctctggcatctttggatttacgccgggagcgctaattcaaatttcttctatgccatcaccctcactttcaacgtcggtcagattctattaatcagtgattatttctacgcatttctgcgtagggagtactacttaactcacggcctgtacctgaccgctaaagacggaactgaggccatgctagtcctcaaatag

SEQ ID NO: 231300 - DNA, 1248 bp, Artificial Sequence
  derived and/or modified sequence
atggccgctcctctggtactcgttctagtggtggcagtaacggtcagggcagccctgttccggagctctctcgccgaattcatctccgaaagagtcgaagtggtgagcccactgtcttcctggaagcgggtagttgaaggactcagtcttctggaccttggcgtgagcccatatagcggagcagtcttccatgagatcactgacgccctgactgccatcgctctgtacttcgcaatccaggacttcaacaaggtggtgttcaagaagcagaagctgctactggagctcgaccagtacgccccggacgtggcagagcttattcggacaccaatggaaatgaggtatatccccctcaaagtggcattattttatctactgaatccctacacaattttgtcttgcgtggctaagtctacatgtgcaatcaacaacactctaatcgcattctttatcctgacaaccatcaagggctcagccttcttatcagccattttcctggctctggctacatatcagtctctgtaccctctgaccctgttcgtgcctggtcttctctacttgttgcagcgccaatatattcctgtaaagatgaaatccaaggccttttggatcttttcctgggaatacgctatgatgtacgtgggatccctcgtcgttatcatttgcttgagcttctttctgttgagtagttgggactttattccagctgtctatggctttattcttagtgtgcctgatctcacacctaatatcgggctattctggtatttctttgctgagatgtttgagcactttagtctgttttttgtttgcgtgttccagattaatgtctttttttacacaatccctttggctatcaaactcaaggagcaccctattttttttatgttcatccagatcgcggtgatcgccattttcaaatcctacccaactgttggtgatgttgcgctatacatggccttttttcctgtgtggaatcacctgtataggttcttgagaaacattttcgtcctaacatgtataataatcgtttgttccctcttgtttcctgtgctctggcacctctggatctacgccggatccgctaatagcaatttcttttatgccatcacactgacgtttaatgtcggtcagattcttctgatcagtgactacttctatgcgttcctccgtcgggagtattatctcactcacggtctgtacctaacagccaaagatggcactgaggctatgcttgtcctcaaatag

SEQ ID NO: 231301 - DNA, 1272 bp, Artificial Sequence
  derived and/or modified sequence
atggcagcacccctggtgctggtgttagttgttgcagtgaccgttcgcgctgctctattccggtccagtctcgctgaattcatcagtgagagggtggaggtagtttcgcccctatccagctggaagagagttgtggagggcctttccctgcttgatctaggcgtttcaccatactccggggcggttttccatgagactccactgatcatatatcttttccacttcctaattgactacgctgagcttgttttcatgataactgatgcattgacggctatagccctgtattttgccattcaggattttaacaaagtcgtgtttaagaaacaaaagcttttgctggaacttgatcagtacgcgcccgatgtggcagagctaattaggaccccaatggagatgcgctatattcccctgaaagtagcactcttttaccttctgaatccgtacaccatcctgtcctgcgtggccaaatctacttgtgccattaataataccctaatcgcattcttcattctaacaaccatcaaggggtctgcttttctttctgccatcttcctggctctcgccacataccaaagtctctacccactgacactatttgtgcctgggttgttgtatctgctccagaggcagtacatcccagtgaagatgaagtccaaggcattctggattttcagctgggagtatgccatgatgtacgttggctctctggtggtcatcatatgtttgtccttcttcttgctctcatcatgggactttatccccgccgtctacggtttcatcttgtcagtaccagatctaacccctaatattggactcttctggtacttttttgccgagatgtttgagcatttcagcttgttctttgtttgtgtctttcagatcaacgtgtttttttacaccatccccctagccattaagcttaaggagcaccccatattcttcatgttcatccaaattgccgtgattgctattttcaaatcatatcctacagtcggcgacgtcgccctgtatatggcctttttccctgtctggaaccacttatacagatttctgcgcaatatatttgtgctcacatgcatcataatcgtgtgttctctattgttccccgttctttggcacctttggatttacgctggtagtgccaattctaacttcttttacgcgattaccttaacctttaacgtggggcagatgggcttctgcggagatcgaatggctggaacctgtcctgaggccatccgggcggcaggcgaccgaactccatcatag

SEQ ID NO: 231302 - DNA, 1308 bp, Artificial Sequence
  derived and/or modified sequence
atggccgcccccctggtgctggtgctggtggtggccgtgacagtgcgggccgccctcttccgcagcagcctggccgagttcatcagcgagcgggtggaggtggtgagccccctgagctcctggaagagggtggtggagggcctgagcctgctggacctgggcgtgagcccctacagcggggctgtgttccacgagacccccctcatcatctacctgttccacttcctgattgattatgcagagctggtgttcatgatcacagatgccctgacagccatcgccctgtactttgccatccaggacttcaacaaggtggtgttcaagaagcagaagctgctgctggagctggaccagtatgccccagatgtggccgagctgatccgcacccccatggagatgagatacatccccctgaaggtggccctcttctacctgctgaacccctacaccatcctgagctgtgtggccaagagcacctgtgccatcaacaacaccctgattgccttcttcatcctgaccaccatcaagggcagcgccttcctgagcgccatcttcctggccctggccacctaccagagcctgtaccccctgaccctgtttgtgcccggcctgctgtacctgctgcagaggcagtacatccctgtgaagatgaagagcaaggccttctggatcttctcctgggagtatgccatgatgtatgtgggcagcctggtggtgatcatctgcctgtccttcttcctgctgagctcctgggacttcatcccagctgtgtatggcttcatcctgtctgtgcctgacctgacccccaacatcggcctcttctggtacttctttgctgagatgtttgagcacttcagcctcttctttgtgtgtgtgttccagatcaacgtgttcttctacaccatccccctggccatcaagctgaaggagcaccccatcttcttcatgttcatccagattgctgtgattgccatcttcaagagctaccccaccgtgggagatgtggccctgtacatggccttcttccctgtgtggaaccacctgtaccgcttcctgaggaacatctttgtgctgacctgcatcatcatcgtgtgcagcctgctcttccctgtgctgtggcacctgtggatctatgccggcagcgccaacagcaacttcttctacgccatcaccctgaccttcaacgtgggccagatcctgctgatcagtgactacttctacgccttcctgcggcgggagtactacctgacccacggcctgtacctgacagccaaggatggaacagaggccatgctggtgctgaagtag

SEQ ID NO: 231303 - DNA, 1248 bp, Artificial Sequence
  derived and/or modified sequence
atggccgcccccctggtgctggtgctggtggtggccgtgacagtgcgggccgccctcttccgcagcagcctggccgagttcatcagcgagcgggtggaggtggtgagccccctgagctcctggaagagggtggtggagggcctgagcctgctggacctgggcgtgagcccctacagcggggctgtgttccacgagatcacagatgccctgacagccatcgccctgtactttgccatccaggacttcaacaaggtggtgttcaagaagcagaagctgctgctggagctggaccagtatgccccagatgtggccgagctgatccgcacccccatggagatgagatacatccccctgaaggtggccctcttctacctgctgaacccctacaccatcctgagctgtgtggccaagagcacctgtgccatcaacaacaccctgattgccttcttcatcctgaccaccatcaagggcagcgccttcctgagcgccatcttcctggccctggccacctaccagagcctgtaccccctgaccctgtttgtgcccggcctgctgtacctgctgcagaggcagtacatccctgtgaagatgaagagcaaggccttctggatcttctcctgggagtatgccatgatgtatgtgggcagcctggtggtgatcatctgcctgtccttcttcctgctgagctcctgggacttcatcccagctgtgtatggcttcatcctgtctgtgcctgacctgacccccaacatcggcctcttctggtacttctttgctgagatgtttgagcacttcagcctcttctttgtgtgtgtgttccagatcaacgtgttcttctacaccatccccctggccatcaagctgaaggagcaccccatcttcttcatgttcatccagattgctgtgattgccatcttcaagagctaccccaccgtgggagatgtggccctgtacatggccttcttccctgtgtggaaccacctgtaccgcttcctgaggaacatctttgtgctgacctgcatcatcatcgtgtgcagcctgctcttccctgtgctgtggcacctgtggatctatgccggcagcgccaacagcaacttcttctacgccatcaccctgaccttcaacgtgggccagatcctgctgatcagtgactacttctacgccttcctgcggcgggagtactacctgacccacggcctgtacctgacagccaaggatggaacagaggccatgctggtgctgaagtag

SEQ ID NO: 231304 - DNA, 1272 bp, Artificial Sequence
  derived and/or modified sequence
atggccgcccccctggtgctggtgctggtggtggccgtgacagtgcgggccgccctcttccgcagcagcctggccgagttcatcagcgagcgggtggaggtggtgagccccctgagctcctggaagagggtggtggagggcctgagcctgctggacctgggcgtgagcccctacagcggggctgtgttccacgagacccccctcatcatctacctgttccacttcctgattgattatgcagagctggtgttcatgatcacagatgccctgacagccatcgccctgtactttgccatccaggacttcaacaaggtggtgttcaagaagcagaagctgctgctggagctggaccagtatgccccagatgtggccgagctgatccgcacccccatggagatgagatacatccccctgaaggtggccctcttctacctgctgaacccctacaccatcctgagctgtgtggccaagagcacctgtgccatcaacaacaccctgattgccttcttcatcctgaccaccatcaagggcagcgccttcctgagcgccatcttcctggccctggccacctaccagagcctgtaccccctgaccctgtttgtgcccggcctgctgtacctgctgcagaggcagtacatccctgtgaagatgaagagcaaggccttctggatcttctcctgggagtatgccatgatgtatgtgggcagcctggtggtgatcatctgcctgtccttcttcctgctgagctcctgggacttcatcccagctgtgtatggcttcatcctgtctgtgcctgacctgacccccaacatcggcctcttctggtacttctttgctgagatgtttgagcacttcagcctcttctttgtgtgtgtgttccagatcaacgtgttcttctacaccatccccctggccatcaagctgaaggagcaccccatcttcttcatgttcatccagattgctgtgattgccatcttcaagagctaccccaccgtgggagatgtggccctgtacatggccttcttccctgtgtggaaccacctgtaccgcttcctgaggaacatctttgtgctgacctgcatcatcatcgtgtgcagcctgctcttccctgtgctgtggcacctgtggatctatgccggcagcgccaacagcaacttcttctacgccatcaccctgaccttcaacgtgggccagatgggcttctgtggggacaggatggccggcacctgcccagaggccatccgggctgctggggacaggacccccagctag

SEQ ID NO: 231305 - DNA, 1308 bp, Artificial Sequence
  derived and/or modified sequence
atggccgcccccctggtgctggtgctggtggtggccgtgaccgtgcgggctgcactgtttcgctcttccctggccgaattcatctccgaaagagtggaagtggtttccccactgtcttcttggaaaagggtcgtagaaggcctcagtctgttagaccttggagtatcgccttacagtggcgccgtcttccatgaaacaccgctcataatctacctatttcacttcctgatcgactacgccgaactggtgtttatgatcaccgatgctctgacggccattgcgctttatttcgccatacaggacttcaataaagtggtttttaagaaacagaaactcctcctcgagctcgaccagtacgctcctgatgttgccgagctcattcgcacccctatggaaatgcggtatattcccttgaaggtcgcactgttctacctgttgaacccctacactattttatcctgcgtggcaaagtctacatgcgctataaataatacccttatcgcctttttcatcctgacaaccattaaaggtagcgccttcttatctgccattttccttgccctcgcaacctatcagagcttgtatcctctcactctgttcgtgccggggctgctctacttactgcagcgtcagtatataccagtgaagatgaagtctaaagcgttttggattttttcctgggagtatgcaatgatgtacgtcggatcgcttgtggtgattatctgcctttctttcttcctgctgagctcctgggattttatcccagcggtgtacggctttatcctgagcgtgcctgacctgactccgaacatcgggctgttttggtatttcttcgccgaaatgtttgagcacttctctctcttcttcgtgtgcgtgttccagattaacgtgttcttctacacaatcccactggccatcaagcttaaggagcatccgatattctttatgttcatccagatcgccgttattgccattttcaaaagttaccccacagtgggcgatgtggctctctacatggcctttttccctgtatggaatcatctataccgatttttgaggaacatcttcgtgttgacttgtatcattattgtttgctccctccttttccccgtgctgtggcacctgtggatctacgcagggtccgccaactcgaatttcttctacgccattacattaacttttaacgtgggacaaatcctgctgatttctgactatttctacgcgttcttgaggagagagtattacttgacacatgggctctacctgacggctaaagatggaacggaggctatgctggttctcaagtag

SEQ ID NO: 231306 - DNA, 1248 bp, Artificial Sequence
  derived and/or modified sequence
atggccgcccccctggtgctggtgctggtggtggccgtgaccgtgcgcgctgccctctttcgttcatcccttgccgagttcatctccgaaagggtagaagtggtttccccattgagttcttggaagagagtggtagagggtttgtccttactggatctcggagtctcgccctacagtggcgctgtgttccacgaaatcaccgacgcactaactgccatcgccttgtactttgccatccaggacttcaataaggtggtgttcaaaaaacagaagctcttgttagaactcgatcagtatgcacccgatgtggccgaactgatccggactcccatggaaatgaggtacataccactgaaggtggcattgttctatctactgaatccttacacgattctgtcctgcgtcgcaaagtcaacatgcgccatcaacaatacactcatcgcattctttattctcacgaccatcaagggttctgctttcctgtccgcaatttttcttgcgctggccacttaccagtcactgtaccccttaaccctgttcgtgcccggcctgctgtatctgctgcagcgccagtatatacccgtgaaaatgaagagcaaggccttctggatttttagctgggagtacgccatgatgtacgtcggcagcctggtcgtaattatctgtctgtccttcttcttgctgagctcttgggatttcatccccgccgtttatggttttattctgagtgttcccgatctgacaccgaacatcggactgttctggtactttttcgctgaaatgttcgagcacttcagtctcttcttcgtgtgcgtctttcaaattaacgtcttcttttatacgattcctctggccataaagctgaaagagcaccccattttcttcatgttcatccagatcgctgtcatcgctatctttaagtcctaccctacagtcggagatgtggcgctgtatatggccttctttcctgtgtggaaccacctgtacaggttcctccgtaacatctttgtgctgacgtgcattatcatcgtgtgtagcctgctgttccccgtgttgtggcatctgtggatttacgcaggaagcgccaacagtaatttcttctatgcgatcactctgacttttaacgtgggacagatcctgcttatttcagactatttttacgcttttctaaggagagagtactacctcacccacggtctatatctgactgccaaagacggcacagaggcaatgttggtgctcaagtag

SEQ ID NO: 231307 - DNA, 1272 bp, Artificial Sequence
  derived and/or modified sequence
atggccgcccccctggtgctggtgctggtggtggccgtgaccgtgcgcgccgctctgttcaggtcttcactggcagagtttattagcgagagagtggaagtcgttagtccactctcgagttggaaacgcgtcgtggaaggcctctcactgctggatctcggagtgtccccatacagcggtgcagtctttcatgagacgcccctgataatctatctgtttcactttctgatcgactacgcagagctcgtatttatgattactgatgcccttacggccattgcactgtattttgctatacaggattttaacaaagtggtctttaaaaagcagaagcttctccttgagcttgaccaatatgctcccgacgtggcggaactcatcagaacacccatggagatgaggtacatacccctgaaagttgcactgttttatttgctgaacccatacaccatactgtcttgtgttgccaagagcacgtgcgcaatcaataacactctgattgccttcttcatcttaaccacaattaagggcagtgccttcctctctgcgatatttctggctctcgctacataccagtctctgtaccctttgacattgtttgtgccgggactcttgtacctgctgcaaagacaatatatccccgtcaaaatgaaaagcaaagcgttctggattttctcctgggaatacgctatgatgtacgtgggtagtctcgtggtgattatctgcctatcgtttttcctcctgtcatcatgggattttatcccggcggtgtatggatttatacttagcgttcctgaccttaccccaaacattggccttttctggtacttctttgcagagatgttcgagcattttagtctttttttcgtgtgtgtatttcagatcaacgtgttcttctatactattccgctcgccatcaaacttaaagaacaccctatatttttcatgtttattcaaatagccgttatagctatcttcaagtcctaccctacagtgggagatgtcgcactgtatatggccttttttccagtctggaatcatctctatcgctttttacgtaatatcttcgtgctaacctgtataattattgtctgcagcctcctctttccggtcctttggcatctgtggatctatgctggcagcgctaatagcaacttcttctatgccatcacactgacgtttaacgtaggacaaatgggattttgcggcgataggatggctggcacctgccccgaggcgataagagcagccggcgacaggaccccctcctag

SEQ ID NO: 231308 - DNA, 1308 bp, Artificial Sequence
  derived and/or modified sequence
atggctgcacccttggtattggtgctggtggtggcagtgaccgtccgagctgctctatttaggtcatcactagctgagttcatctcggaacgggtggaggttgtcagtcccttgagctcatggaagagagttgtggaaggacttagcttgctggatcttggcgtgtcgccttactcgggggcagtatttcacgagactcccttaatcatctatctgttccattttctaattgattatgctgagcttgtgtttatgatcacggatgccctcacagcaatagcgttatatttcgctattcaggacttcaataaagttgtcttcaagaagcagaagctcttactagagcttgaccagtacgcccctgatgtggcagagctcatccgaactccaatggaaatgcggtacattcctttgaaagtcgccctgttttatctccttaacccctacaccattctgtcttgcgtggccaaatcaacctgcgccatcaacaatactctcatcgcctttttcatcttgaccacaatcaagggttcagcctttttgtcagcaatctttcttgcacttgcaacatatcaatcactgtaccctctgacgctctttgttccaggactgctttacctgttgcaaagacaatatattccagtgaaaatgaagagcaaagcgttctggatattctcatgggaatatgcaatgatgtacgtgggcagtctggtagtgattatctgtctttcatttttcctcctgtcctcttgggatttcatccccgcagtgtacggatttatcttgagtgtaccggatctgacaccgaacatcggactgttctggtactttttcgccgagatgtttgaacatttctccctgttttttgtatgtgtctttcaaattaatgtgtttttttacactatcccattagccatcaaactgaaagaacatcctatctttttcatgttcatccagattgctgtcatcgcaatctttaaatcctatcccaccgtgggcgacgtggccctgtatatggcattcttcccagtctggaaccacctttaccggtttctccgcaacatcttcgtactaacgtgtatcatcatcgtgtgttccctcttatttccagttctctggcatctctggatctacgctggcagtgccaacagcaactttttctacgctatcaccctgaccttcaatgtgggccagatcctgttgataagcgattatttttacgcttttctgagacgtgaatactatctgacccacggtctgtacttgacggccaaggatggtaccgaagccatgttagtgctaaagtag

SEQ ID NO: 231309 - DNA, 1632 bp, Artificial Sequence
  derived and/or modified sequence
atggcggctcccttggtcctggtgctggtggtggctgtgacagtgcgggcggccttgttccgctccagtctggccgagttcatttccgagcgggtggaggtggtgtccccactgagctcttggaagagagtggttgaaggcctttcactgttggacttgggagtatctccgtattctggagcagtatttcatgaaactccattaataatatacctctttcatttcctaattgactatgctgaattggtgtttatgataactgatgcactcactgctattgccctgtattttgcaatccaggacttcaataaagttgtgtttaaaaagcagaaactcctcctagaactggaccagtatgccccagatgtggccgaactcatccggacccctatggaaatgcgttacatccctttgaaagtggccctgttctatctcttaaatccttacacgattttgtcttgtgttgccaagtctacctgtgccatcaacaacaccctcattgctttcttcattttgactacgataaaaggcagtgctttcctcagtgctatttttcttgccttagcgacataccagtctctgtacccactcaccttgtttgtcccaggactcctctatctcctccagcggcagtacatacctgtgaaaatgaagagcaaagccttctggatcttttcttgggagtatgccatgatgtatgtgggaagcctagtggtaatcatttgcctctccttcttccttctcagctcttgggatttcatccccgcagtctatggctttatactttctgttccagatctcactccaaacattggtcttttctggtacttctttgcagagatgtttgagcacttcagcctcttctttgtatgtgtgtttcagatcaacgtcttcttctacaccatccccttagccataaagctaaaggagcaccccatcttcttcatgtttatccagatcgctgtcatcgccatctttaagtcctacccgacagtgggggacgtggcgctctacatggccttcttccccgtgtggaaccatctctacagattcctgagaaacatctttgtcctcacctgcatcatcatcgtctgttccctgctcttccctgtcctgtggcacctctggatttatgcaggaagtgccaactctaatttcttttatgccatcacactgaccttcaacgttgggcagatcctgctcatctctgattacttctatgccttcctgcggcgggagtactacctcacacatggcctctacttgaccgccaaggatggcacagaggccatgctcgtgctcaagtaggcctggctggcacagggctgcatggacctcagggggctgtggggccagaagctgggccaagccctccagccagagttgccagcaggcgagtgcttgggcagaagaggttcgagtccagggtcacaagtctctggtaccaaaagggacccatggctgactgacagcaaggcctatggggaagaactgggagctccccaacttggacccccaccttgtggctctgcacaccaaggagccccctcccagacaggaaggagaagaggcaggtgagcagggcttgttagattgtggctacttaataaatgttttttgttatgaagtcta

SEQ ID NO: 231310 - DNA, 1592 bp, Artificial Sequence
  derived and/or modified sequence
cgcgcgcccgccccagttatcatggcggctcccttggtcctggtgctggtggtggctgtgacagtgcgggcggccttgttccgctccagtctggccgagttcatttccgagcgggtggaggtggtgtccccactgagctcttggaagagagtggttgaaggcctttcactgttggacttgggagtatctccgtattctggagcagtatttcatgaaataactgatgcactcactgctattgccctgtattttgcaatccaggacttcaataaagttgtgtttaaaaagcagaaactcctcctagaactggaccagtatgccccagatgtggccgaactcatccggacccctatggaaatgcgttacatccctttgaaagtggccctgttctatctcttaaatccttacacgattttgtcttgtgttgccaagtctacctgtgccatcaacaacaccctcattgctttcttcattttgactacgataaaaggcagtgctttcctcagtgctatttttcttgccttagcgacataccagtctctgtacccactcaccttgtttgtcccaggactcctctatctcctccagcggcagtacatacctgtgaaaatgaagagcaaagccttctggatcttttcttgggagtatgccatgatgtatgtgggaagcctagtggtaatcatttgcctctccttcttccttctcagctcttgggatttcatccccgcagtctatggctttatactttctgttccagatctcactccaaacattggtcttttctggtacttctttgcagagatgtttgagcacttcagcctcttctttgtatgtgtgtttcagatcaacgtcttcttctacaccatccccttagccataaagctaaaggagcaccccatcttcttcatgtttatccagatcgctgtcatcgccatctttaagtcctacccgacagtgggggacgtggcgctctacatggccttcttccccgtgtggaaccatctctacagattcctgagaaacatctttgtcctcacctgcatcatcatcgtctgttccctgctcttccctgtcctgtggcacctctggatttatgcaggaagtgccaactctaatttcttttatgccatcacactgaccttcaacgttgggcagatcctgctcatctctgattacttctatgccttcctgcggcgggagtactacctcacacatggcctctacttgaccgccaaggatggcacagaggccatgctcgtgctcaagtaggcctggctggcacagggctgcatggacctcagggggctgtggggccagaagctgggccaagccctccagccagagttgccagcaggcgagtgcttgggcagaagaggttcgagtccagggtcacaagtctctggtaccaaaagggacccatggctgactgacagcaaggcctatggggaagaactgggagctccccaacttggacccccaccttgtggctctgcacaccaaggagccccctcccagacaggaaggagaagaggcaggtgagcagggcttgttagattgtggctacttaataaatgttttttgttatgaagtct

SEQ ID NO: 231311 - DNA, 1469 bp, Artificial Sequence
  derived and/or modified sequence
atggcggctcccttggtcctggtgctggtggtggctgtgacagtgcgggcggccttgttccgctccagtctggccgagttcatttccgagcgggtggaggtggtgtccccactgagctcttggaagagagtggttgaaggcctttcactgttggacttgggagtatctccgtattctggagcagtatttcatgaaactccattaataatatacctctttcatttcctaattgactatgctgaattggtgtttatgataactgatgcactcactgctattgccctgtattttgcaatccaggacttcaataaagttgtgtttaaaaagcagaaactcctcctagaactggaccagtatgccccagatgtggccgaactcatccggacccctatggaaatgcgttacatccctttgaaagtggccctgttctatctcttaaatccttacacgattttgtcttgtgttgccaagtctacctgtgccatcaacaacaccctcattgctttcttcattttgactacgataaaaggcagtgctttcctcagtgctatttttcttgccttagcgacataccagtctctgtacccactcaccttgtttgtcccaggactcctctatctcctccagcggcagtacatacctgtgaaaatgaagagcaaagccttctggatcttttcttgggagtatgccatgatgtatgtgggaagcctagtggtaatcatttgcctctccttcttccttctcagctcttgggatttcatccccgcagtctatggctttatactttctgttccagatctcactccaaacattggtcttttctggtacttctttgcagagatgtttgagcacttcagcctcttctttgtatgtgtgtttcagatcaacgtcttcttctacaccatccccttagccataaagctaaaggagcaccccatcttcttcatgtttatccagatcgctgtcatcgccatctttaagtcctacccgacagtgggggacgtggcgctctacatggccttcttccccgtgtggaaccatctctacagattcctgagaaacatctttgtcctcacctgcatcatcatcgtctgttccctgctcttccctgtcctgtggcacctctggatttatgcaggaagtgccaactctaatttcttttatgccatcacactgaccttcaacgttgggcagatgggcttctgtggtgatagaatggcaggtacttgtcctgaggccatcagagctgctggtgacaggacaccttcctgaactcctccaggcgcctctgatctctccttagctgctgttgtgttaccttcagatcctgctcatctctgattacttctatgccttcctgcggcgggagtactacctcacacatggcctctacttgaccgccaaggatggcacagaggccatgctcgtgctcaagtaggcctggctggcacagggctgcatggacctca

SEQ ID NO: 231312 - DNA, 1248 bp, Artificial Sequence
  derived and/or modified sequence
atggccgctcccctggtcctggttctcgtggtggcggttactgtgagggccgcactgttcaggtcaagtctggcagagttcattagcgagagggtggaggtcgtgagccccctcagttcctggaaaagggttgtggaggggctgagcctcctggatctcggagtgtctccctactctggggctgtgttccatgaaatcacagatgctttgaccgccatagctttgtacttcgccatacaggactttaataaagttgtttttaagaagcagaaactgttactggagctggaccagtatgccccagacgttgctgagttaattcgaacaccgatggagatgcgctacatacctttaaaggtcgcacttttttacttgctaaacccctatacaatactgtcgtgtgtcgcgaagtccacctgtgctattaacaataccctcatagcctttttcattctcaccactattaagggctctgccttcttaagtgccatttttcttgctttggccacatatcagagtctctacccgctcacattattcgtgcctggcctgttgtacctgctccaacgccagtatatccccgtcaaaatgaaatccaaggctttttggattttctcctgggaatatgcgatgatgtacgtaggaagtttagtggtcattatttgtctctccttcttcctgctgagcagttgggatttcatacccgcagtatacgggtttattctgagcgtcccagatctgaccccgaacattggtctattttggtacttttttgccgagatgttcgagcatttctccttattttttgtttgcgtgtttcagataaacgtgttcttttatacaatcccactcgccattaagctcaaggaacatcccatcttcttcatgttcatacagatcgctgttattgctatctttaagtcttaccctaccgtgggagacgttgcactgtatatggcatttttcccagtatggaaccatttataccgattcctgaggaacatatttgtgctgacatgtattatcattgtgtgttcactgttatttcctgtgctgtggcacctgtggatatatgcagggagcgccaactccaacttcttttacgcaatcactcttacttttaacgtagggcaaatactgctgatctctgactacttctatgcctttctcagacgcgagtattacctgacccacggtctgtatctgacagccaaagacggaacagaggccatgctggtcctgaagtag

SEQ ID NO: 231313 - DNA, 1272 bp, Artificial Sequence
  derived and/or modified sequence
atggctgctccgctagtcctggttttagttgtggcagtcactgttagggccgcactgttccgcagcagcctcgcagagttcataagtgaaagagtcgaagtggtgtcccctctgagcagctggaaaagagtcgttgagggcctgtctctccttgacctgggggtgtcaccatactccggcgcagtctttcacgagacccccctcattatctacctgttccactttctcattgattacgcggagctcgtttttatgattacagacgcgttgaccgcaattgccctgtacttcgccatacaggatttcaataaagtagtgtttaaaaaacagaagctgctgctggaactggaccagtacgcccctgacgtagctgagctgatccgcacgcctatggagatgcgctacatccctctgaaggtggcattattctacctcctgaatccttatactattctgtcttgcgtggccaaatccacttgcgcaattaacaataccctgattgctttcttcatactgaccactattaagggaagtgcttttctcagtgctattttcctggcccttgccacatatcaatcactgtaccccctgaccctgttcgtcccaggcctgctctatctgctgcagagacaatatataccggtgaagatgaagtctaaggctttctggatctttagctgggagtatgcaatgatgtacgtcggctctctggtggtgataatctgcctgagtttcttcctgctgtctagctgggactttatacccgcagtatacggatttattctcagcgttcccgatctgacccctaacattggcctcttctggtacttcttcgcggaaatgttcgagcacttttcccttttcttcgtgtgtgtgtttcagatcaatgttttcttttatacaatccctcttgcaatcaaactcaaggaacatccaatattctttatgttcatacaaattgcagttattgccatctttaaatcttaccccacggtaggggatgtcgctctgtatatggccttcttcccggtttggaaccacctgtatcgatttctgagaaacatctttgttttgacatgcatcattatcgtttgtagtctgctttttccagtactgtggcacttatggatatacgcaggctctgccaacagcaattttttttacgccattaccttgacttttaacgtgggacagatgggcttctgcggtgatcgcatggcgggtacttgcccagaggcaatccgcgctgcaggagaccgcacccccagttag

SEQ ID NO: 231314 - DNA, 1308 bp, Artificial Sequence
  derived and/or modified sequence
atggccgcccccctggtgctggtgctggtggtggccgtgaccgtgagagccgccctgttcagaagcagcctggccgagttcatcagcgagagagtggaggtggtgagccccctgagcagctggaagagagtggtggagggcctgagcctgctggacctgggcgtgagcccctacagcggcgccgtgttccacgagacccccctgatcatctacctgttccacttcctgatcgactacgccgagctggtgttcatgatcaccgacgccctgaccgccatcgccctgtacttcgccatccaggacttcaacaaggtggtgttcaagaagcagaagctgctgctggagctggaccagtacgcccccgacgtggccgagctgatcagaacccccatggagatgagatacatccccctgaaggtggccctgttctacctgctgaacccctacaccatcctgagctgcgtggccaagagcacctgcgccatcaacaacaccctgatcgccttcttcatcctgaccaccatcaagggcagcgccttcctgagcgccatcttcctggccctggccacctaccagagcctgtaccccctgaccctgttcgtgcccggcctgctgtacctgctgcagagacagtacatccccgtgaagatgaagagcaaggccttctggatcttcagctgggagtacgccatgatgtacgtgggcagcctggtggtgatcatctgcctgagcttcttcctgctgagcagctgggacttcatccccgccgtgtacggcttcatcctgagcgtgcccgacctgacccccaacatcggcctgttctggtacttcttcgccgagatgttcgagcacttcagcctgttcttcgtgtgcgtgttccagatcaacgtgttcttctacaccatccccctggccatcaagctgaaggagcaccccatcttcttcatgttcatccagatcgccgtgatcgccatcttcaagagctaccccaccgtgggcgacgtggccctgtacatggccttcttccccgtgtggaaccacctgtacagattcctgagaaacatcttcgtgctgacctgcatcatcatcgtgtgcagcctgctgttccccgtgctgtggcacctgtggatctacgccggcagcgccaacagcaacttcttctacgccatcaccctgaccttcaacgtgggccagatcctgctgatcagcgactacttctacgccttcctgagaagagagtactacctgacccacggcctgtacctgaccgccaaggacggcaccgaggccatgctggtgctgaagtag

SEQ ID NO: 231315 - DNA, 1248 bp, Artificial Sequence
  derived and/or modified sequence
atggccgcccccctggtgctggtgctggtggtggccgtgaccgtgagagccgccctgttcagaagcagcctggccgagttcatcagcgagagagtggaggtggtgagccccctgagcagctggaagagagtggtggagggcctgagcctgctggacctgggcgtgagcccctacagcggcgccgtgttccacgagatcaccgacgccctgaccgccatcgccctgtacttcgccatccaggacttcaacaaggtggtgttcaagaagcagaagctgctgctggagctggaccagtacgcccccgacgtggccgagctgatcagaacccccatggagatgagatacatccccctgaaggtggccctgttctacctgctgaacccctacaccatcctgagctgcgtggccaagagcacctgcgccatcaacaacaccctgatcgccttcttcatcctgaccaccatcaagggcagcgccttcctgagcgccatcttcctggccctggccacctaccagagcctgtaccccctgaccctgttcgtgcccggcctgctgtacctgctgcagagacagtacatccccgtgaagatgaagagcaaggccttctggatcttcagctgggagtacgccatgatgtacgtgggcagcctggtggtgatcatctgcctgagcttcttcctgctgagcagctgggacttcatccccgccgtgtacggcttcatcctgagcgtgcccgacctgacccccaacatcggcctgttctggtacttcttcgccgagatgttcgagcacttcagcctgttcttcgtgtgcgtgttccagatcaacgtgttcttctacaccatccccctggccatcaagctgaaggagcaccccatcttcttcatgttcatccagatcgccgtgatcgccatcttcaagagctaccccaccgtgggcgacgtggccctgtacatggccttcttccccgtgtggaaccacctgtacagattcctgagaaacatcttcgtgctgacctgcatcatcatcgtgtgcagcctgctgttccccgtgctgtggcacctgtggatctacgccggcagcgccaacagcaacttcttctacgccatcaccctgaccttcaacgtgggccagatcctgctgatcagcgactacttctacgccttcctgagaagagagtactacctgacccacggcctgtacctgaccgccaaggacggcaccgaggccatgctggtgctgaagtag

SEQ ID NO: 231316 - DNA, 1272 bp, Artificial Sequence
  derived and/or modified sequence
atggccgcccccctggtgctggtgctggtggtggccgtgaccgtgagagccgccctgttcagaagcagcctggccgagttcatcagcgagagagtggaggtggtgagccccctgagcagctggaagagagtggtggagggcctgagcctgctggacctgggcgtgagcccctacagcggcgccgtgttccacgagacccccctgatcatctacctgttccacttcctgatcgactacgccgagctggtgttcatgatcaccgacgccctgaccgccatcgccctgtacttcgccatccaggacttcaacaaggtggtgttcaagaagcagaagctgctgctggagctggaccagtacgcccccgacgtggccgagctgatcagaacccccatggagatgagatacatccccctgaaggtggccctgttctacctgctgaacccctacaccatcctgagctgcgtggccaagagcacctgcgccatcaacaacaccctgatcgccttcttcatcctgaccaccatcaagggcagcgccttcctgagcgccatcttcctggccctggccacctaccagagcctgtaccccctgaccctgttcgtgcccggcctgctgtacctgctgcagagacagtacatccccgtgaagatgaagagcaaggccttctggatcttcagctgggagtacgccatgatgtacgtgggcagcctggtggtgatcatctgcctgagcttcttcctgctgagcagctgggacttcatccccgccgtgtacggcttcatcctgagcgtgcccgacctgacccccaacatcggcctgttctggtacttcttcgccgagatgttcgagcacttcagcctgttcttcgtgtgcgtgttccagatcaacgtgttcttctacaccatccccctggccatcaagctgaaggagcaccccatcttcttcatgttcatccagatcgccgtgatcgccatcttcaagagctaccccaccgtgggcgacgtggccctgtacatggccttcttccccgtgtggaaccacctgtacagattcctgagaaacatcttcgtgctgacctgcatcatcatcgtgtgcagcctgctgttccccgtgctgtggcacctgtggatctacgccggcagcgccaacagcaacttcttctacgccatcaccctgaccttcaacgtgggccagatgggcttctgcggcgacagaatggccggcacctgccccgaggccatcagagccgccggcgacagaacccccagctag

SEQ ID NO: 231317 - protein, 676 aa, Artificial Sequence
  derived and/or modified sequence
MSGGGDVVCTGWLRKSPPEKKLRRYAWKKRWFILRSGRMSGDPDVLEYYKNDHSKKPLRIINLNFCEQVDAGLTFNKKELQDSFVFDIKTSERTFYLVAETEEDMNKWVQSICQICGFNQAEESTDSLRNVSSAGHGPRSSPAELSSSSQHLLRERKSSAPSHSSQPTLFTFEPPVSNHMQPTLSTSAPQEYLYLHQCISRRAENARSASFSQGTRASFLMRSDTAVQKLAQGNGHCVNGISGQVHGFYSLPKPSRHNTEFRDSTYDLPRSLASHGHTKGSLTGSETDNEDVYTFKTPSNTLCREFGDLLVDNMDVPATPLSAYQIPRTFTLDKNHNAMTVATPGDSAIAPPPRPPKPSQAETPRWGSPQQRPPISENSRSVAATIPRRNTLPAMDNSRLHRASSCETYEYPQRGGESAGRSAESMSDGVGSFLPGKMIVGRSDSTNSEDNYVPMNPGSSTLLAMERAGDNSQSVYIPMSPGAHHFDSLGYPSTTLPVHRGPSRGSEIQPPPVNRNLKPDRKAKPTPLDLRNNTVIDELPFKSPITKSWSRANHTFNSSSSQYCRPISTQSITSTDSGDSEENYVPMQNPVSASPVPSGTNSPAPKKSTGSVDYLALDFQPSSPSPHRKPSTSSVTSDEKVDYVQVDKEKTQALQNTMQEWTDVRQSSEPSKGAKL

SEQ ID NO: 231318 - DNA, 1917 bp, Artificial Sequence
  derived and/or modified sequence
atgagcggggatccggatgtactcgaatactataaaaacgaccatagtaagaaacccctgaggatcatcaacttgaacttctgtgaacaagtcgatgccggcttaaccttcaataaaaaggaactccaggatagtttcgttttcgacatcaagacctctgaacggacattttacctagttgccgaaacagaggaggacatgaataaatgggttcagtccatctgccagatctgtggatttaaccaagccgaagaatcaacggattctctgcgcaacgtaagcagcgccggtcatggcccaaggtcctcccccgcagagttgtcgtcctcctcccagcacctgctcagagagagaaagtcaagtgccccttcccactcatcacagcccacattattcacattcgagcccccggtttccaaccacatgcagcccacactttcaacaagcgcaccccaagaatacctgtatctccaccagtgcatcagcagaagggccgaaaacgcaagatctgccagcttctcacaggggaccagggcatcgtttttgatgagaagcgatacagccgttcagaagctagcccagggaaacgggcattgtgttaatggaatctcgggacaagtccacggcttctactcactgcccaagcccagccggcacaacacagagtttcgggacagcacatacgatctgcctaggtctctggcctctcatggacacaccaaaggttccttgacaggcagcgagaccgataacgaggatgtctacactttcaagacgccaagtaacacactttgcagagaattcggcgacctgcttgtggacaacatggatgtccccgccacgccccttagcgcataccaaatcccgaggacctttactctagataaaaaccataatgccatgaccgtcgctacacccggcgactctgctatcgctccccctcctaggccgcccaagccaagccaggcagaaacccctcgttgggggtcaccacaacagcgccctccaatcagcgaaaactcacgctcggtcgccgccaccatacccagacggaatactctgcctgcaatggacaactcccggttacaccgtgcatcgagttgcgaaacctacgagtatccgcagaggggcggtgagtccgctggacggtctgccgagtcaatgagcgacggcgtcgggagcttcctcccaggaaagatgattgtggggcgttccgattctacgaacagcgaagacaattacgttccaatgaatccgggctcatcaactctgctggcaatggaaagagctggggataatagccagagcgtatacattccaatgagtcctggggctcatcattttgatagcctggggtatccttcgacaaccctaccagtccatcgaggtccttcgcgcggatctgaaattcagcctccacctgtaaatcgcaacctgaagccagatcgaaaggccaagcccacccctcttgaccttcggaacaataccgttatagacgagctgcccttcaagtcgccaatcacaaagagttggtcaagggccaaccatacattcaatagcagttcctcacagtattgtaggccaatttccactcagagtatcacgtccaccgattcgggtgatagcgaggaaaactacgtcccaatgcagaacccggtatccgcctctcccgtgccaagcggaactaactccccagccccaaaaaaaagtaccggctccgtggattacctggctctggacttccagccaagttcaccatcccctcatcgaaaaccgagtacatcatccgtgaccagcgatgagaaagtggattatgtccaggtcgataaagagaaaacgcaagcactgcaaaacaccatgcaggagtggactgatgtgaggcagagctccgaaccaagcaaaggagcaaagctctag

SEQ ID NO: 231319 - DNA, 2031 bp, Artificial Sequence
  derived and/or modified sequence
atgtctggaggcggcgatgtggtctgtacaggttggctgcgcaaatctccacctgaaaagaagctgaggcgctacgcctggaaaaaacgatggttcattctgagatcgggccgtatgtccggggatccagatgtacttgagtactacaagaatgatcattcaaagaagcccctcaggatcatcaatttaaacttttgtgagcaggtggacgccggtctgacatttaataagaaagaactgcaggacagtttcgtgttcgacattaagacttcggagcgaacattctacttggtggcggaaacggaggaagacatgaataaatgggtgcaatctatttgccagatctgtggttttaatcaggctgaagagagcactgactcattgcgaaatgtgtcctctgctggacatggaccgcgaagtagtcccgccgagctgtcttccagtagccaacacctgctgagggagcgaaagtcctctgccccctcgcattctagccagcctaccctctttacttttgagcctccagtgagcaaccacatgcagcctactctcagcacatcagctccccaggaatacttgtatctgcatcagtgcatcagcagaagggctgagaatgcccgctctgccagctttagtcagggtaccagagctagctttcttatgaggagcgacacggccgtgcagaagctggcacaggggaatgggcactgcgtcaacgggatctcagggcaagtgcacggcttttactccctgcccaaaccgagccggcacaacacagagttccgagactcaacatatgacctgcctcgctcactggccagtcacgggcacacaaaggggtcactgaccggaagtgaaacggacaatgaggatgtgtacacatttaaaacaccatcgaatacgctgtgtagggaattcggtgacttgctggtggataacatggacgtccccgccaccccactttccgcctatcagattcctcgaacatttactctggacaaaaatcataatgccatgaccgtcgcaacgccaggcgactcggctatcgctccaccccccaggccccccaaaccaagccaggctgaaacaccaaggtgggggagcccgcaacagcggcccccaatcagtgagaacagccgcagcgtagcagctacaattccgaggcgaaacactctccctgccatggacaattcaaggcttcacagagcatctagctgcgaaacctatgagtacccccaacgtgggggcgagtcagccggacgctcagccgaatccatgtccgatggggtcgggtcttttctgcctggtaagatgatcgtagggagatcagactcaactaacagcgaagacaattatgtgccaatgaatccgggtagcagcactttgctggcaatggaacgagcgggcgataacagccagagtgtttatattcccatgtcccccggtgcacaccatttcgactctctgggctaccctagcacaacccttccagtgcatcgcggcccatcgaggggctcagaaatccaaccgcccccagttaataggaacttgaagccagaccgaaaagctaagccaacccctctcgatctgagaaataatactgtgatagacgagctgccatttaaatcccccatcaccaagagctggtcccgagctaaccacacgttcaatagcagtagttcccagtactgtcggcccatctcgacgcagtccatcacatctaccgatagtggtgattctgaggaaaattacgtccctatgcagaaccccgttagtgcatcccccgtccccagcgggactaactcaccggccccaaaaaagagtacagggagtgtagattacctggcactggatttccagccatcctctccctcaccccatagaaaaccttcaaccagcagcgttacttccgatgagaaggttgactatgtgcaggttgacaaagagaagacccaggctttgcagaatactatgcaggaatggactgatgtaagacagagcagcgagccttcaaaaggcgccaagttatag

SEQ ID NO: 231320 - DNA, 6052 bp, Artificial Sequence
  derived and/or modified sequence
gaaattttgagaagtggtgggatgaagaagatccctgaagagaggagtaactgagacaaaggcgaggctagcaatagagagacaagtgagggaattagacctttggtatcatcatgaaaaggcctggaagaaacgctggtttatcctgcggagtggccggatgagcggtgacccagatgttctggaatactacaagaacgatcactccaagaagcctctgcggatcatcaacctgaacttctgtgagcaggtagatgcaggcctgacctttaacaagaaggagctgcaggatagttttgtgtttgacatcaagaccagtgaacgcaccttttacctggtggctgagacagaagaggacatgaataagtgggtccagagcatctgccagatctgtggcttcaatcaggctgaggagagcacagactccctgagaaatgtttcctcagccggtcatggcccccgctcttctccagctgagctcagcagctctagccagcaccttctccgagagcgcaagtcctcagccccatcacactccagccagccaactctgttcacgtttgaaccccctgtgtcaaaccacatgcagcccaccttgtccaccagcgcacctcaggagtatctctacttgcaccagtgcataagccgaagagcagaaaatgcaaggagtgccagcttctctcagggcaccagagcctcttttctcatgaggagtgacacagctgtacaaaaacttgcccagggcaatggacactgtgtcaacgggatcagtggtcaagtccatggcttctatagccttcccaagccgagccggcacaatacagaattcagagacagtacctacgacctcccccgcagcctggcctcccatggccacaccaagggcagcctcacaggctccgagacagataatgaggatgtgtacaccttcaagacgcccagcaacaccctgtgcagggagttcggggacctcctggtagacaatatggatgttccggccaccccactctcagcctaccagatccctaggacattcactctggacaaaaaccacaatgccatgacagtggccactcctggggactcagccatagctcccccaccccgcccccccaagccaagtcaggcagaaacacctcgatggggcagtcctcagcagagaccgccaatcagtgaaaatagcagatctgtcgctgccaccatccccagacgcaacaccctccctgcaatggacaacagccgacttcaccgagcttcttcctgtgagacctacgagtacccacagcgtggtggagagagtgcaggccggtctgctgaatccatgagtgatggagttggctctttcctgccagggaaaatgattgtgggccgatcggacagcaccaattctgaagacaactatgtgcccatgaatccaggttcttccaccctgttggccatggaacgagcaggtgataattcccagagcgtctacatcccaatgagcccaggggcccatcactttgactcacttggctacccatcaacaacccttcctgtgcaccgaggccccagcagaggaagtgagattcagccaccccctgtcaaccgcaacctcaaacctgatcggaaagcaaagccaacaccacttgacctgaggaacaacaccgtcatcgatgaactccccttcaagtcacctatcaccaagtcttggtctagggccaaccacaccttcaactccagctcctcccagtactgccgccccatctccacccagagcatcaccagcacagactcaggagacagcgaagagaactatgtccctatgcaaaacccagtgtctgcatctcccgttcccagtggcacgaacagtcctgcccctaagaagagcaccggcagcgttgattatctggccctggacttccagccgagctccccaagcccccaccgcaagccatctacttcatccgtcacctctgatgagaaggtggactacgttcaggtggacaaggagaagacccaggccctgcagaacaccatgcaggagtggacagacgtgcggcagtcctcagagccttccaagggtgccaagctgtgatgagagggccaccgcagagcccaggaggcagcatctccagagctggcccttcccatctcccctctcccctctcccgttcttcctcccatccacctcctctctactctgccagtctcagccttcaaagcacttgacatcagggaccctgaacccttcccctgggaggtgagggcctgatcaaggcacctcctctgcccactcggggcccagctgtgatttttatcagtaatggccatgcctccacccaccttagttaggagctacttccaaaaagcatccttcagcctcttcctgtcctttagacctgactctctaccagatgtttggagggaagggctggggctctgagccagattccacacctcacgttcagtcacagccctcagctatcttccctccggccactgggctacctctccttcagtcccagaagacaagtctcaccaacccagggagtcaaggaccagcaaaccaaagtggataatggactttttcattcctgtttttcttggcaggagagaagcaaggccactaaaagaggagatggtggagacggaggctcagcagtggtcttgaggggtaaaggacttagatgcccagatgaagagggaaagctgacatctgcagggaacccactttgaggctgaggccatggcaggacagctgctgtggggtgcagaggcagaagatgaaggacaaaaggaagggaaaactgatggccaacctagagcagcaaggagcagggcttggagctcgggtggtggagatgacaaggacactgtggggtctgggtccccagaactctggagctacaggccactctaggcccaagggctagtcctcttccccagtcccctcagaggcccccgccagccccaccttgaaagcagcatacaggggaaggcttggaccaagctgggcgaccaagcacatggggcaggaacacatggtaaaggggtggggaatatgggagggagtgtggtgtggatgggggtgatgcagggactgaggggaaccctgggacaggcacaggctgggcagaggcacagggcagtgcaggggactctgcagtggggtcgggaagtgagtttctttgcagtgagcagtgcagtggaagtcgggcacagaggtagcagacagatgtgaagcagtggtgaaggccatgtagcaagtggggaaatacatccaaagggcctgggagttggggggtgcccaacgcaatccttgggggtgcagggtggagcagaaagtgaaggagggacacgtgcaagagtggtgtgcatggtggtgtgacatgaggaccgttcctaggatgggacagtgggtcaggcaggacaaggagaaagcagggcagaatgatgcctagaggaccacatcaggcatggctgacagcttgtgcccatgggctgtggcgtatgtcagatcgcagggtaggaacgagtctggcctggtgccggcccagtgtttcctcagctcatccgccctctgttgctccctagcattccaggagccatcttggactctcctccccaggtttgaaaggccatcagattagcagggacggggtgtagggcatcacccaaggttccttctcttaaactaagggtgggggatctgaatgtttttatgttgactgttcttgactaaattttcaagagtttcagaagcaacaggacagaccagacgtttcattctaccctggggcgaacagaacttcttcctcccaaacaatgacttcctgccatgtttgatggggacagctaccactgtcctctgcccccattcccctttcagctcccatgagcatgcatagttcaccagaccaatggcctagccattctctaagtcccatcctggaagaagttatttcttcaagagctgcacctctcctcctagcattagtttagatcaactcaaggagtatttattaatggctgctgtctccagtttctggggttaagcactaaggacacaagaatcaatcagaccttctccctgaacttaagatagccacaatcagaaaaaggacaaggacatgagacagtggtgatggccatcagacagagacttcaaatgctgatggagggcagaggaagtacttagggaggttggtgtcagaggcaggagtgggggatcagggaaggtggattctaggaaaagggagtgcctgaggtaggccttagaaggggatgagtcagatttttacagaggaggagggcagggcttgggtccagtggaggaagaaggaaggagaggcttggaaagccttgtgtcttgggaacaaaaggcctttgagcatatgggtccagccactcagaagtgtaggggccatgccttggtgttccaataagtgaatggaagcagtggtggtagctacactgggcagagttggcagggtgctggttcactctgcccagccctgaatgtgtgccttaaaggccccctacaaggggccccatacgacagagcttttaactggtgccttccctgtacccgcagcagccacaagtgggcccagactattgcagcctcccataaacatgtgagcatgttctgagtgtgccatgatgtgagtggacctggctggaatcttcggagagcgactgaggtgttcaaatcgaatctcccaggaggcttccttccagccccctattctggtaactaccaggaggcttccttccagccccctattctggtaactaccaaaatccctcgggtgcaagtgtaggggtagagatggaaggatgagaggtgaaattgaccttttgaaagcaaagctctggctcacaggccccaaactaccagccgtatctagcatatccccaccctccacccactacctcctccaacaaaggagtcaactcagttgaaaaaactggtcctttggcctatccatgggtcaaagtccacctctcctgggggcctggagaggactgagcctacggaaaggggataccttcccactcagcactgcttcacacaggccccctgcctggggctctccaaggagccttcttcacccacttccagctccacttctgcaaggttaagtcaagtgagaacgatgagaaatagggagatggtgtctccttaagtccttgatctgcctgtctgtggaatgggaggttggattagctgcgctgaggtcccatccacagctggtgctcagctgcttgaaggggagactccctcctctgtaacttctttctgggggattggggtgggcagtacctatccccagtcccctcctagcttgactttagtggtttccaatgtagaagttaacaaagtatgccccattcctgtgacaaaagcacaaccattctgaagttactggagcatgggctcagctcatcctccctctggccccttctcccatggggacatctcggcccagcacccctatcccatttccagagttcttccttccccatctgggccttcataaaatgcaggggaagccagactggtctcaggagcgctaaagcccttccgtggggggtcgtctttctgggactagccctgctgtttaggacctgggaccacaatggggtacctgccgagggggtccccaagagatccaggctgtcatgtgatttatggtggcatgtgttgtgtatttgttggctacttgtgtcttgaaatctagaattatttcacgcagaattgtcactgtttgtcaggaagagaaaatgggctagtggaagcccagtcttgagttcttgtcttgttaccatttaaaattgacatttaattttcaaatcactgttggtgcctaatcacttaagttattaatttattctgttgtattcttttttttaaattgtaacatatttatccggtgggtgggacaggagtgtgttcaagtgggtcatgtttttgctgtggtgacacatggtacaggcttggagcttgcaggtccctttctactgtggtgttggagcaggacaataaagtccactagaaatgcacccc

SEQ ID NO: 231321 - DNA, 6092 bp, Artificial Sequence
  derived and/or modified sequence
gagctgcgcaccgccggccgctgccccagctgcccgagcccgcgccctcgtccgcgcgacccggcggggggctccaggccggcagcatgagcggcggcggcgacgtggtgtgcaccggctggctgaggaaatcgcctcccgagaagaagttgaggcgctatgcctggaagaaacgctggtttatcctgcggagtggccggatgagcggtgacccagatgttctggaatactacaagaacgatcactccaagaagcctctgcggatcatcaacctgaacttctgtgagcaggtagatgcaggcctgacctttaacaagaaggagctgcaggatagttttgtgtttgacatcaagaccagtgaacgcaccttttacctggtggctgagacagaagaggacatgaataagtgggtccagagcatctgccagatctgtggcttcaatcaggctgaggagagcacagactccctgagaaatgtttcctcagccggtcatggcccccgctcttctccagctgagctcagcagctctagccagcaccttctccgagagcgcaagtcctcagccccatcacactccagccagccaactctgttcacgtttgaaccccctgtgtcaaaccacatgcagcccaccttgtccaccagcgcacctcaggagtatctctacttgcaccagtgcataagccgaagagcagaaaatgcaaggagtgccagcttctctcagggcaccagagcctcttttctcatgaggagtgacacagctgtacaaaaacttgcccagggcaatggacactgtgtcaacgggatcagtggtcaagtccatggcttctatagccttcccaagccgagccggcacaatacagaattcagagacagtacctacgacctcccccgcagcctggcctcccatggccacaccaagggcagcctcacaggctccgagacagataatgaggatgtgtacaccttcaagacgcccagcaacaccctgtgcagggagttcggggacctcctggtagacaatatggatgttccggccaccccactctcagcctaccagatccctaggacattcactctggacaaaaaccacaatgccatgacagtggccactcctggggactcagccatagctcccccaccccgcccccccaagccaagtcaggcagaaacacctcgatggggcagtcctcagcagagaccgccaatcagtgaaaatagcagatctgtcgctgccaccatccccagacgcaacaccctccctgcaatggacaacagccgacttcaccgagcttcttcctgtgagacctacgagtacccacagcgtggtggagagagtgcaggccggtctgctgaatccatgagtgatggagttggctctttcctgccagggaaaatgattgtgggccgatcggacagcaccaattctgaagacaactatgtgcccatgaatccaggttcttccaccctgttggccatggaacgagcaggtgataattcccagagcgtctacatcccaatgagcccaggggcccatcactttgactcacttggctacccatcaacaacccttcctgtgcaccgaggccccagcagaggaagtgagattcagccaccccctgtcaaccgcaacctcaaacctgatcggaaagcaaagccaacaccacttgacctgaggaacaacaccgtcatcgatgaactccccttcaagtcacctatcaccaagtcttggtctagggccaaccacaccttcaactccagctcctcccagtactgccgccccatctccacccagagcatcaccagcacagactcaggagacagcgaagagaactatgtccctatgcaaaacccagtgtctgcatctcccgttcccagtggcacgaacagtcctgcccctaagaagagcaccggcagcgttgattatctggccctggacttccagccgagctccccaagcccccaccgcaagccatctacttcatccgtcacctctgatgagaaggtggactacgttcaggtggacaaggagaagacccaggccctgcagaacaccatgcaggagtggacagacgtgcggcagtcctcagagccttccaagggtgccaagctgtgatgagagggccaccgcagagcccaggaggcagcatctccagagctggcccttcccatctcccctctcccctctcccgttcttcctcccatccacctcctctctactctgccagtctcagccttcaaagcacttgacatcagggaccctgaacccttcccctgggaggtgagggcctgatcaaggcacctcctctgcccactcggggcccagctgtgatttttatcagtaatggccatgcctccacccaccttagttaggagctacttccaaaaagcatccttcagcctcttcctgtcctttagacctgactctctaccagatgtttggagggaagggctggggctctgagccagattccacacctcacgttcagtcacagccctcagctatcttccctccggccactgggctacctctccttcagtcccagaagacaagtctcaccaacccagggagtcaaggaccagcaaaccaaagtggataatggactttttcattcctgtttttcttggcaggagagaagcaaggccactaaaagaggagatggtggagacggaggctcagcagtggtcttgaggggtaaaggacttagatgcccagatgaagagggaaagctgacatctgcagggaacccactttgaggctgaggccatggcaggacagctgctgtggggtgcagaggcagaagatgaaggacaaaaggaagggaaaactgatggccaacctagagcagcaaggagcagggcttggagctcgggtggtggagatgacaaggacactgtggggtctgggtccccagaactctggagctacaggccactctaggcccaagggctagtcctcttccccagtcccctcagaggcccccgccagccccaccttgaaagcagcatacaggggaaggcttggaccaagctgggcgaccaagcacatggggcaggaacacatggtaaaggggtggggaatatgggagggagtgtggtgtggatgggggtgatgcagggactgaggggaaccctgggacaggcacaggctgggcagaggcacagggcagtgcaggggactctgcagtggggtcgggaagtgagtttctttgcagtgagcagtgcagtggaagtcgggcacagaggtagcagacagatgtgaagcagtggtgaaggccatgtagcaagtggggaaatacatccaaagggcctgggagttggggggtgcccaacgcaatccttgggggtgcagggtggagcagaaagtgaaggagggacacgtgcaagagtggtgtgcatggtggtgtgacatgaggaccgttcctaggatgggacagtgggtcaggcaggacaaggagaaagcagggcagaatgatgcctagaggaccacatcaggcatggctgacagcttgtgcccatgggctgtggcgtatgtcagatcgcagggtaggaacgagtctggcctggtgccggcccagtgtttcctcagctcatccgccctctgttgctccctagcattccaggagccatcttggactctcctccccaggtttgaaaggccatcagattagcagggacggggtgtagggcatcacccaaggttccttctcttaaactaagggtgggggatctgaatgtttttatgttgactgttcttgactaaattttcaagagtttcagaagcaacaggacagaccagacgtttcattctaccctggggcgaacagaacttcttcctcccaaacaatgacttcctgccatgtttgatggggacagctaccactgtcctctgcccccattcccctttcagctcccatgagcatgcatagttcaccagaccaatggcctagccattctctaagtcccatcctggaagaagttatttcttcaagagctgcacctctcctcctagcattagtttagatcaactcaaggagtatttattaatggctgctgtctccagtttctggggttaagcactaaggacacaagaatcaatcagaccttctccctgaacttaagatagccacaatcagaaaaaggacaaggacatgagacagtggtgatggccatcagacagagacttcaaatgctgatggagggcagaggaagtacttagggaggttggtgtcagaggcaggagtgggggatcagggaaggtggattctaggaaaagggagtgcctgaggtaggccttagaaggggatgagtcagatttttacagaggaggagggcagggcttgggtccagtggaggaagaaggaaggagaggcttggaaagccttgtgtcttgggaacaaaaggcctttgagcatatgggtccagccactcagaagtgtaggggccatgccttggtgttccaataagtgaatggaagcagtggtggtagctacactgggcagagttggcagggtgctggttcactctgcccagccctgaatgtgtgccttaaaggccccctacaaggggccccatacgacagagcttttaactggtgccttccctgtacccgcagcagccacaagtgggcccagactattgcagcctcccataaacatgtgagcatgttctgagtgtgccatgatgtgagtggacctggctggaatcttcggagagcgactgaggtgttcaaatcgaatctcccaggaggcttccttccagccccctattctggtaactaccaggaggcttccttccagccccctattctggtaactaccaaaatccctcgggtgcaagtgtaggggtagagatggaaggatgagaggtgaaattgaccttttgaaagcaaagctctggctcacaggccccaaactaccagccgtatctagcatatccccaccctccacccactacctcctccaacaaaggagtcaactcagttgaaaaaactggtcctttggcctatccatgggtcaaagtccacctctcctgggggcctggagaggactgagcctacggaaaggggataccttcccactcagcactgcttcacacaggccccctgcctggggctctccaaggagccttcttcacccacttccagctccacttctgcaaggttaagtcaagtgagaacgatgagaaatagggagatggtgtctccttaagtccttgatctgcctgtctgtggaatgggaggttggattagctgcgctgaggtcccatccacagctggtgctcagctgcttgaaggggagactccctcctctgtaacttctttctgggggattggggtgggcagtacctatccccagtcccctcctagcttgactttagtggtttccaatgtagaagttaacaaagtatgccccattcctgtgacaaaagcacaaccattctgaagttactggagcatgggctcagctcatcctccctctggccccttctcccatggggacatctcggcccagcacccctatcccatttccagagttcttccttccccatctgggccttcataaaatgcaggggaagccagactggtctcaggagcgctaaagcccttccgtggggggtcgtctttctgggactagccctgctgtttaggacctgggaccacaatggggtacctgccgagggggtccccaagagatccaggctgtcatgtgatttatggtggcatgtgttgtgtatttgttggctacttgtgtcttgaaatctagaattatttcacgcagaattgtcactgtttgtcaggaagagaaaatgggctagtggaagcccagtcttgagttcttgtcttgttaccatttaaaattgacatttaattttcaaatcactgttggtgcctaatcacttaagttattaatttattctgttgtattcttttttttaaattgtaacatatttatccggtgggtgggacaggagtgtgttcaagtgggtcatgtttttgctgtggtgacacatggtacaggcttggagcttgcaggtccctttctactgtggtgttggagcaggacaataaagtccactagaaatgcacccc

SEQ ID NO: 231322 - DNA, 543 bp, Artificial Sequence
  derived and/or modified sequence
gtagtaggtccgtctcctcctcccgccgagggacgccagagttaaggagcttcttgctgggaaggggtccctcctttcagccggaacctgacccgcagaatgtatcggaaatgcctggaagaaacgctggtttatcctgcggagtggccggatgagcggtgacccagatgttctggaatactacaagaacgatcactccaagaagcctctgcggatcatcaacctgaacttctgtgagcaggtagatgcaggcctgacctttaacaagaaggagctgcaggatagttttgtgtttgacatcaagaccagtgaacgcaccttttacctggtggctgagacagaagaggacatgaataagtgggtccagagcatctgccagatctgtggcttcaatcaggctgaggagagcacagactccctgagaaatgtttcctcagccggtcatggcccccgctcttctccagctgagctcagcagctctagccagcaccttctccgagagcgcaagtcctcagccccatcacactccagccagccaactct

SEQ ID NO: 231323 - DNA, 567 bp, Artificial Sequence
  derived and/or modified sequence
agctgcccgagcccgcgccctcgtccgcgcgacccggcggggggctccaggccggcagcatgagcggcggcggcgacgtggtgtgcaccggctggctgaggaaatcgcctcccgagaagaagttgaggcgctattaccttctgtctgacttcaaccccacatctgcttgacaagaattaactcaaatatctcttcttaacacctacctgattctggcatacagcctggaagaaacgctggtttatcctgcggagtggccggatgagcggtgacccagatgttctggaatactacaagaacgatcactccaagaagcctctgcggatcatcaacctgaacttctgtgagcaggtagatgcaggcctgacctttaacaagaaggagctgcaggatagttttgtgtttgacatcaagaccagtgaacgcaccttttacctggtggctgagacagaagaggacatgaataagtgggtccagagcatctgccagatctgtggcttcaatcaggctgaggagagcacagactccctgagaaatgtttcctcagccggtcatggcccccgctct

SEQ ID NO: 231324 - DNA, 1917 bp, Artificial Sequence
  derived and/or modified sequence
atgtctggggaccctgatgtgctggagtactacaagaatgaccacagcaagaagcccctgcgcatcatcaacctgaacttctgtgagcaggtggatgctggcctgaccttcaacaagaaggagctgcaggacagctttgtgtttgacatcaagaccagcgagaggaccttctacctggtggccgagacagaggaggacatgaacaagtgggtgcagagcatctgccagatctgtggcttcaaccaggccgaggagagcacagacagcctgagaaatgtgtcctctgctggccacggccccaggagcagccctgctgagctgagcagcagcagccagcacctgctgcgggagaggaagagcagcgcccccagccacagcagccagcccaccctcttcacctttgagccccctgtgagcaaccacatgcagcccaccctgagcaccagcgccccccaggagtacctgtacctgcaccagtgcatcagcagaagagcagaaaatgcccggagcgccagcttcagccagggcacccgggccagcttcctgatgagaagtgacacagctgtgcagaagctggcccagggcaatggccactgtgtgaatggcatcagcggccaggtgcacggcttctacagcctgcccaagcccagccgccacaacacagagttccgggacagcacctatgacctgcccaggagcctggccagccacggccacaccaagggcagcctgactggaagtgaaacagacaatgaagatgtgtacaccttcaagacccccagcaacaccctgtgccgggagtttggagacctgctggtggacaacatggatgtgcctgccacccccctgagcgcctaccagatccccaggaccttcaccctggacaagaaccacaatgccatgacagtggccacccctggggacagcgccatcgcccccccacccaggcctcccaagcccagccaggccgagaccccccgctggggcagcccccagcagaggcctcccatcagcgagaacagccgctctgtggccgccaccatccccaggaggaacaccctgcctgccatggacaacagccggctgcaccgggccagcagctgtgagacctatgagtacccccagagaggaggagagagcgctggccgctctgctgagagcatgtctgatggagtgggcagcttcctgcccgggaagatgattgtgggccgcagtgacagcaccaacagcgaggacaactacgtgcccatgaaccctggcagcagcaccctgctggccatggagcgggccggggacaacagccagagcgtgtacatccccatgagccctggggcccaccactttgacagcctgggctaccccagcaccaccctgcctgtgcaccggggccccagccggggcagcgagatccagcccccacctgtgaacagaaacctgaagccagacaggaaggccaagcccacccccctggacctgaggaacaacacagtgattgatgagctgcccttcaagagccccatcaccaagtcctggagccgggccaaccacaccttcaacagcagcagcagccagtactgccggcccatcagcacccagagcatcaccagcacagattctggggacagcgaggagaactacgtgcccatgcagaaccctgtgtctgccagccctgtgcccagcggcaccaacagccctgcccccaagaagagcactggatctgtggactacctggccctggacttccagcccagcagccccagcccccacaggaagcccagcaccagctctgtgaccagtgatgagaaggtggactatgtgcaggtggacaaggagaagacccaggccctgcagaacaccatgcaggagtggacagatgtgcggcagagcagcgagcccagcaagggggccaagctgtag

SEQ ID NO: 231325 - DNA, 2031 bp, Artificial Sequence
  derived and/or modified sequence
atgtctggaggaggagatgtggtgtgcaccggctggctgaggaagagccccccagagaagaagctgcggcgctatgcctggaagaagcgctggttcatcctgcggagcggccgcatgtctggggaccctgatgtgctggagtactacaagaatgaccacagcaagaagcccctgcgcatcatcaacctgaacttctgtgagcaggtggatgctggcctgaccttcaacaagaaggagctgcaggacagctttgtgtttgacatcaagaccagcgagaggaccttctacctggtggccgagacagaggaggacatgaacaagtgggtgcagagcatctgccagatctgtggcttcaaccaggccgaggagagcacagacagcctgagaaatgtgtcctctgctggccacggccccaggagcagccctgctgagctgagcagcagcagccagcacctgctgcgggagaggaagagcagcgcccccagccacagcagccagcccaccctcttcacctttgagccccctgtgagcaaccacatgcagcccaccctgagcaccagcgccccccaggagtacctgtacctgcaccagtgcatcagcagaagagcagaaaatgcccggagcgccagcttcagccagggcacccgggccagcttcctgatgagaagtgacacagctgtgcagaagctggcccagggcaatggccactgtgtgaatggcatcagcggccaggtgcacggcttctacagcctgcccaagcccagccgccacaacacagagttccgggacagcacctatgacctgcccaggagcctggccagccacggccacaccaagggcagcctgactggaagtgaaacagacaatgaagatgtgtacaccttcaagacccccagcaacaccctgtgccgggagtttggagacctgctggtggacaacatggatgtgcctgccacccccctgagcgcctaccagatccccaggaccttcaccctggacaagaaccacaatgccatgacagtggccacccctggggacagcgccatcgcccccccacccaggcctcccaagcccagccaggccgagaccccccgctggggcagcccccagcagaggcctcccatcagcgagaacagccgctctgtggccgccaccatccccaggaggaacaccctgcctgccatggacaacagccggctgcaccgggccagcagctgtgagacctatgagtacccccagagaggaggagagagcgctggccgctctgctgagagcatgtctgatggagtgggcagcttcctgcccgggaagatgattgtgggccgcagtgacagcaccaacagcgaggacaactacgtgcccatgaaccctggcagcagcaccctgctggccatggagcgggccggggacaacagccagagcgtgtacatccccatgagccctggggcccaccactttgacagcctgggctaccccagcaccaccctgcctgtgcaccggggccccagccggggcagcgagatccagcccccacctgtgaacagaaacctgaagccagacaggaaggccaagcccacccccctggacctgaggaacaacacagtgattgatgagctgcccttcaagagccccatcaccaagtcctggagccgggccaaccacaccttcaacagcagcagcagccagtactgccggcccatcagcacccagagcatcaccagcacagattctggggacagcgaggagaactacgtgcccatgcagaaccctgtgtctgccagccctgtgcccagcggcaccaacagccctgcccccaagaagagcactggatctgtggactacctggccctggacttccagcccagcagccccagcccccacaggaagcccagcaccagctctgtgaccagtgatgagaaggtggactatgtgcaggtggacaaggagaagacccaggccctgcagaacaccatgcaggagtggacagatgtgcggcagagcagcgagcccagcaagggggccaagctgtag

SEQ ID NO: 231326 - DNA, 1917 bp, Artificial Sequence
  derived and/or modified sequence
atgagcggcgaccccgacgtgctggagtactacaagaacgaccacagcaaaaaacctctgcgcatcattaacttgaacttctgtgagcaggtagacgctggtctcacctttaacaaaaaggagctccaggactcatttgtttttgacatcaaaaccagcgaacggacgttttatcttgtggctgagaccgaggaggacatgaacaagtgggtgcagagcatctgccagatatgtggcttcaaccaagcagaagagagcactgactctctgcggaatgtaagctcagccggtcacggaccacggtctagccccgctgaactgagctcatcctctcagcacctgctccgagaacgcaaaagcagtgcgccaagccactcaagccagcctacattgtttacctttgagcccccggtgtctaatcatatgcagccaaccctgtcgacttcagcgcctcaggagtatctgtatctgcatcagtgtatttctcgccgtgctgaaaacgctcgctccgccagcttttcgcagggcacgcgagcatcctttctgatgaggagtgacaccgctgtgcagaaactggcacagggcaacggacactgcgtgaacggtatctcaggtcaggtccacgggttctacagcctccctaagccgagcaggcataacaccgaattcagggactccacctatgacctgccccgcagcctggccagccacggtcatacaaaagggagcctcacaggaagcgaaactgacaatgaggatgtctatactttcaagactccatcaaacactctttgtcgagagttcggggacctgttagtggacaatatggacgtacctgccactccgctatctgcctatcagattcctaggacttttaccctggataagaaccacaatgccatgacagttgcaacccccggagactcagctatcgcaccccctcctaggcccccaaagccttcacaggccgagactcctcgatgggggagcccacagcagaggccccccataagcgagaactcacgctcggtggcagccactattccccgcaggaatacacttccggccatggataacagcagattgcatcgagcctcctcctgcgagacgtatgaatatccacagaggggaggagagagcgcaggtagatctgcggaatcgatgtcagacggagtaggcagcttcctacctggaaaaatgattgtgggccgctccgacagcactaatagcgaggataattatgtgcccatgaaccctggaagttccacgttactggcgatggaacgggcaggggacaacagccagtccgtgtacattcctatgagtcccggcgcacatcattttgactcacttggatacccctcaactactcttccagttcacaggggccctagtaggggttcggagatccagccaccacccgtaaatagaaatctaaaacctgatagaaaggctaaacctacccctctggatctaagaaacaatacagtgattgacgagttaccgtttaagtcgccaattacaaagtcatggagccgtgctaatcacacttttaactcttcctccagccaatattgcaggccgatctccacacagtctatcacatccacagactctggcgacagtgaggagaactacgtccctatgcagaatcctgtatcggccagtcccgtccctagcggtaccaactcacctgcccctaagaaatccaccggctcggtggactaccttgcactcgacttccagccctcaagcccttcgccccatagaaaaccatctacctcctctgtgaccagcgatgagaaggtggattacgtccaggttgacaaggagaaaacacaagcactgcagaacactatgcaagagtggaccgacgtacggcagtcctcagaaccgagcaaaggggccaagctgtag

SEQ ID NO: 231327 - DNA, 2031 bp, Artificial Sequence
  derived and/or modified sequence
atgagcggcggcggcgacgtggtgtgcaccggctggctgcggaagagtccccctgagaaaaaattgagacgctatgcctggaaaaaaagatggtttattctgcgaagtgggcgcatgtcaggcgaccccgacgtgctcgagtattacaaaaatgaccattcaaagaaacccttacggatcatcaatctgaatttttgtgagcaagtggacgctggcctgacgttcaacaagaaggagctgcaggattctttcgtgtttgatatcaagacatccgagcggacattttacttggtggccgagactgaagaagatatgaataagtgggtgcagagcatctgtcaaatctgtgggttcaatcaggctgaagaatccaccgacagcctgcgaaacgtgagcagcgctggacacggaccgcggtcttctcccgccgaactgagttcatcgtcacaacacctgttgcgcgagcgtaaatccagtgccccttcccacagtagccaaccgactttattcacctttgagcctccggtgtctaaccacatgcagcccacactttcaactagtgccccacaggagtatttatatctccaccaatgcatttcccggcgcgcggagaacgctagatcagctagcttttctcagggtacacgggcttcatttctgatgagaagtgatactgccgtgcaaaagctggcccaaggtaatggccattgcgtaaacgggatcagcggccaagtccacgggttttattcactgcccaagcccagccgccataacactgaatttagagatagcacctacgacttgccgaggagtttggcgtcacacgggcacactaaaggctcactgacaggctcagagacggacaacgaggatgtgtacacctttaagactccaagcaataccttgtgtagagagttcggcgaccttctcgtggacaatatggacgtgcccgcaactcccctgagcgcctatcagattccaaggacgttcactctcgacaaaaatcataatgctatgaccgtggcgactcctggggacagcgccatagcccccccacctaggcccccaaaacccagtcaggctgagacgcctcgctggggcagccctcagcagaggcctccgatcagcgagaattctagatctgtagcagccacgatccccaggcggaacaccttacccgccatggacaatagccgactgcaccgcgcctcctcttgtgaaacttacgagtacccgcagaggggaggcgagagcgccggcaggtccgccgagagcatgtcagacggcgttggtagcttccttcccggaaagatgatcgttgggagatctgattcaacaaacagtgaggacaattatgtgccgatgaaccctgggagctcaactttgttagcgatggagcgcgccggtgataactctcagagcgtgtacatccccatgagtcccggggctcatcacttcgacagcttagggtatcccagcaccaccctgccagtccaccgggggccctcacggggctctgaaatccagccccctccagtgaacaggaatcttaagcccgaccgcaaagctaagccaacaccactggatttgaggaataacactgtgatcgatgagctgccatttaagagccctattacgaaaagttggtctagggcgaatcacacttttaactctagctcctcgcaatactgccgcccgatttcaactcagtccattacttctactgactccggcgacagcgaggagaactacgtgccaatgcagaatcctgtcagcgccagcccggttccttcgggcactaacagcccagcccctaagaagtccaccggctccgtcgattacctggctttggattttcagccatccagtccttctccacacaggaaaccgtccacaagctcggtcaccagcgatgaaaaagtggattatgtccaggtggacaaggagaagacccaggcgctgcagaataccatgcaagagtggaccgatgttcgccagtcatcagagccgagcaagggagccaaattgtag

SEQ ID NO: 231328 - DNA, 1917 bp, Artificial Sequence
  derived and/or modified sequence
atgagtggggaccctgacgtcttggagtactacaagaacgaccattccaaaaagccccttagaatcataaacctgaatttctgcgagcaggtcgatgctgggctaaccttcaacaagaaggagctgcaggatagttttgtcttcgatataaagacgagtgaacgaacattctatctcgtcgccgagactgaagaagatatgaacaaatgggtgcaatcaatttgccagatttgtggatttaaccaggccgaagagtcaactgatagtttgagaaatgtgtcatccgccggtcatgggcctcgcagctctcccgctgaactgtcttctagtagtcagcacctgcttcgtgagcgcaaatcatcagcgccttctcacagcagtcagccgactttatttacgttcgaaccgccagtctccaaccacatgcaacctaccctctccacctcggcccctcaagaatacctgtatttgcatcagtgcattagccggagggccgagaatgcccgtagtgcaagtttttcgcagggcacgagggcctcctttttaatgagaagtgacactgctgtgcagaagttagctcagggcaatgggcattgcgtcaacggtataagtgggcaagtgcatggattttatagcctgcctaagccgtctcggcacaatactgagtttagagactctacatacgatctgcctcggtctttggcttcacatgggcacacaaaaggctcgttaacaggatccgagaccgacaatgaagatgtgtatacctttaaaacgccaagtaataccctctgtcgcgaattcggagatctcttagtggataacatggacgtgcccgctactccattgagcgcttatcagatacctcgaacttttacacttgataaaaaccacaacgctatgacagttgcaactcccggagacagcgccatagctccccctccccgacctcccaagcccagccaggcagaaacaccgcgatgggggtccccccagcagaggccaccaattagtgagaacagtaggtccgttgccgcaaccattcccagaagaaacacactacctgccatggataacagccgcctccaccgcgcatcctcctgtgagacttacgaatatccacagcgcggtggagagagcgctgggagatcagccgagtccatgtcagatggggtggggagctttctaccagggaagatgattgtggggaggagcgattcaacaaacagcgaggataactacgttccgatgaatcctggcagtagtactctgctcgcaatggagcgggctggagataacagccaatcggtgtatattcctatgtccccaggggctcatcacttcgatagtctggggtacccgtctactacactgccagtccaccgtggccctagtcgcggtagcgagattcagccccctcccgtcaacaggaatctaaagccagacagaaaagctaagccaacccctctggacctccggaacaacacagtcatcgacgagctaccgttcaagagcccaatcacaaaaagctggtcgcgggcaaatcacaccttcaattcatcctctagccagtattgtcggccaataagcacccagtcaattacctccacagactctggagatagcgaggaaaactacgttcccatgcagaatcctgtgagcgcctcacccgttccatccgggaccaactctccagcaccgaagaagagtaccggttcagtggactacctcgcactggattttcaaccatcgagtccttccccccatcggaaaccctcaacctccagcgtgacatctgatgaaaaggttgattacgtacaagtggataaggagaagacgcaagccctccagaacaccatgcaggaatggacagacgtgcggcagagtagcgaacccagcaaaggtgcgaagctttag

SEQ ID NO: 231329 - DNA, 2031 bp, Artificial Sequence
  derived and/or modified sequence
atgtctggcggaggagatgtcgtctgcaccggatggttacggaaatcaccacctgagaaaaaactcaggcggtacgcctggaagaaacgctggtttattctaaggtcaggcaggatgtcaggcgaccccgacgtgcttgagtactacaaaaacgatcactcaaaaaagcccttgcgcatcattaatttgaatttttgtgagcaagtggatgcgggtctgactttcaacaaaaaagagctgcaggatagctttgtgtttgatattaagacaagcgagcgtaccttctacttagtggctgaaaccgaggaagatatgaacaagtgggttcaaagcatctgccagatctgtggcttcaatcaggccgaagagagcacagattccttgaggaacgtctcctcagcaggccatggtccgagatccagccccgctgaactgagtagctcttctcagcatctgctccgcgagagaaagtcttctgccccaagtcactccagtcagccaactctgttcacattcgaaccgccagtctctaatcatatgcagccaaccctgagtacctctgcccctcaggaatacctttacctgcaccaatgtattagtcgcagagccgagaacgctagaagcgcgtcattctcccagggaactcgcgcttcgtttctaatgcgctcagacactgcggtacaaaagttggcccaaggaaacggacactgtgtcaatgggattagcggacaggtccacgggttttattctctccctaagcctagcaggcacaacactgagttcagagactccacgtatgatctgccccgaagtctcgctagccatggacatacgaagggttctctgactggatctgagaccgacaacgaggacgtttacacgtttaagactccaagcaataccctgtgtcgcgagtttggggatctgcttgtagacaatatggacgtaccagccacaccactgtccgcataccaaattcccagaacattcacactggacaagaaccacaatgctatgactgtggctacccccggagactccgcaatcgctccgccacctcgtcccccaaaaccttcccaggctgagaccccaaggtggggctccccgcaacaaagacctccgatcagcgagaacagtcgcagtgtggccgctactatccctagacggaacaccttaccggctatggacaatagcagactgcacagggccagcagctgcgaaacctacgagtacccccaaagagggggtgagagcgcgggtcgaagtgccgaaagcatgtctgacggggtgggatcgttcctgcccggaaagatgattgtaggccgatctgatagcacaaactctgaggacaactacgtgcctatgaatccagggagtagcacgctgctggcaatggaacgagcgggagacaactcccaaagcgtgtatatccccatgtcgccaggcgcacatcactttgattctttgggctacccgtcaacaacccttcctgtccatcgaggaccttctaggggttcggaaattcagccgccaccagtgaataggaacttaaagcccgatcgaaaagcaaaacccactcccctcgaccttagaaataatacggtcattgacgaactgcccttcaagagtccaatcacaaagtcgtggagccgggcaaatcacactttcaattcatcatcatcacagtattgtaggccaatatccactcagtcaattacttcaacggattctggcgattcggaagagaattatgtacctatgcagaatccggtgtcagcctcacctgtgccctctgggacaaactcacccgctcctaagaagtccaccgggagcgtagactacctggctctggacttccagccttccagtccgagccctcatagaaaaccatccacatctagtgttacctctgacgaaaaagtggattatgttcaggtggacaaggaaaagactcaggcactgcagaacaccatgcaggagtggacggacgttcgtcaatccagcgagccctccaaaggggctaagctgtag

SEQ ID NO: 231330 - DNA, 1917 bp, Artificial Sequence
  derived and/or modified sequence
atgagcggcgaccccgacgtgctggagtactacaagaacgaccacagcaagaagcccctgagaatcatcaacctgaacttctgcgagcaggtggacgccggcctgaccttcaacaagaaggagctgcaggacagcttcgtgttcgacatcaagaccagcgagagaaccttctacctggtggccgagaccgaggaggacatgaacaagtgggtgcagagcatctgccagatctgcggcttcaaccaggccgaggagagcaccgacagcctgagaaacgtgagcagcgccggccacggccccagaagcagccccgccgagctgagcagcagcagccagcacctgctgagagagagaaagagcagcgcccccagccacagcagccagcccaccctgttcaccttcgagccccccgtgagcaaccacatgcagcccaccctgagcaccagcgccccccaggagtacctgtacctgcaccagtgcatcagcagaagagccgagaacgccagaagcgccagcttcagccagggcaccagagccagcttcctgatgagaagcgacaccgccgtgcagaagctggcccagggcaacggccactgcgtgaacggcatcagcggccaggtgcacggcttctacagcctgcccaagcccagcagacacaacaccgagttcagagacagcacctacgacctgcccagaagcctggccagccacggccacaccaagggcagcctgaccggcagcgagaccgacaacgaggacgtgtacaccttcaagacccccagcaacaccctgtgcagagagttcggcgacctgctggtggacaacatggacgtgcccgccacccccctgagcgcctaccagatccccagaaccttcaccctggacaagaaccacaacgccatgaccgtggccacccccggcgacagcgccatcgcccccccccccagaccccccaagcccagccaggccgagacccccagatggggcagcccccagcagagaccccccatcagcgagaacagcagaagcgtggccgccaccatccccagaagaaacaccctgcccgccatggacaacagcagactgcacagagccagcagctgcgagacctacgagtacccccagagaggcggcgagagcgccggcagaagcgccgagagcatgagcgacggcgtgggcagcttcctgcccggcaagatgatcgtgggcagaagcgacagcaccaacagcgaggacaactacgtgcccatgaaccccggcagcagcaccctgctggccatggagagagccggcgacaacagccagagcgtgtacatccccatgagccccggcgcccaccacttcgacagcctgggctaccccagcaccaccctgcccgtgcacagaggccccagcagaggcagcgagatccagcccccccccgtgaacagaaacctgaagcccgacagaaaggccaagcccacccccctggacctgagaaacaacaccgtgatcgacgagctgcccttcaagagccccatcaccaagagctggagcagagccaaccacaccttcaacagcagcagcagccagtactgcagacccatcagcacccagagcatcaccagcaccgacagcggcgacagcgaggagaactacgtgcccatgcagaaccccgtgagcgccagccccgtgcccagcggcaccaacagccccgcccccaagaagagcaccggcagcgtggactacctggccctggacttccagcccagcagccccagcccccacagaaagcccagcaccagcagcgtgaccagcgacgagaaggtggactacgtgcaggtggacaaggagaagacccaggccctgcagaacaccatgcaggagtggaccgacgtgagacagagcagcgagcccagcaagggcgccaagctgtag

SEQ ID NO: 231331 - DNA, 2031 bp, Artificial Sequence
  derived and/or modified sequence
atgagcggcggcggcgacgtggtgtgcaccggctggctgagaaagagcccccccgagaagaagctgagaagatacgcctggaagaagagatggttcatcctgagaagcggcagaatgagcggcgaccccgacgtgctggagtactacaagaacgaccacagcaagaagcccctgagaatcatcaacctgaacttctgcgagcaggtggacgccggcctgaccttcaacaagaaggagctgcaggacagcttcgtgttcgacatcaagaccagcgagagaaccttctacctggtggccgagaccgaggaggacatgaacaagtgggtgcagagcatctgccagatctgcggcttcaaccaggccgaggagagcaccgacagcctgagaaacgtgagcagcgccggccacggccccagaagcagccccgccgagctgagcagcagcagccagcacctgctgagagagagaaagagcagcgcccccagccacagcagccagcccaccctgttcaccttcgagccccccgtgagcaaccacatgcagcccaccctgagcaccagcgccccccaggagtacctgtacctgcaccagtgcatcagcagaagagccgagaacgccagaagcgccagcttcagccagggcaccagagccagcttcctgatgagaagcgacaccgccgtgcagaagctggcccagggcaacggccactgcgtgaacggcatcagcggccaggtgcacggcttctacagcctgcccaagcccagcagacacaacaccgagttcagagacagcacctacgacctgcccagaagcctggccagccacggccacaccaagggcagcctgaccggcagcgagaccgacaacgaggacgtgtacaccttcaagacccccagcaacaccctgtgcagagagttcggcgacctgctggtggacaacatggacgtgcccgccacccccctgagcgcctaccagatccccagaaccttcaccctggacaagaaccacaacgccatgaccgtggccacccccggcgacagcgccatcgcccccccccccagaccccccaagcccagccaggccgagacccccagatggggcagcccccagcagagaccccccatcagcgagaacagcagaagcgtggccgccaccatccccagaagaaacaccctgcccgccatggacaacagcagactgcacagagccagcagctgcgagacctacgagtacccccagagaggcggcgagagcgccggcagaagcgccgagagcatgagcgacggcgtgggcagcttcctgcccggcaagatgatcgtgggcagaagcgacagcaccaacagcgaggacaactacgtgcccatgaaccccggcagcagcaccctgctggccatggagagagccggcgacaacagccagagcgtgtacatccccatgagccccggcgcccaccacttcgacagcctgggctaccccagcaccaccctgcccgtgcacagaggccccagcagaggcagcgagatccagcccccccccgtgaacagaaacctgaagcccgacagaaaggccaagcccacccccctggacctgagaaacaacaccgtgatcgacgagctgcccttcaagagccccatcaccaagagctggagcagagccaaccacaccttcaacagcagcagcagccagtactgcagacccatcagcacccagagcatcaccagcaccgacagcggcgacagcgaggagaactacgtgcccatgcagaaccccgtgagcgccagccccgtgcccagcggcaccaacagccccgcccccaagaagagcaccggcagcgtggactacctggccctggacttccagcccagcagccccagcccccacagaaagcccagcaccagcagcgtgaccagcgacgagaaggtggactacgtgcaggtggacaaggagaagacccaggccctgcagaacaccatgcaggagtggaccgacgtgagacagagcagcgagcccagcaagggcgccaagctgtag

SEQ ID NO: 231332 - protein, 445 aa, Artificial Sequence
  derived and/or modified sequence
MTGSSFSLAHLLIISGLLCYSAGCLALPSLDQKKRGGHKACCLLTPPPPPLFPPPFFRGGRSPLLSPDMKNLMLELETSQSPCMQGSLGSPGPPGPQGPPGLPGKTGPKGEKGELGRPGRKGRPGPPGVPGMPGPIGWPGPEGPRGEKGDLGMMGLPGSRGPMGSKGYPGSRGEKGSRGEKGDLGPKGEKGFPGFPGMLGQKGEMGPKGEPGIAGHRGPTGRPGKRGKQGQKGDSGVMGPPGKPGPSGQPGRPGPPGPPPAGQLIMGPKGERGFPGPPGRCLCGPTMNVNNPSYGESVYGPSSPRVPVIFVVNNQEELERLNTQNAIAFRRDQRSLYFKDSLGWLPIQLTPFYPVDYTADQHGTCGDGLLQPGEECDDGNSDVGDDCIRCHRAYCGDGHRHEGVEDCDGSDFGYLTCETYLPGSYGDLQCTQYCYIDSTPCRYFT

SEQ ID NO: 231333 - protein, 445 aa, Artificial Sequence
  derived and/or modified sequence
MTGSSFSLAHLLIISGLLCYSAGCLALPSLDQKKRGGHKACCLLTPPPPPLFPPPFFRGGRSPLLSPDMKNLMLELETSQSPCMQGSLGSPGPPGPQGPPGLPGKTGPKGEKGELGRPGRKGRPGPPGVPGMPGPIGWPGPEGPRGEKGDLGMMGLPGSRGPMGSKGYPGSRGEKGSRGEKGDLGPKGEKCNPLLLLFPSFQGEMGPKGEPGIAGHRGPTGRPGKRGKQGQKGDSGVMGPPGKPGPSGQPGRPGPPGPPPAGQLIMGPKGERGFPGPPGRCLCGPTMNVNNPSYGESVYGPSSPRVPVIFVVNNQEELERLNTQNAIAFRRDQRSLYFKDSLGWLPIQLTPFYPVDYTADQHGTCGDGLLQPGEECDDGNSDVGDDCIRCHRAYCGDGHRHEGVEDCDGSDFGYLTCETYLPGSYGDLQCTQYCYIDSTPCRYFT

SEQ ID NO: 231334 - DNA, 615 bp, Artificial Sequence
  derived and/or modified sequence
atgggctgggactgccgacgcaccacagtcgaaaacccaagtccaattcgaaattgcgtaaaccaggagtggcccgaaggctcctccccgggactgacggaagggaatacaggcctggttagagatcttcgccctgcgcaccaggatagatctgggacccgcgaggatcccgcaggacaggagacaacagcaataaccaacccttctccgtccttggcagccgacctggcaggggacgcgttaccgggttgcctgggtgccgcagcccaccaaggtcctctgcttgaccggtccagcgaatctacccttggccctcaggcccttgaactcgaacattgtcatgagaggggttgttgcagggggtgcgcgtcctttagcccttttcctgccccaaggtgtcccagcgagcggcttggtgcccacagcagcaggtgggcgattcggggtcgaagcaagatcaatccaccgccttgggccccagcctgcttaccaggtggatttcctgcatgcttgcccgctcccaagagtagtacagactcagcttcgagttgctttaaaggtgggagagagttttcggacccgttggatatccctggcgctggggctatggggtag

SEQ ID NO: 231335 - protein, 421 aa, Artificial Sequence
  derived and/or modified sequence
MVVLNPMTLGIYLQLFFLSIVSQPTFINSVLPISAALPSLDQKKRGGHKACCLLTPPPPPLFPPPFFRGGRSPGPPGLPGKTGPKGEKGELGRPGRKGRPGPPGVPGMPGPIGWPGPEGPRGEKGDLGMMGLPGSRGPMGSKGYPGSRGEKGSRGEKGDLGPKGEKGFPGFPGMLGQKGEMGPKGEPGIAGHRGPTGRPGKRGKQGQKGDSGVMGPPGKPGPSGQPGRPGPPGPPPAGQLIMGPKGERGFPGPPGRCLCGPTMNVNNPSYGESVYGPSSPRVPVIFVVNNQEELERLNTQNAIAFRRDQRSLYFKDSLGWLPIQLTPFYPVDYTADQHGTCGDGLLQPGEECDDGNSDVGDDCIRCHRAYCGDGHRHEGVEDCDGSDFGYLTCETYLPGSYGDLQCTQYCYIDSTPCRYFT

SEQ ID NO: 231336 - protein, 194 aa, Artificial Sequence
  derived and/or modified sequence
ISGLLCYSAGCLALPSLDQKKRGGHKACCLLTPPPPPLFPPPFFRGGRSPGPPGLPGKTGPKGEKGELGRPGRKGRPGPPGVPGMPGPIGWPGPEGPRGEKGDLGMMGLPGSRGPMGSKGYPGSRGEKGSRGEKGDLGPKGEKGFPGFPGMLGQKGEMGPKGEPGIAGHRGPTGRPGKRGKQGQKGDSGVMGPP

SEQ ID NO: 231337 - DNA, 3007 bp, Artificial Sequence
  derived and/or modified sequence
cacacgcacacacacacacacaaacacacgcgcacgcaaacagcagtgaggaagagaaaagcagagataagcaaggctccgcagcagcctcctttctaacttgaccctcgccagaccctggccagcatggttgtcctgaatccaatgactttgggaatttatcttcagcttttcttcctctctatcgtgtctcagccgactttcatcaacagcgttcttccaatctcagcagcccttcccagcctggatcagaagaagcgtggtggccacaaagcatgctgcctgctgacgcctcctccaccaccactgttcccaccaccattcttcagaggtggccgaagtccgcttctctccccagacatgaagaatctcatgctggaactggagacctcgcagtccccgtgcatgcaaggctcgctaggctcccctgggcctcccggcccccagggtccaccggggcttcctggcaagacaggaccaaagggagaaaagggggagcttggccgaccaggaaggaagggtagacctggccccccaggtgttcctggcatgcctgggcccatcggttggccaggccctgaaggacccaggggtgaaaaaggtgacctgggtatgatgggcttgccagggtcaagaggaccaatgggctccaagggctaccctggatccagaggggaaaagggatccagaggtgaaaagggtgacctgggtcccaaaggagaaaagggtttcccaggatttcctggaatgttggggcagaaaggtgaaatgggtccaaaaggtgaacctgggatagcaggacaccgaggacccacaggaagaccaggaaaacgaggcaagcagggacagaaaggggatagtggagttatgggcccaccaggcaagcctgggccttctggtcaacctggccgtccggggcccccaggccccccacctgcaggacaacttataatgggacccaaaggggaaagaggatttcccgggcctccaggaagatgtctttgtggacccactatgaatgtgaataacccttcctacggggaatctgtgtatgggcccagttccccgcgagttcctgtgatttttgtggtcaacaaccaggaggagcttgagaggctgaacacccaaaacgccattgccttccgcagagaccagagatctctgtacttcaaggacagccttggctggctccccatccagctgacccctttctaccctgtggattacactgcagaccagcacggcacctgtggggatgggctcctgcagcctggggaggagtgtgacgacggtaacagcgatgtgggtgacgactgcatccgctgtcaccgtgcctactgtggagatggtcaccggcatgagggtgtggaggactgtgacggctctgactttggctacctgacatgcgagacctatctccctgggtcatatggagacctgcaatgcacccagtactgctacatcgactccacgccctgccgctacttcacctgagggccgtgaggagaaggtgggctgcgccccacagaactggcagcagcttctccactgtcatcaaactggccatgtcctggccccgtctccaccaacctttgtgtgacaaaaacaaggacaaattcctgctactaagacatgctgttaactcagtctgactggaagaatttaggaccactgcatcctgtcttaatccaaggtactggaaaaccttccacatgcccaacctgagacctgttccccatcgctaccatttggccaaacaaccggctacaatgctcttcctcttctggaatgttgctgacccaggccgtggacttggctgagcactgttagacacacacagacctgcaggctgttttagaatgttttgatctctttggggaatctggagtacaggcctctccgcccctgaccaccgaaacgtgcaggcattctcactcacactgggcagcccgctgtcgggtctctctaggcctatgaaccacaaagcagggaagtgggcacgttctctcggggtggctcacagctttgaacctgccaaaggacccctcgactggccacagcccagcccagcctgacgtggatgtggctgcccaggaaaagacttaactgtgaaaaagtactgagaacccacctgacccaggcttgccccaagcagaggctagagaagaggctcctcttctcagtgtttcccaaaggggcggctcttgtggtttcaaaatctctggcaccatcttgacctcttggctctctctgcactttgccccctgtctcaaaaatgtccctcatgtccatttcctgtccaggagactcatgaggactgtgtgacctgcacaagcccacacctgggcaggctgttggtgtctccttggtccttaggcagatactcccctgagtccccgatctagggccagctgcagagggctctctctaggcagagcgttcctggccagagctctacctctttgcctcctgctgacccctgacagcgtcccgtggcatttctttcatgtctgcatattgcatagccttgtcctcctgtgtgcctgagctcctcccttttcaataagattattagtcgtgcatgtctgtgagctgcctttcatcaccatttttcctgagtagggcttagttttattctggaaagacatctccaaggtgaggtccacccccacagcagacctcaagtagaaattgcccaatttttaccagctggagggacacccttgggtttttgtacgaagctatttaatgagcctgtgtcttggggactcagcaggctggagcttggggcctggtggaccatcacctggtgtctgtaggtggacccggtctcccacaggtgacatcaacctgagggtggcgtctttagagacaggcacatgggcagccctgttcccttcgcctctactgcgaggcctggggagatgttgttttcatgctgcttccaccatcacactggggtttctggatgggaaataaaaaaataaaggcagttcatttccccaaa

SEQ ID NO: 231338 - DNA, 1338 bp, Artificial Sequence
  derived and/or modified sequence
atgacaggatctagtttttctctggcccaccttctgatcatctctggactgctttgctatagcgccggctgtttagctctccctagcttagaccagaagaaaagaggtggccacaaagcctgttgtctcctgaccccgcctcccccacccttgtttccccctcccttttttcgagggggtcggtcgcctctgctttcccccgacatgaaaaaccttatgctggaattggagacgtctcagtcgccatgcatgcagggctctctcggttcacccggcccccccggtcctcagggacctcctggcctcccaggcaaaacaggaccaaagggcgaaaagggagaattgggaaggcccgggcggaaaggcaggcccggtcctcctggcgtccctgggatgcctggccctatagggtggcctggtcccgagggacccaggggggagaaaggcgacctgggaatgatgggactgccaggttctcgtggcccaatgggatctaaaggatatcctggttcccggggcgaaaagggcagcaggggggaaaagggggacctaggtcctaagggggagaagggattccccggcttcccaggaatgctgggacaaaagggggagatggggcccaaaggtgaacccgggatcgcagggcatagaggacctacgggacgaccgggcaagagaggaaaacagggccaaaagggggattctggcgttatggggcccccagggaaaccgggtccgagcggccaacctgggaggccagggccccccggacccccacctgcggggcagcttattatgggccctaagggtgagcggggcttccccggtcctcctggtagatgcctttgcggacccacaatgaacgttaataacccttcctatggcgagagcgtgtacggcccaagctcaccacgtgttcccgtgatcttcgttgtgaacaaccaagaggagttagagaggctcaatacacaaaacgcaatcgccttcagacgtgaccaacgatctctatattttaaggattccctgggatggctgcccattcagctcacccccttctatcccgtggattataccgctgatcagcacggaacgtgcggcgatggtctactgcagccgggggaggagtgcgacgatgggaacagtgacgtcggcgacgattgcatcagatgccacagggcttactgcggtgacggacatcgtcacgaaggggttgaggactgtgacggcagcgactttggctatttgacttgtgagacatatctgccagggagttatggcgacctccagtgcactcagtactgttatatagattctactccctgtagatactttacctag

SEQ ID NO: 231339 - DNA, 1266 bp, Artificial Sequence
  derived and/or modified sequence
atggttgtccttaaccccatgaccctgggaatatatcttcaactgtttttcttgagtattgtgtctcaacctacgttcatcaacagcgtgctgcctatctcagcagctcttccatctctggatcagaagaagcgtggaggccacaaagcgtgctgtctccttacacctccgccaccccctctattccccccgcccttttttaggggaggcagatccccgggacctcccggattaccagggaaaacaggacccaagggagaaaaaggagaactgggaaggccaggcaggaaaggccgccctggtccacctggtgtccctggcatgccaggacccattggctggcccgggccggagggacctaggggagaaaaaggcgacctcgggatgatggggctaccaggaagccgggggccaatggggagtaaggggtatccggggagccgtggggaaaaggggtctagaggagaaaagggagatctgggacctaagggagagaagggtttccccgggtttccagggatgctcggtcaaaagggcgagatggggcccaaaggcgagccgggtattgccggacacagagggccgaccggccgacccggcaagagggggaagcaaggacaaaagggcgattccggtgttatgggacctcctggaaaacccggaccttccgggcaacccgggcgccccggtccacccggcccgcccccagccggccagttgatcatgggtcccaaaggagagcgcggtttccctggtcccccaggacgatgtctgtgtggaccaacaatgaatgtaaacaaccccagctatggtgaatcggtctatggtcctagcagtcccagagtgccagtaatctttgttgtgaataatcaggaggagctggagaggctgaacacacaaaacgctatcgcattccggcgggaccaacgctctctatattttaaggacagtctcgggtggctgcccatccagctcacaccattttacccagtggattacacagccgaccagcacggaacatgtggtgacggtctcctccagcctggggaggaatgtgacgacggtaacagtgacgtgggagatgactgcattcggtgtcaccgcgcttattgtggtgacgggcacagacatgagggcgtggaagattgtgatggtagcgactttggctacctgacatgtgagacatacctgcctgggtcgtacggggacctgcagtgcacccagtattgttatattgattcgacgccctgtcgctactttacctag

SEQ ID NO: 231340 - DNA, 1368 bp, Artificial Sequence
  derived and/or modified sequence
atggtagtgctgaaccccatgacactggggatttacttacaacttttcttcctgagtatcgtgagccaacccacatttataaacagcgttctccccatttctgcagcgcttcccagtctggaccagaaaaaaagaggcggccataaggcatgctgcctcttgacccctccaccaccacctctctttccacccccctttttcaggggtgggcggtcccctctcctcagtcctgacatgaagaatctcatgctggaactcgagacgagccagtcaccttgtatgcaaggctcgcttgggtccccagggccgcccgggccccagggcccccccggactgcctgggaaaacgggaccaaagggggaaaaaggggagctgggccgaccaggaaggaaggggcggcccgggccgcccggtgtccctggtatgcctggcccaatcgggtggcctggtccggagggtccacggggtgaaaagggagatctcgggatgatgggtttgcctggttcccgaggtcctatgggctccaaaggttacccgggcagtcggggtgagaagggatccagaggagaaaagggcgatcttgggcccaagggagaaaaggggtttcccggatttcctggaatgctgggacagaagggagaaatgggccctaagggagagcctggaatcgccggccatagaggccctaccggcagaccagggaagcgcgggaagcagggacagaagggggattctggtgtgatgggtccaccgggcaaacccgggcccagtggccaacctggtaggccagggccacccggacccccccccgccggccaactaattatgggtccgaagggggagaggggctttccaggaccacctggtcgttgtctgtgcggtcccactatgaacgtgaataaccctagctacggggagagcgtgtatggaccatcttcacctcgagtgcctgtgattttcgtggtcaacaatcaggaggaactcgagcgtctcaatacccagaatgccatagcatttcgaagagatcagcgctctctctacttcaaagattccctgggctggttgccaatccagttgacacctttttatcctgttgactacacagccgatcagcacggaacctgcggcgacggcctattacagccaggggaggagtgtgatgacggtaactcagacgttggcgacgattgcattcggtgtcatcgtgcttattgtggggatggccacagacacgaaggagttgaggactgcgacggctcagatttcggctacctgacatgtgagacttatcttcccggatcatacggagacctgcagtgtactcagtattgctacattgattctactccatgtaggtactttacctag

SEQ ID NO: 231341 - DNA, 1338 bp, Artificial Sequence
  derived and/or modified sequence
atgacaggatcaagtttctcactcgcccatctgctgatcatcagcggcctgctatgctattccgccgggtgtctggctctcccgagtctggaccaaaagaagaggggaggccacaaagcgtgctgcctgcttactcccccacctcctcccctgttccccccgccattcttcagaggcgggagatccccactcctcagccccgacatgaagaacctgatgctcgagctcgagacctcccaatctccctgcatgcaggggagccttggtagcccgggcccacctggccctcaaggccctccaggcctgcctgggaaaactggccccaagggagagaagggtgagctgggtcggccggggaggaagggccgccctggcccccccggggtgccaggtatgccaggtcctattggctggcccgggcctgagggccctcggggagagaagggagacttgggaatgatgggtctgcctggtagccgagggccaatgggatcaaaaggctacccagggtcgcgcggtgaaaagggaagcagaggtgaaaagggggatctcggccccaagggggaaaagggatttccaggtttccctgggatgctcgggcagaaaggggagatgggtcctaagggggagcccggcatcgccgggcacaggggcccaacagggcgccctggaaaacggggaaaacaggggcagaaaggggactctggtgtaatgggtccccccggcaaacctggtccctctggtcagcctggccgccctgggccacccggcccgccccccgcgggccagttgatcatgggccctaaaggtgagcgggggttccccgggccgcctggaaggtgcctctgcggcccgaccatgaacgttaacaatcctagctacggcgagtccgtgtacgggccgtcttcacccagggtaccggttatctttgtcgtaaataaccaggaggagctggagcgcctgaacacccaaaatgcaattgcattcagacgggatcaacgcagcctgtatttcaaagactcccttggatggctgcccattcagctgacacccttctacccagttgactataccgctgatcagcatgggacatgtggagacggattactccagccaggcgaggagtgcgatgatggaaactccgatgttggggatgactgcatcaggtgtcaccgggcttactgcggtgacggacaccgtcacgagggggttgaagactgcgatggctcagactttggatatctcacctgcgagacttacctcccaggatcctacggcgacctccagtgcactcagtactgctatatagattctaccccttgccggtactttacctag

SEQ ID NO: 231342 - DNA, 585 bp, Artificial Sequence
  derived and/or modified sequence
atcagtggcttactgtgctactccgccgggtgtctcgccctgccctcccttgaccagaagaaaaggggcgggcataaagcttgttgcctcctgacacctccccccccccccttattccccccaccattttttcgcgggggcaggtctccaggccctccaggcttacccggtaagacaggacccaagggagaaaaaggcgaacttggccggcctggcaggaaaggaaggccgggcccccccggtgtgcctggaatgcctgggcctatcggctggcccggtcctgaaggtccccggggtgaaaagggagacctggggatgatggggctccctggctcaagggggccaatgggaagcaagggctatccgggcagtaggggcgaaaagggtagcagaggtgaaaagggcgatcttggacctaagggagaaaagggctttccaggcttcccggggatgcttgggcagaaaggggaaatgggccctaaaggagagcctggaatagccggtcatcgaggccccacgggcaggcctggtaagaggggcaaacaaggccagaaaggtgattcaggggtgatggggcctccttag

SEQ ID NO: 231343 - DNA, 1338 bp, Artificial Sequence
  derived and/or modified sequence
atgactggatcgtcgttcagcttagcccacctcctcatcatcagcggcctactgtgttacagcgccggttgtctggcgctacccagcctcgatcaaaagaagcgaggaggccacaaagcttgctgcctcctgactcccccacctcctcctctctttccacctccttttttccgtgggggccgcagcccacttttgtctcctgacatgaaaaacttgatgctggaattggagacctcgcagtcaccctgcatgcaggggtccctgggcagccctggcccgcccggaccccaggggccacctggactcccggggaagactggcccgaagggggaaaaaggcgagctcggacggcctggcagaaaagggcggccaggacccccaggtgtaccaggcatgcccgggccaattggatggcccggcccggaagggccacggggggaaaagggggatcttggcatgatgggtctcccgggatctcgaggccccatgggatctaaaggatacccaggaagcaggggcgagaagggttcccggggggaaaagggggatctgggccctaagggggagaaatgtaaccctttgctattgttgtttccaagctttcagggcgagatgggaccaaaaggggagcctggtatcgctggccacagagggcctactggcaggccaggcaaaagaggcaaacagggtcagaaaggggactcgggggtcatgggcccacccggtaaaccaggcccctctggccagcccggccggcccggccctcccggcccaccacccgcaggacaactgatcatggggcccaaaggcgagagaggtttcccaggcccccccggaagatgtttgtgcgggcccacaatgaatgtcaacaaccccagctacggtgagagtgtatacggcccctcctcaccaagagtgcccgttattttcgtagtcaacaaccaggaggagctggagaggctgaacactcagaatgcgatcgctttcagacgggatcaacgctccctgtatttcaaggacagcttgggctggctgccaattcagttgactcccttttacccggtcgactatactgccgatcagcacgggacatgtggcgacggactactccaaccaggggaagaatgtgatgacggaaacagtgacgtgggggatgactgtattcgatgccatcgtgcctattgcggagatggccaccgacacgagggcgttgaagactgcgacggtagtgatttcggctatctgacctgcgagacttatttgccaggcagctatggagaccttcagtgcacacagtactgctacatagacagtacgccatgcagatatttcacctag

SEQ ID NO: 231344 - DNA, 1338 bp, Artificial Sequence
  derived and/or modified sequence
atgacaggcagcagcttcagcctggcccacctgctgatcatcagcggcctgctgtgctacagcgctggctgcctggccctgcccagcctggaccagaagaagaggggcggccacaaggcctgctgcctgctgaccccacctcctcctcctctcttccccccacccttcttccggggcggccgcagccccctgctgagcccagacatgaagaacctgatgctggagctggagaccagccagagcccctgcatgcagggcagcctgggcagccctggccccccaggcccccagggccccccaggcctgcccgggaagacaggccccaagggggagaagggggagctgggccggcccggcaggaagggccggcccggccccccaggagtgcccggcatgcctggccccatcggctggccaggccctgagggccccagaggagagaagggggacctgggcatgatgggcctgcccggcagccggggccccatgggcagcaagggctacccaggcagcagaggagagaagggcagcagaggagagaagggggacctgggccccaagggggagaagggcttccctggcttccctggcatgctgggccagaagggggagatgggccccaagggggagcccggcattgctggccaccggggccccaccggccggcctgggaagaggggcaagcagggccagaagggggacagcggcgtgatgggccccccaggcaagccaggccccagcggccagcccggccggcccggccccccaggccccccacctgctggccagctgatcatgggccccaagggggagcggggcttccctggccccccaggccgctgcctgtgtggccccaccatgaatgtgaacaaccccagctatggagagagcgtgtatggccccagcagcccccgggtgcctgtgatctttgtggtgaacaaccaggaggagctggagcggctgaacacccagaatgccatcgccttccggcgggaccagaggagcctgtacttcaaggacagcctgggctggctgcccatccagctgacccccttctaccctgtggactacacagctgaccagcacggcacctgtggagatggcctgctgcagcccggggaggagtgtgatgatggcaacagtgatgtgggagatgactgcatccgctgccaccgggcctactgtggagatggccacagacatgaaggagtggaggactgtgatggcagtgactttggctacctgacctgtgagacctacctgcccggcagctatggagacctgcagtgcacccagtactgctacatcgacagcaccccctgccgctacttcacctag

SEQ ID NO: 231345 - DNA, 1266 bp, Artificial Sequence
  derived and/or modified sequence
atggtggtgctgaaccccatgaccctgggcatctacctgcagctgttcttcctgagcatcgtgtcccagcccaccttcatcaacagcgtgctgcccatctctgctgccctgcccagcctggaccagaagaagaggggcggccacaaggcctgctgcctgctgaccccacctcctcctcctctcttccccccacccttcttccggggcggccgcagccctggccccccaggcctgcccgggaagacaggccccaagggggagaagggggagctgggccggcccggcaggaagggccggcccggccccccaggagtgcccggcatgcctggccccatcggctggccaggccctgagggccccagaggagagaagggggacctgggcatgatgggcctgcccggcagccggggccccatgggcagcaagggctacccaggcagcagaggagagaagggcagcagaggagagaagggggacctgggccccaagggggagaagggcttccctggcttccctggcatgctgggccagaagggggagatgggccccaagggggagcccggcattgctggccaccggggccccaccggccggcctgggaagaggggcaagcagggccagaagggggacagcggcgtgatgggccccccaggcaagccaggccccagcggccagcccggccggcccggccccccaggccccccacctgctggccagctgatcatgggccccaagggggagcggggcttccctggccccccaggccgctgcctgtgtggccccaccatgaatgtgaacaaccccagctatggagagagcgtgtatggccccagcagcccccgggtgcctgtgatctttgtggtgaacaaccaggaggagctggagcggctgaacacccagaatgccatcgccttccggcgggaccagaggagcctgtacttcaaggacagcctgggctggctgcccatccagctgacccccttctaccctgtggactacacagctgaccagcacggcacctgtggagatggcctgctgcagcccggggaggagtgtgatgatggcaacagtgatgtgggagatgactgcatccgctgccaccgggcctactgtggagatggccacagacatgaaggagtggaggactgtgatggcagtgactttggctacctgacctgtgagacctacctgcccggcagctatggagacctgcagtgcacccagtactgctacatcgacagcaccccctgccgctacttcacctag

SEQ ID NO: 231346 - DNA, 1368 bp, Artificial Sequence
  derived and/or modified sequence
atggtggtgctgaaccccatgaccctgggcatctacctgcagctgttcttcctgagcatcgtgtcccagcccaccttcatcaacagcgtgctgcccatctctgctgccctgcccagcctggaccagaagaagaggggcggccacaaggcctgctgcctgctgaccccacctcctcctcctctcttccccccacccttcttccggggcggccgcagccccctgctgagcccagacatgaagaacctgatgctggagctggagaccagccagagcccctgcatgcagggcagcctgggcagccctggccccccaggcccccagggccccccaggcctgcccgggaagacaggccccaagggggagaagggggagctgggccggcccggcaggaagggccggcccggccccccaggagtgcccggcatgcctggccccatcggctggccaggccctgagggccccagaggagagaagggggacctgggcatgatgggcctgcccggcagccggggccccatgggcagcaagggctacccaggcagcagaggagagaagggcagcagaggagagaagggggacctgggccccaagggggagaagggcttccctggcttccctggcatgctgggccagaagggggagatgggccccaagggggagcccggcattgctggccaccggggccccaccggccggcctgggaagaggggcaagcagggccagaagggggacagcggcgtgatgggccccccaggcaagccaggccccagcggccagcccggccggcccggccccccaggccccccacctgctggccagctgatcatgggccccaagggggagcggggcttccctggccccccaggccgctgcctgtgtggccccaccatgaatgtgaacaaccccagctatggagagagcgtgtatggccccagcagcccccgggtgcctgtgatctttgtggtgaacaaccaggaggagctggagcggctgaacacccagaatgccatcgccttccggcgggaccagaggagcctgtacttcaaggacagcctgggctggctgcccatccagctgacccccttctaccctgtggactacacagctgaccagcacggcacctgtggagatggcctgctgcagcccggggaggagtgtgatgatggcaacagtgatgtgggagatgactgcatccgctgccaccgggcctactgtggagatggccacagacatgaaggagtggaggactgtgatggcagtgactttggctacctgacctgtgagacctacctgcccggcagctatggagacctgcagtgcacccagtactgctacatcgacagcaccccctgccgctacttcacctag

SEQ ID NO: 231347 - DNA, 585 bp, Artificial Sequence
  derived and/or modified sequence
atcagcggcctgctgtgctacagcgctggctgcctggccctgcccagcctggaccagaagaagagaggaggccacaaggcctgctgcctgctgaccccacctcctccacccctcttccccccacccttcttccggggcggccgcagccctggccccccaggcctgcccgggaagacaggccccaagggggagaagggggagctgggccggcccggcaggaagggccggcccggccccccaggagtgcccggcatgcctggccccatcggctggccaggccctgagggccccagaggagagaagggggacctgggcatgatgggcctgcccggcagccggggccccatgggcagcaagggctacccaggcagcagaggagagaagggcagcagaggagagaagggggacctgggccccaagggggagaagggcttccctggcttccctggcatgctgggccagaagggggagatgggccccaagggggagcccggcattgctggccaccggggccccaccggccggcctgggaagaggggcaagcagggccagaagggggacagcggcgtgatgggccccccatag

SEQ ID NO: 231348 - DNA, 1338 bp, Artificial Sequence
  derived and/or modified sequence
atgacaggcagcagcttcagcctggcccacctgctgatcatcagcggcctgctgtgctacagcgctggctgcctggccctgcccagcctggaccagaagaagaggggcggccacaaggcctgctgcctgctgaccccacctcctcctcctctcttccccccacccttcttccggggcggccgcagccccctgctgagcccagacatgaagaacctgatgctggagctggagaccagccagagcccctgcatgcagggcagcctgggcagccctggccccccaggcccccagggccccccaggcctgcccgggaagacaggccccaagggggagaagggggagctgggccggcccggcaggaagggccggcccggccccccaggagtgcccggcatgcctggccccatcggctggccaggccctgagggccccagaggagagaagggggacctgggcatgatgggcctgcccggcagccggggccccatgggcagcaagggctacccaggcagcagaggagagaagggcagcagaggagagaagggggacctgggccccaagggggagaagtgcaaccccctgctgctgctcttccccagcttccagggcgagatgggccccaagggggagcccggcattgctggccaccggggccccaccggccggcctgggaagaggggcaagcagggccagaagggggacagcggcgtgatgggccccccaggcaagccaggccccagcggccagcccggccggcccggccccccaggccccccacctgctggccagctgatcatgggccccaagggggagcggggcttccctggccccccaggccgctgcctgtgtggccccaccatgaatgtgaacaaccccagctatggagagagcgtgtatggccccagcagcccccgggtgcctgtgatctttgtggtgaacaaccaggaggagctggagcggctgaacacccagaatgccatcgccttccggcgggaccagaggagcctgtacttcaaggacagcctgggctggctgcccatccagctgacccccttctaccctgtggactacacagctgaccagcacggcacctgtggagatggcctgctgcagcccggggaggagtgtgatgatggcaacagtgatgtgggagatgactgcatccgctgccaccgggcctactgtggagatggccacagacatgaaggagtggaggactgtgatggcagtgactttggctacctgacctgtgagacctacctgcccggcagctatggagacctgcagtgcacccagtactgctacatcgacagcaccccctgccgctacttcacctag

SEQ ID NO: 231349 - DNA, 1338 bp, Artificial Sequence
  derived and/or modified sequence
atgaccggcagcagcttcagcctggcccacctgctgatcatcagcggactcctgtgctattcggccggctgcctggcgttgcctagcctcgaccagaagaagaggggcgggcacaaagcctgctgcttgctcacacctccacctcctccccttttccccccacccttctttcggggtggccggtcccccctgctctcacccgacatgaaaaacttgatgctggagttggagacttctcagtccccttgtatgcagggctccctgggtagtccaggtcctcctggaccacagggaccacctggcttgcccggtaaaacaggtccgaagggagagaagggagagctcgggcggcccggcagaaagggccggcctgggcccccgggtgttccgggaatgcctggacccatcggctggccggggcccgaaggaccgcgtggagaaaagggggatcttggaatgatgggccttcctggcagtaggggtcctatgggctctaaagggtacccaggcagcaggggcgagaagggttctaggggcgagaagggggacctaggacctaaaggcgagaagggtttcccgggatttccagggatgttgggccagaaaggggagatggggccaaaaggggaaccagggatcgctggtcaccgaggcccaaccggccgaccagggaagcggggtaagcagggccagaagggggattctggtgtgatgggacccccaggaaaacctggaccatccggacagccaggacggccaggccctccaggacccccgcctgccggccagctcattatgggacccaaaggagaaagagggtttcccggccctccgggacgctgtctgtgtggtccaaccatgaatgtgaacaatccctcatatggagaatcagtctacggaccatcaagccctagagtgccagtgatatttgtagtgaataaccaggaagagctcgaacggttaaacacgcagaatgctattgcttttcgtcgcgaccagcggtctctttacttcaaggatagtcttgggtggcttccgattcaattgacaccattctaccctgtggattacaccgccgaccagcacggcacctgcggagatgggctgctacaaccaggggaagaatgcgatgatggtaattccgatgtaggggatgactgcattcgctgtcacagggcatattgcggcgatgggcaccgccatgaaggcgtggaagattgcgacgggtccgacttcggctacctgacttgcgaaacttatctgccagggtcttacggggacctgcagtgcacccagtactgctacattgactcgaccccctgccgctactttacttag

SEQ ID NO: 231350 - DNA, 1266 bp, Artificial Sequence
  derived and/or modified sequence
atggtggtgctgaaccccatgaccctgggcatctacctgcagctgttcttcctctctatagtcagtcaacctactttcatcaactctgttctgcccattagcgccgccctgccaagtctcgaccagaagaagagagggggacacaaggcctgttgtctcctgacccccccacctccccccctgtttccgcctccattttttaggggcggaaggagtcccgggccccctggactgcccggcaagacaggtccgaagggtgagaaaggagagctgggacgccccggtcgcaaagggcggcccgggcccccaggggtgcccggcatgccaggaccaattggatggcccggtccggaaggtccacggggcgagaagggcgaccttgggatgatggggctacctggctctagggggccaatgggctccaaaggttatcccggctctcggggggaaaaggggtcccggggggagaagggcgatctgggaccaaagggggaaaaaggatttccaggctttcccggcatgctgggccagaaaggagaaatggggcccaagggtgagcctgggattgctggtcaccgcggcccaaccggccggcctggcaaaagaggtaaacaggggcagaaaggcgacagcggggtgatggggccaccggggaaacccgggccttccggacaaccaggcagaccggggccaccaggacccccacccgccggacagttgatcatgggcccaaaaggagagcgtggcttcccaggacccccaggcaggtgtctgtgtggccctaccatgaacgtgaacaacccgtcatatggggaaagcgtctacggtccttctagtccgcgcgtgcctgtaattttcgtggttaataatcaggaggagctggagaggctgaacacgcaaaacgccatcgcattccgcagagatcagaggagcctctactttaaagactctctcggttggctccccatccagctgacacctttctaccctgtcgactataccgccgaccagcacggtacctgcggtgacggtctgctgcaaccaggtgaagaatgcgatgacggcaattctgatgtgggcgatgattgcattcgctgccaccgcgcctactgcggtgacggtcataggcacgaaggggtcgaagactgcgatgggtccgacttcggctacctcacctgcgaaacatacctgccaggtagctacggcgatttgcagtgcacacaatactgctacattgactccactccgtgtcgatatttcacctag

SEQ ID NO: 231351 - DNA, 1368 bp, Artificial Sequence
  derived and/or modified sequence
atggtggtgctgaaccccatgaccctgggcatctacctgcagctgttcttcttatccatagtatcacagcctacttttatcaacagcgtgctgccaatctccgctgctctaccatcactcgatcagaaaaagcgaggaggccataaagcctgttgccttctgactcccccgcctccccccttgttcccacctcctttctttcggggaggccgaagcccgttgctgtctcccgacatgaagaacttaatgcttgagctggaaacgtcccagtcgccctgcatgcaaggcagcctcggatcacctggccccccagggccgcagggtccacccgggctcccaggcaaaacagggccgaaaggagaaaagggcgaattagggagacccgggaggaagggcaggcctggtcccccaggggtcccagggatgccgggccccattgggtggcctgggcccgagggccctagaggggagaagggtgatctgggtatgatggggctacccggctcccgcggaccaatgggctccaagggctaccccggaagccgcggggagaaaggatctaggggcgagaagggagatctgggtccgaagggtgaaaaaggcttccctggcttcccgggcatgctgggacagaagggcgagatgggccctaagggggagcccggcattgcgggtcataggggacctaccggcagacctggaaaacgcggaaaacagggtcaaaagggcgacagtggggtcatgggacctccagggaaaccaggccctagtggccaaccaggccgccctggacccccgggccccccacctgccggacagctcattatgggtcccaaaggggagagaggattccccggacctccaggacgttgcttgtgtggccctaccatgaacgtaaacaacccttcctatggggagagcgtctatgggcccagtagtccgagagttccggtgatatttgttgtgaataatcaggaagagttagaacgccttaacacacaaaatgcaattgcctttcgtcgggaccagcggagtctttatttcaaagactcactgggctggctgccaatacaactgacaccattttaccctgtggactacaccgccgaccagcacggaacgtgcggagacggactcctgcagccaggagaggaatgcgacgacggtaactctgacgtcggcgacgactgtatcagatgccaccgtgcgtattgcggtgacggtcacaggcacgaaggagtcgaggactgcgacggttctgactttggctatcttacctgcgagacttacctacccggcagttatggcgatttacagtgcactcagtattgttacattgacagtacgccatgccgctacttcacgtag

SEQ ID NO: 231352 - DNA, 1338 bp, Artificial Sequence
  derived and/or modified sequence
atgaccggcagcagcttcagcctggcccacctgctgatcatcagcggtttgctctgttatagcgccggctgcctggctcttccctccttggatcagaagaagcgcgggggtcacaaagcctgctgcttactgacacccccaccgccccctttatttccaccaccatttttcagggggggcagaagcccgctcctcagtcccgacatgaaaaatctcatgcttgagcttgaaacctcccagtctccgtgtatgcaggggtccctcggcagtccaggaccgcctggcccccagggcccacccggtctgcccgggaagacagggccaaagggtgagaaaggtgagctgggtcgcccaggacgaaaaggcaggccaggacccccgggcgtcccagggatgccaggacccatcgggtggccaggaccagagggccccaggggcgagaagggggatctggggatgatgggcctccccggcagccgcggtcccatgggctccaaggggtatcccggcagcaggggcgaaaaggggtcccgcggcgagaaaggcgatctcgggcccaaaggcgagaagggctttcctggcttccccggcatgctgggccagaagggcgaaatgggccccaagggggagccaggcatagcgggacatcgtggccccacgggccgacctgggaaaagaggaaagcaagggcagaagggggactccggcgtaatgggaccccccggtaagcccggaccatctggtcagcccgggcgaccgggccccccaggcccacctccagcgggccagttgattatgggccctaaaggggagagggggtttcctgggccccccggacgatgcctatgcggacccaccatgaatgtgaataacccttcgtatggggagtctgtttacgggccctcttcgcctagggttcctgtgattttcgtagtgaataatcaggaggagctggaaagactcaatacgcagaacgctatcgcttttagacgagaccagaggtcactgtactttaaagactccttgggctggctgcctatccagctcacaccgttttatcctgtggactacactgctgatcaacatggaacttgtggcgatgggttactgcagcctggtgaggagtgtgacgacggcaattcagacgtcggagatgattgtatcagatgccacagagcctactgtggagatggccaccgccatgaaggggtggaggactgcgacgggtccgactttggatacttgacgtgcgagacctacctccccgggtcttacggtgatctccaatgcacccagtactgctacatcgattctacaccttgcagatatttcacctag

SEQ ID NO: 231353 - DNA, 585 bp, Artificial Sequence
  derived and/or modified sequence
atcagcggcctgctgtgctacagcgccggctgcctggccctgccctcattggaccagaagaagcgggggggccacaaagcttgttgccttttaaccccacctccccccccactttttcctccaccattcttccggggcggtagaagtcctgggcctcccggcctccccggcaagactggccctaaaggagaaaagggcgagttgggtagaccaggtagaaagggcaggcccgggcccccgggcgtgccaggaatgcccgggcctattggttggcccggccccgaaggcccacgtggagaaaagggtgacctgggaatgatgggtctgcccggcagcaggggtccgatgggctcaaaaggatacccagggtctaggggtgagaagggctccagaggagaaaaaggcgacctagggcccaaaggagaaaagggattccctggatttcccggaatgctcggacagaaaggagagatgggtccgaaaggtgaacccggaatcgcaggacaccgtggccccacaggaaggcctggtaaacgggggaagcagggccagaagggcgactcgggcgttatgggcccaccctag

SEQ ID NO: 231354 - DNA, 1338 bp, Artificial Sequence
  derived and/or modified sequence
atgaccggcagcagcttcagcctggcccacctgctgatcatcagcgggttgctgtgttactcggcgggttgcttagcgttgccaagccttgatcagaagaaacgcggcggtcataaggcttgttgtcttctcacgccaccacccccgcctctgttcccacctcctttttttagaggcgggagatccccccttctgtcccccgatatgaaaaatctcatgcttgagctcgaaactagccagagcccctgtatgcagggatccctcgggagtccaggccctccaggaccccaaggaccacccggactgccggggaaaacaggacctaaaggcgagaagggtgaactcgggcgacctggccgcaagggccggcctgggccgccaggagtacccggtatgccaggacccatcggttggccaggccctgagggaccaaggggtgagaagggggatcttgggatgatgggattaccaggaagcaggggacccatgggtagtaagggctaccctggtagcaggggggagaaaggttctagaggcgaaaagggcgacctaggtcccaaaggtgagaagtgtaacccattgctcctcttgttcccttctttccaaggtgagatgggccccaaaggggaaccgggcatcgccggacacagaggtcctacaggtagaccagggaagcggggcaaacagggtcagaaaggggacagcggtgtcatgggccctcccgggaaaccaggtccttctgggcagcccggtagacctggaccgcccggccccccacccgctggtcagttgataatgggccccaagggggaaagagggtttccaggacccccgggccgatgtctttgtggccctactatgaacgtcaataatccatcttatggagaaagtgtgtatggacctagttctccaagagtgccagtcattttcgtcgtgaacaaccaggaagagctggaacggttgaacacccaaaatgcaatagcgttcagacgtgaccagcgatccctatacttcaaagacagcctgggctggctgccaatccagctgacgcccttttatcccgttgattacactgctgaccagcacggcacatgcggcgacggcctactccagcctggggaggagtgcgacgacggtaactctgatgtcggagacgattgcatccggtgccacagggcttattgcggagatgggcataggcacgaaggcgttgaggattgtgacggatccgatttcggatatctgacctgcgaaacgtacctccccggctcctacggagacctgcagtgtacacagtattgttacatcgattcaacaccgtgcagatatttcacgtag

SEQ ID NO: 231355 - DNA, 1338 bp, Artificial Sequence
  derived and/or modified sequence
atgacaggcagctccttctctctggcgcatcttctaataatttctgggctgttgtgctactccgccggatgtctggctctaccctccctcgatcagaagaaacgcggaggccataaggcttgctgccttcttacccccccaccgccacctctgtttccccctcctttttttagaggcggtagaagccccttgctgtcacccgacatgaaaaacctgatgctggaactagagacttcacagagcccttgtatgcagggatccttaggatccccagggccacccggaccacagggacccccagggcttcccggtaagaccggcccaaaaggtgaaaaaggggagttgggtaggccgggtaggaagggcagaccaggaccaccaggggtccccggtatgccgggacctattggttggcctggccctgagggacccagaggcgaaaaaggcgacctcgggatgatggggttaccaggtagtcgaggcccaatgggaagcaagggctatccagggtcccgtggggagaagggatccagaggcgaaaagggagacctaggccctaaaggagagaaaggctttccaggctttccagggatgttaggacagaagggagagatgggccctaagggtgaaccagggatcgccggacataggggccctacaggcagacctggcaaaagaggtaagcagggccagaaaggagatagcggcgtcatgggcccacctggcaagcccggaccttctggacagccaggtcgaccaggccctccgggaccaccccctgcaggccaactgataatgggtcctaagggcgagcggggattccctgggccaccaggtcggtgcctatgtggacccaccatgaacgtgaataatccttcttatggggagtcagtttatggaccatcttcgccacgcgtgcccgttattttcgtcgttaataatcaggaagagctggaacgattgaatactcagaatgctatcgccttccggcgtgaccagcgctctctatacttcaaggactcactcgggtggcttccgatccagctgacccccttttacccagtggactataccgctgaccaacatggaacctgcggcgacgggctgttgcagccaggcgaggaatgcgacgacggcaatagcgacgttggagacgattgcatccgctgccaccgggcatattgcggagacgggcacaggcacgagggagtggaggactgcgacggtagtgacttcggatatcttacctgtgaaacatacctccccggtagctacggcgacttgcaatgcacccagtattgctatattgactcaacaccttgtaggtactttacctag

SEQ ID NO: 231356 - DNA, 1266 bp, Artificial Sequence
  derived and/or modified sequence
atggtcgtcctcaaccctatgacattgggaatatacctgcaattgttctttctgtcaatcgtgtctcagcctaccttcatcaacagtgtgctgcccatcagcgccgcactacccagccttgatcagaaaaagagaggtggacacaaggcgtgttgtttgcttacgcccccacctccacccctttttcctccaccttttttcagggggggaaggagtcccggaccccctggccttccaggtaagacggggcctaagggggagaaaggcgaattggggaggcccggacgtaagggtcggccaggaccacccggagtgccaggtatgccaggccctatcggttggcctggtcctgagggccctcgaggagagaagggtgacctggggatgatggggctccccggatctagaggcccaatgggttcaaagggttacccaggctcgagaggagaaaaaggcagccggggtgagaaaggcgacttaggtccaaaaggtgagaaaggttttccgggttttcccggaatgcttggacagaaaggcgaaatgggtccaaaaggggaacccggaatcgcagggcatcgcggaccaactgggagaccgggtaagcggggaaaacaggggcaaaagggtgattcgggtgtgatggggcctccgggtaagcccggtccctcgggccagcccggtaggcccggtccccctggccctccaccagctgggcagctgattatgggtccaaaaggcgagcggggattccccggaccccctgggaggtgcctctgcggcccaacaatgaacgtcaacaatccctcctatggcgagagcgtctacggtccatcatcacccagggtgcccgtgattttcgtcgttaataaccaagaggaactcgaaagactgaatacccagaatgctatagccttcagacgggaccaacgcagcctctacttcaaagatagtctgggatggctgcctatccaactgaccccattttatcctgtggattacactgccgatcagcacgggacctgcggcgacggcttgcttcagcccggagaagaatgcgatgatggaaattcagatgtgggggatgattgtattagatgtcatcgcgcatattgcggcgacgggcaccgacacgaaggggttgaggattgtgatggctcagacttcggttacctgacttgcgaaacctatctaccgggatcttatggagatctgcagtgcacacaatactgttacatcgactctaccccctgtcgttacttcacctag

SEQ ID NO: 231357 - DNA, 1368 bp, Artificial Sequence
  derived and/or modified sequence
atggtggtgcttaacccgatgacactcggaatctatcttcaacttttttttctgagcatcgtgtcccagcctaccttcatcaactctgtgcttccaatctccgctgcgctgcctagtctcgatcagaagaaaaggggaggacacaaagcatgctgtctgctcaccccaccacctcctcccctgttcccacccccatttttcaggggagggagatctccccttctgagtccagatatgaaaaatctgatgcttgagctggagactagccaatcaccttgcatgcagggctcactgggctcacccggtcctccgggaccacaaggacctccaggcctgcctgggaaaactggccctaagggcgagaagggcgagttaggcagacccggaaggaaaggcagaccaggccctcctggggtgccgggtatgcctggacccatagggtggcctggccctgagggcccaaggggcgagaaaggtgacctaggtatgatggggctgcctggaagtagaggtccgatgggaagcaagggctatccaggcagtaggggagagaaagggagccgtggcgagaagggggacctcgggcctaagggagagaaaggcttccccggtttccccggaatgctgggtcagaagggcgagatgggccctaaaggtgaaccaggaatcgcaggccaccgaggacccacaggaaggcctggtaaaaggggcaaacagggacagaagggtgattctggggtgatgggcccacctggaaagcctggcccttccggtcaaccagggcgtcccggacctcctggcccaccacccgcaggccaactcattatgggccctaaaggcgagcggggatttcctggaccacctgggagatgtctttgtggacctactatgaatgtgaataatccaagttatggggagtctgtctacgggccaagttcccccagggtaccagttatcttcgtcgtcaataaccaggaggaactggagcgccttaacacccagaatgccattgcctttagacgcgatcagagatcgctgtatttcaaggacagcctgggctggctccctatccaactcacaccattctatccagtcgattacacagcggatcagcatggaacatgtggggatggactcctgcagcctggggaagagtgcgacgatgggaattctgatgttggggacgattgcatcagatgtcatcgcgcatactgtggagacggccaccgtcatgaaggcgtggaagactgcgatgggtcggatttcggctatctgacatgtgaaacctatctgcctggctcctacggtgacctgcaatgtactcaatactgctatatagattctacaccatgccgttatttcacctag

SEQ ID NO: 231358 - DNA, 1338 bp, Artificial Sequence
  derived and/or modified sequence
atgacaggctctagtttctctctcgcacacttactgattatcagcgggctactctgttatagcgccggatgcctcgcgttgcccagcctggaccagaaaaagcgcggaggacataaagcctgctgtctgctgactccacccccaccaccacttttccccccaccattcttccgcggtggacggtcccctctgttatcacccgacatgaaaaacttgatgctggagctcgaaacgagccagtcaccatgcatgcagggctccctcggaagccccggaccgcctgggcctcaggggcctccgggtttacctggcaaaacaggacctaagggggagaagggagagctagggcgtcccggaagaaagggccgacccggtcctccaggagtcccagggatgccgggacctatcgggtggcctggacccgagggaccacgaggggaaaagggggacttggggatgatgggactgccagggtcccgtgggccaatgggaagcaaaggctatcctggttcccgcggagaaaaagggagtagaggcgagaaaggagacctggggccaaagggggaaaagggctttccaggattcccgggaatgctgggtcaaaaaggagaaatgggtcccaagggggaacctgggattgccggacacagaggccctaccggacgtccgggaaagagagggaagcagggccagaaaggcgactctggggtcatgggccctccaggtaagcccggaccttcggggcagccagggcgacccggaccccctggtccaccgccagccggtcagctgatcatgggcccaaagggtgaaagagggtttccaggacctccgggtcgttgtctgtgtggccctacaatgaacgtaaacaacccttcctacggtgaatccgtgtatggaccttcaagtcctcgggtcccagtgatcttcgtggtgaacaaccaggaagaattggagaggctcaatacacaaaacgcaattgcctttaggcgcgaccagaggtccctgtacttcaaagattccctgggctggctgccaatccagctgactccattttatcccgtggattacaccgcggatcagcatggaacctgcggcgacggcctgctgcaacccggtgaagagtgcgacgatgggaattcagatgtcggagatgactgtatccgatgccacagggcctactgcggcgacgggcaccgacacgagggtgtagaggattgcgatgggagcgattttggatatctcacctgtgaaacttatttgccgggtagctatggggacctgcagtgtacacagtactgctacattgactctacaccatgccgatactttacctag

SEQ ID NO: 231359 - DNA, 585 bp, Artificial Sequence
  derived and/or modified sequence
attagtggacttctgtgttattccgcgggttgcctcgctcttccatctctcgaccagaagaagagggggggacataaagcttgctgccttttaaccccacccccacccccattgtttcctcctccatttttccgtggtggacgatcaccaggccctcctgggctgcccggtaagaccgggccaaaaggggaaaagggggagctgggacgcccagggcgaaagggccgacccggacctcccggagtgcccggtatgccaggccctattgggtggcccggacccgaggggccacggggagagaagggcgatctaggaatgatggggttaccgggtagccggggacctatgggtagcaaaggataccctggatcaagaggggagaagggttctagaggcgagaaaggggacttgggcccaaaaggcgagaagggctttcctggcttccctggtatgctggggcagaaaggcgagatgggcccaaagggcgagccagggattgccggtcaccggggaccgacaggacgcccagggaagaggggcaagcagggccagaaaggtgacagtggggtgatgggacccccatag

SEQ ID NO: 231360 - DNA, 1338 bp, Artificial Sequence
  derived and/or modified sequence
atgacagggtctagttttagtctcgcacatctgcttataataagcggattgttgtgttatagtgcgggttgcctggccctgccgtcgctggatcaaaagaaacggggaggccacaaagcttgctgtttgttaacacctccaccaccccctctgttccctcccccattcttcagaggcggacgatctcccctgctgagcccagatatgaaaaacctgatgcttgaactggagacatcacagtcaccctgcatgcaaggatctctgggaagccccggaccccctgggcctcaaggtcccccaggactgcctggaaaaacgggcccaaaaggggaaaagggcgaactgggcaggcctggcagaaaggggagacccggaccaccgggtgtgccgggaatgccgggacccatcggatggcccggacctgaaggccctaggggagagaaaggagacctgggaatgatggggctgcctgggtcaagggggcctatgggttctaagggctatccaggctccaggggggaaaaggggagcaggggggaaaagggagatcttggacccaaaggagaaaaatgcaatcctctgctcctattgttcccctcattccagggagagatgggccctaaaggcgaacccggaatcgctggtcatcgaggtcccacaggcagacctggaaaaagaggaaagcaggggcagaagggagactctggagtgatgggtccacccggtaagcctgggccttctgggcagccaggaaggccaggacctcccggtcccccacccgcaggacagctcatcatgggccctaagggcgagagaggatttcccggaccacctggaaggtgtctgtgtggtccaaccatgaacgtaaataacccctcttacggagagtcagtatatggaccctcctcccccagagtgcctgtgattttcgttgtaaataaccaggaagagctcgagaggctaaatacgcagaacgcgatcgccttccgacgagaccagaggagtctctattttaaagattccctgggctggctccccattcaactgacgccattttaccctgttgactacaccgccgatcaacacggcacatgcggggatggtctgctgcaaccaggcgaggagtgtgatgatggtaatagcgacgtgggggatgactgtatacgatgccatagagcctactgcggagatggccaccggcatgagggggttgaggactgcgatggctcagatttcgggtatctaacctgtgaaacctacttgcctgggtcttacggcgatctgcagtgtacgcagtactgttacatcgattccactccctgcaggtatttcacatag

SEQ ID NO: 231361 - DNA, 3134 bp, Artificial Sequence
  derived and/or modified sequence
atatcctcccctgggctgaaggcactcttgtcctccaagcctcccctacagcagtgttcatgggcagctggagcagggctgcctacccattgctactcccaggagctcaggactggctccagacccctggcatctggagcagaagcaacatcaaagcagggattggccaactcccacccctaatgccaaacaggccaggcactgggagcactcagaggcgtgacgaatctcagcctgtctccggctagtgttccctggccagtccgctttgggccctgcctcacaatgacgggctcatcattcagcctcgctcatctgctcatcatttcaggactgctctgttactcggcaggctgcttggcccttcccagcctggatcagaagaagcgtggtggccacaaagcatgctgcctgctgacgcctcctccaccaccactgttcccaccaccattcttcagaggtggccgaagtccgcttctctccccagacatgaagaatctcatgctggaactggagacctcgcagtccccgtgcatgcaaggctcgctaggctcccctgggcctcccggcccccagggtccaccggggcttcctggcaagacaggaccaaagggagaaaagggggagcttggccgaccaggaaggaagggtagacctggccccccaggtgttcctggcatgcctgggcccatcggttggccaggccctgaaggacccaggggtgaaaaaggtgacctgggtatgatgggcttgccagggtcaagaggaccaatgggctccaagggctaccctggatccagaggggaaaagggatccagaggtgaaaagggtgacctgggtcccaaaggagaaaagggtttcccaggatttcctggaatgttggggcagaaaggtgaaatgggtccaaaaggtgaacctgggatagcaggacaccgaggacccacaggaagaccaggaaaacgaggcaagcagggacagaaaggggatagtggagttatgggcccaccaggcaagcctgggccttctggtcaacctggccgtccggggcccccaggccccccacctgcaggacaacttataatgggacccaaaggggaaagaggatttcccgggcctccaggaagatgtctttgtggacccactatgaatgtgaataacccttcctacggggaatctgtgtatgggcccagttccccgcgagttcctgtgatttttgtggtcaacaaccaggaggagcttgagaggctgaacacccaaaacgccattgccttccgcagagaccagagatctctgtacttcaaggacagccttggctggctccccatccagctgacccctttctaccctgtggattacactgcagaccagcacggcacctgtggggatgggctcctgcagcctggggaggagtgtgacgacggtaacagcgatgtgggtgacgactgcatccgctgtcaccgtgcctactgtggagatggtcaccggcatgagggtgtggaggactgtgacggctctgactttggctacctgacatgcgagacctatctccctgggtcatatggagacctgcaatgcacccagtactgctacatcgactccacgccctgccgctacttcacctgagggccgtgaggagaaggtgggctgcgccccacagaactggcagcagcttctccactgtcatcaaactggccatgtcctggccccgtctccaccaacctttgtgtgacaaaaacaaggacaaattcctgctactaagacatgctgttaactcagtctgactggaagaatttaggaccactgcatcctgtcttaatccaaggtactggaaaaccttccacatgcccaacctgagacctgttccccatcgctaccatttggccaaacaaccggctacaatgctcttcctcttctggaatgttgctgacccaggccgtggacttggctgagcactgttagacacacacagacctgcaggctgttttagaatgttttgatctctttggggaatctggagtacaggcctctccgcccctgaccaccgaaacgtgcaggcattctcactcacactgggcagcccgctgtcgggtctctctaggcctatgaaccacaaagcagggaagtgggcacgttctctcggggtggctcacagctttgaacctgccaaaggacccctcgactggccacagcccagcccagcctgacgtggatgtggctgcccaggaaaagacttaactgtgaaaaagtactgagaacccacctgacccaggcttgccccaagcagaggctagagaagaggctcctcttctcagtgtttcccaaaggggcggctcttgtggtttcaaaatctctggcaccatcttgacctcttggctctctctgcactttgccccctgtctcaaaaatgtccctcatgtccatttcctgtccaggagactcatgaggactgtgtgacctgcacaagcccacacctgggcaggctgttggtgtctccttggtccttaggcagatactcccctgagtccccgatctagggccagctgcagagggctctctctaggcagagcgttcctggccagagctctacctctttgcctcctgctgacccctgacagcgtcccgtggcatttctttcatgtctgcatattgcatagccttgtcctcctgtgtgcctgagctcctcccttttcaataagattattagtcgtgcatgtctgtgagctgcctttcatcaccatttttcctgagtagggcttagttttattctggaaagacatctccaaggtgaggtccacccccacagcagacctcaagtagaaattgcccaatttttaccagctggagggacacccttgggtttttgtacgaagctatttaatgagcctgtgtcttggggactcagcaggctggagcttggggcctggtggaccatcacctggtgtctgtaggtggacccggtctcccacaggtgacatcaacctgagggtggcgtctttagagacaggcacatgggcagccctgttcccttcgcctctactgcgaggcctggggagatgttgttttcatgctgcttccaccatcacactggggtttctggatgggaaataaaaaaataaaggcagttcatttcccca

SEQ ID NO: 231362 - DNA, 3147 bp, Artificial Sequence
  derived and/or modified sequence
cacacgcacacacacacacacaaacacacgcgcacgcaaacagcagtgaggaagagaaaagcagagataagcaaggctccgcagcagcctcctttctaacttgaccctcgccagaccctggccagcatggttgtcctgaatccaatgactttgggaatttatcttcagcttttcttcctctctatcgtgtctcagccgactttcatcaacagcgttcttccaatctcagcagcccttcccagcctggatcagaagaagcgtggtggccacaaagcatgctgcctgctgacgcctcctccaccaccactgttcccaccaccattcttcagaggtggccgaagtccgcttctctccccagacatgaagaatctcatgctggaactggagacctcgcagtccccgtgcatgcaaggctcgctaggctcccctgggcctcccggcccccagggtccaccggggcttcctggcaagacaggaccaaagggagaaaagggggagcttggccgaccaggaaggaagggtagacctggccccccaggtgttcctggcatgcctgggcccatcggttggccaggccctgaaggacccaggggtgaaaaaggtgacctgggtatgatgggcttgccagggtcaagaggaccaatgggctccaagggctaccctggatccagaggggaaaagggatccagaggtgaaaagggtgacctgggtcccaaaggagaaaagggtttcccaggatttcctggaatgttggggcagaaaggtgaaatgggtccaaaaggtgaacctgggatagcaggacaccgaggacccacaggaagaccaggaaaacgaggcaagcagagttcaagaactccttgcacattaccaagacggcccccagtgccatgtggacaaggcagccggtcacctgtcaccgttgtggctggaaaggagtcccaagcctgcctgctccccagatttgaggaagattacatttcatcagggacagaaaggggatagtggagttatgggcccaccaggcaagcctgggccttctggtcaacctggccgtccggggcccccaggccccccacctgcaggacaacttataatgggacccaaaggggaaagaggatttcccgggcctccaggaagatgtctttgtggacccactatgaatgtgaataacccttcctacggggaatctgtgtatgggcccagttccccgcgagttcctgtgatttttgtggtcaacaaccaggaggagcttgagaggctgaacacccaaaacgccattgccttccgcagagaccagagatctctgtacttcaaggacagccttggctggctccccatccagctgacccctttctaccctgtggattacactgcagaccagcacggcacctgtggggatgggctcctgcagcctggggaggagtgtgacgacggtaacagcgatgtgggtgacgactgcatccgctgtcaccgtgcctactgtggagatggtcaccggcatgagggtgtggaggactgtgacggctctgactttggctacctgacatgcgagacctatctccctgggtcatatggagacctgcaatgcacccagtactgctacatcgactccacgccctgccgctacttcacctgagggccgtgaggagaaggtgggctgcgccccacagaactggcagcagcttctccactgtcatcaaactggccatgtcctggccccgtctccaccaacctttgtgtgacaaaaacaaggacaaattcctgctactaagacatgctgttaactcagtctgactggaagaatttaggaccactgcatcctgtcttaatccaaggtactggaaaaccttccacatgcccaacctgagacctgttccccatcgctaccatttggccaaacaaccggctacaatgctcttcctcttctggaatgttgctgacccaggccgtggacttggctgagcactgttagacacacacagacctgcaggctgttttagaatgttttgatctctttggggaatctggagtacaggcctctccgcccctgaccaccgaaacgtgcaggcattctcactcacactgggcagcccgctgtcgggtctctctaggcctatgaaccacaaagcagggaagtgggcacgttctctcggggtggctcacagctttgaacctgccaaaggacccctcgactggccacagcccagcccagcctgacgtggatgtggctgcccaggaaaagacttaactgtgaaaaagtactgagaacccacctgacccaggcttgccccaagcagaggctagagaagaggctcctcttctcagtgtttcccaaaggggcggctcttgtggtttcaaaatctctggcaccatcttgacctcttggctctctctgcactttgccccctgtctcaaaaatgtccctcatgtccatttcctgtccaggagactcatgaggactgtgtgacctgcacaagcccacacctgggcaggctgttggtgtctccttggtccttaggcagatactcccctgagtccccgatctagggccagctgcagagggctctctctaggcagagcgttcctggccagagctctacctctttgcctcctgctgacccctgacagcgtcccgtggcatttctttcatgtctgcatattgcatagccttgtcctcctgtgtgcctgagctcctcccttttcaataagattattagtcgtgcatgtctgtgagctgcctttcatcaccatttttcctgagtagggcttagttttattctggaaagacatctccaaggtgaggtccacccccacagcagacctcaagtagaaattgcccaatttttaccagctggagggacacccttgggtttttgtacgaagctatttaatgagcctgtgtcttggggactcagcaggctggagcttggggcctggtggaccatcacctggtgtctgtaggtggacccggtctcccacaggtgacatcaacctgagggtggcgtctttagagacaggcacatgggcagccctgttcccttcgcctctactgcgaggcctggggagatgttgttttcatgctgcttccaccatcacactggggtttctggatgggaaataaaaaaataaaggcagttcatttcccca

SEQ ID NO: 231363 - DNA, 1482 bp, Artificial Sequence
  derived and/or modified sequence
acacacaaacacacgcgcacgcaaacagcagtgaggaagagaaaagcagagataagcaaggctccgcagcagcctcctttctaacttgaccctcgccagaccctggccagcatggttgtcctgaatccaatgactttgggaatttatcttcagcttttcttcctctctatcgtgtctcagccgactttcatcaacagcgttcttccaatctcagcagcccttcccagcctggatcagaagaagcgtggtggccacaaagcatgctgcctgctgacgcctcctccaccaccactgttcccaccaccattcttcagaggtggccgaagtccgggtccaccggggcttcctggcaagacaggaccaaagggagaaaagggggagcttggccgaccaggaaggaagggtagacctggccccccaggtgttcctggcatgcctgggcccatcggttggccaggccctgaaggacccaggggtgaaaaaggtgacctgggtatgatgggcttgccagggtcaagaggaccaatgggctccaagggctaccctggatccagaggggaaaagggatccagaggtgaaaagggtgacctgggtcccaaaggagaaaagggtttcccaggatttcctggaatgttggggcagaaaggtgaaatgggtccaaaaggtgaacctgggatagcaggacaccgaggacccacaggaagaccaggaaaacgaggcaagcagggacagaaaggggatagtggagttatgggcccaccaggcaagcctgggccttctggtcaacctggccgtccggggcccccaggccccccacctgcaggacaacttataatgggacccaaaggggaaagaggatttcccgggcctccaggaagatgtctttgtggacccactatgaatgtgaataacccttcctacggggaatctgtgtatgggcccagttccccgcgagttcctgtgatttttgtggtcaacaaccaggaggagcttgagaggctgaacacccaaaacgccattgccttccgcagagaccagagatctctgtacttcaaggacagccttggctggctccccatccagctgacccctttctaccctgtggattacactgcagaccagcacggcacctgtggggatgggctcctgcagcctggggaggagtgtgacgacggtaacagcgatgtgggtgacgactgcatccgctgtcaccgtgcctactgtggagatggtcaccggcatgagggtgtggaggactgtgacggctctgactttggctacctgacatgcgagacctatctccctgggtcatatggagacctgcaatgcacccagtactgctacatcgactccacgccctgccgctacttcacctgagggccgtgaggagaaggtgggctgcgccccacagaactggcagcagcttctccactgtcatcaaactggccatgtcctggccccgtctccaccaacctttgtgtg

SEQ ID NO: 231364 - DNA, 2991 bp, Artificial Sequence
  derived and/or modified sequence
cacacgcacacacacacacacaaacacacgcgcacgcaaacagcagtgaggaagagaaaagcagagataagcaaggctccgcagcagcctcctttctaacttgaccctcgccagaccctggccagcatggttgtcctgaatccaatgactttgggaatttatcttcagcttttcttcctctctatcgtgtctcagccgactttcatcaacagcgttcttccaatctcagcagcccttcccagcctggatcagaagaagcgtggtggccacaaagcatgctgcctgctgacgcctcctccaccaccactgttcccaccaccattcttcagaggtggccgaagtccgcttctctccccagacatgaagaatctcatgctggaactggagacctcgcagtccccgtgcatgcaaggctcgctaggctcccctgggcctcccggcccccagggtccaccggggcttcctggcaagacaggaccaaagggagaaaagggggagcttggccgaccaggaaggaagggtagacctggccccccaggtgttcctggcatgcctgggcccatcggttggccaggccctgaaggacccaggggtgaaaaaggtgacctgggtatgatgggcttgccagggtcaagaggaccaatgggctccaagggctaccctggatccagaggggaaaagggatccagaggtgaaaagggtgacctgggtcccaaaggagaaaagggtttcccaggatttcctggaatgttggggcagaaaggtgaaatgggtccaaaaggtgaacctgggatagcaggacaccgaggacccacaggaagaccaggaaaacgaggcaagcagggacagaaaggggatagtggagttatgggcccaccaggcaagcctgggccttctggtcaacctggccgtccggggcccccaggccccccacctgcaggacaacttataatgggacccaaaggggaaagaggatttcccgggcctccaggaagatgtctttgtggacccactatgaatgtgaataacccttcctacggggaatctgtgtatgggcccagttccccgcgagttcctgtgatttttgtggtcaacaaccaggaggagcttgagaggctgaacacccaaaacgccattgccttccgcagagaccagagatctctgtacttcaaggacagccttggctggctccccatccagctgacccctttctaccctgtggattacactgcagaccagcacggcacctgtggggatgggctcctgcagcctggggaggagtgtgacgacggtaacagcgatgtgggtgacgactgcatccgctgtcaccgtgcctactgtggagatggtcaccggcatgagggtgtggaggactgtgacggctctgactttggctacctgacatgcgagacctatctccctgggtcatatggagacctgcaatgcacccagtactgctacatcgactccacgccctgccgctacttcacctgagggccgtgaggagaaggtgggctgcgccccacagaactggcagcagcttctccactgtcatcaaactggccatgtcctggccccgtctccaccaacctttgtgtgacaaaaacaaggacaaattcctgctactaagacatgctgttaactcagtctgactggaagaatttaggaccactgcatcctgtcttaatccaaggtactggaaaaccttccacatgcccaacctgagacctgttccccatcgctaccatttggccaaacaaccggctacaatgctcttcctcttctggaatgttgctgacccaggccgtggacttggctgagcactgttagacacacacagacctgcaggctgttttagaatgttttgatctctttggggaatctggagtacaggcctctccgcccctgaccaccgaaacgtgcaggcattctcactcacactgggcagcccgctgtcgggtctctctaggcctatgaaccacaaagcagggaagtgggcacgttctctcggggtggctcacagctttgaacctgccaaaggacccctcgactggccacagcccagcccagcctgacgtggatgtggctgcccaggaaaagacttaactgtgaaaaagtactgagaacccacctgacccaggcttgccccaagcagaggctagagaagaggctcctcttctcagtgtttcccaaaggggcggctcttgtggtttcaaaatctctggcaccatcttgacctcttggctctctctgcactttgccccctgtctcaaaaatgtccctcatgtccatttcctgtccaggagactcatgaggactgtgtgacctgcacaagcccacacctgggcaggctgttggtgtctccttggtccttaggcagatactcccctgagtccccgatctagggccagctgcagagggctctctctaggcagagcgttcctggccagagctctacctctttgcctcctgctgacccctgacagcgtcccgtggcatttctttcatgtctgcatattgcatagccttgtcctcctgtgtgcctgagctcctcccttttcaataagattattagtcgtgcatgtctgtgagctgcctttcatcaccatttttcctgagtagggcttagttttattctggaaagacatctccaaggtgaggtccacccccacagcagacctcaagtagaaattgcccaatttttaccagctggagggacacccttgggtttttgtacgaagctatttaatgagcctgtgtcttggggactcagcaggctggagcttggggcctggtggaccatcacctggtgtctgtaggtggacccggtctcccacaggtgacatcaacctgagggtggcgtctttagagacaggcacatgggcagccctgttcccttcgcctctactgcgaggcctggggagatgttgttttcatgctgcttccaccatcacactggggtttctggatgggaaataaaaaaataaaggc

SEQ ID NO: 231365 - DNA, 2937 bp, Artificial Sequence
  derived and/or modified sequence
atatcctcccctgggctgaaggcactcttgtcctccaagcctcccctacagcagtgttcatgggcagctggagcagggctgcctacccattgctactcccaggagctcaggactggctccagacccctggcatctggagcagaagcaacatcaaagcagggattggccaactcccacccctaatgccaaacaggccaggcactgggagcactcagaggcgtgacgaatctcagcctgtctccggctagtgttccctggccagtccgctttgggccctgcctcacaatgacgggctcatcattcagcctcgctcatctgctcatcatttcaggactgctctgttactcggcaggctgcttggcccttcccagcctggatcagaagaagcgtggtggccacaaagcatgctgcctgctgacgcctcctccaccaccactgttcccaccaccattcttcagaggtggccgaagtccgcttctctccccagacatgaagaatctcatgctggaactggagacctcgcagtccccgtgcatgcaaggctcgctaggctcccctgggcctcccggcccccagggtccaccggggcttcctggcaagacaggaccaaagggagaaaagggggagcttggccgaccaggaaggaagggtagacctggccccccaggtgttcctggcatgcctgggcccatcggttggccaggccctgaaggacccaggggtgaaaaaggtgacctgggtatgatgggcttgccagggtcaagaggaccaatgggctccaagggctaccctggatccagaggggaaaagggatccagaggtgaaaagggtgacctgggtcccaaaggagaaaagggtttcccaggatttcctggaatgttggggcagaaaggtgaaatgggtccaaaaggtgaacctgggatagcaggacaccgaggacccacaggaagaccaggaaaacgaggcaagcagggacagaaaggggatagtggagttatgggcccaccaggcaagcctgggccttctggtcaacctggccgtccggggcccccaggccccccacctgcaggacaacttataatgggacccaaaggggaaagaggatttcccgggcctccaggaagatgtctttgtggacccactatgaatgtgaataacccttcctacggggaatctgtgtatgggcccagttccccgcgagttcctgtgatttttgtggtcaacaaccaggaggagcttgagaggctgaacacccaaaacgccattgccttccgcagagaccagagatctctgtacttcaaggacagccttggctggctccccatccagctgacccctttctaccctgtggattacactgcagaccagcacggcacctgtggggatgggctcctgcagcctggggaggagtgtgacgacggtaacagcgatgtgggtgacgactgcatccgctgtcaccgtgcctactgtggagatggtcaccggcatgagggtgtggaggactgtgacggctctgactttggctacctgacatgcgagacctatctccctgggtcatatggagacctgcaatgcacccagtactgctacatcgactccacgccctgccgctacttcacctgagggccgtgaggagaaggtgggctgcgccccacagaactggcagcagcttctccactgtcatcaaactggccatgtcctggccccgtctccaccaacctttgtgtgacaaaaacaaggacaaattcctgctactaagacatgctgttaactcagtctgactggaagaatttaggaccactgcatcctgtcttaatccaaggtactggaaaaccttccacatgcccaacctgagacctgttccccatcgctaccatttggccaaacaaccggctacaatgctcttcctcttctggaatgttgctgacccaggccgtggacttggctgagcactgttagacacacacagacctgcaggctgttttagaatgttttgatctctttggggaatctggagtacaggcctctccgcccctgaccaccgaaacgtgcaggcattctcactcacactgggcagcccgctgtcgggtctctctaggcctatgaaccacaaagcagggaagtgggcacgttctctcggggtggctcacagctttgaacctgccaaaggacccctcgactggccacagcccagcccagcctgacgtggatgtggctgcccaggaaaagacttaactgtgaaaaagtactgagaacccacctgacccaggcttgccccaagcagaggctagagaagaggctcctcttctcagtgtttcccaaaggggcggctcttgtggtttcaaaatctctggcaccatcttgacctcttggctctctctgcactttgccccctgtctcaaaaatgtccctcatgtccatttcctgtccaggagactcatgaggactgtgtgacctgcacaagcccacacctgggcaggctgttggtgtctccttggtccttaggcagatactcccctgagtccccgatctagggccagctgcagagggctctctctaggcagagcgttcctggccagagctctacctctttgcctcctgctgacccctgacagcgtcccgtggcatttctttcatgtctgcatattgcatagccttgtcctcctgtgtgcctgagctcctcccttttcaataagattattagtcgtgcatgtctgtgagctgcctttcatcaccatttttcctgagtagggcttagttttattctggaaagacatctccaaggtggacccggtctcccacaggtgacatcaacctgagggtggcgtctttagagacaggcacatgggcagccctgttcccttcgcctctactgcgaggcctggggagatgttgttttcatgctgcttccaccatcacactggggtttctggatgg

SEQ ID NO: 231366 - DNA, 582 bp, Artificial Sequence
  derived and/or modified sequence
atttcaggactgctctgttactcggcaggctgcttggcccttcccagcctggatcagaagaagcgtggtggccacaaagcatgctgcctgctgacgcctcctccaccaccactgttcccaccaccattcttcagaggtggccgaagtccgggtccaccggggcttcctggcaagacaggaccaaagggagaaaagggggagcttggccgaccaggaaggaagggtagacctggccccccaggtgttcctggcatgcctgggcccatcggttggccaggccctgaaggacccaggggtgaaaaaggtgacctgggtatgatgggcttgccagggtcaagaggaccaatgggctccaagggctaccctggatccagaggggaaaagggatccagaggtgaaaagggtgacctgggtcccaaaggagaaaagggtttcccaggatttcctggaatgttggggcagaaaggtgaaatgggtccaaaaggtgaacctgggatagcaggacaccgaggacccacaggaagaccaggaaaacgaggcaagcagggacagaaaggggatagtggagttatgggcccacca

SEQ ID NO: 231367 - DNA, 2849 bp, Artificial Sequence
  derived and/or modified sequence
atgacgggctcatcattcagcctcgctcatctgctcatcatttcaggactgctctgttactcggcaggctgcttggcccttcccagcctggatcagaagaagcgtggtggccacaaagcatgctgcctgctgacgcctcctccaccaccactgttcccaccaccattcttcagaggtggccgaagtccgcttctctccccagacatgaagaatctcatgctggaactggagacctcgcagtccccgtgcatgcaaggctcgctaggctcccctgggcctcccggcccccagggtccaccggggcttcctggcaagacaggaccaaagggagaaaagggggagcttggccgaccaggaaggaagggtagacctggccccccaggtgttcctggcatgcctgggcccatcggttggccaggccctgaaggacccaggggtgaaaaaggtgacctgggtatgatgggcttgccagggtcaagaggaccaatgggctccaagggctaccctggatccagaggggaaaagggatccagaggtgaaaagggtgacctgggtcccaaaggagaaaagtgcaatcctctcttgcttctctttccttctttccagggtgaaatgggtccaaaaggtgaacctgggatagcaggacaccgaggacccacaggaagaccaggaaaacgaggcaagcagggacagaaaggggatagtggagttatgggcccaccaggcaagcctgggccttctggtcaacctggccgtccggggcccccaggccccccacctgcaggacaacttataatgggacccaaaggggaaagaggatttcccgggcctccaggaagatgtctttgtggacccactatgaatgtgaataacccttcctacggggaatctgtgtatgggcccagttccccgcgagttcctgtgatttttgtggtcaacaaccaggaggagcttgagaggctgaacacccaaaacgccattgccttccgcagagaccagagatctctgtacttcaaggacagccttggctggctccccatccagctgacccctttctaccctgtggattacactgcagaccagcacggcacctgtggggatgggctcctgcagcctggggaggagtgtgacgacggtaacagcgatgtgggtgacgactgcatccgctgtcaccgtgcctactgtggagatggtcaccggcatgagggtgtggaggactgtgacggctctgactttggctacctgacatgcgagacctatctccctgggtcatatggagacctgcaatgcacccagtactgctacatcgactccacgccctgccgctacttcacctgagggccgtgaggagaaggtgggctgcgccccacagaactggcagcagcttctccactgtcatcaaactggccatgtcctggccccgtctccaccaacctttgtgtgacaaaaacaaggacaaattcctgctactaagacatgctgttaactcagtctgactggaagaatttaggaccactgcatcctgtcttaatccaaggtactggaaaaccttccacatgcccaacctgagacctgttccccatcgctaccatttggccaaacaaccggctacaatgctcttcctcttctggaatgttgctgacccaggccgtggacttggctgagcactgttagacacacacagacctgcaggctgttttagaatgttttgatctctttggggaatctggagtacaggcctctccgcccctgaccaccgaaacgtgcaggcattctcactcacactgggcagcccgctgtcgggtctctctaggcctatgaaccacaaagcagggaagtgggcacgttctctcggggtggctcacagctttgaacctgccaaaggacccctcgactggccacagcccagcccagcctgacgtggatgtggctgcccaggaaaagacttaactgtgaaaaagtactgagaacccacctgacccaggcttgccccaagcagaggctagagaagaggctcctcttctcagtgtttcccaaaggggcggctcttgtggtttcaaaatctctggcaccatcttgacctcttggctctctctgcactttgccccctgtctcaaaaatgtccctcatgtccatttcctgtccaggagactcatgaggactgtgtgacctgcacaagcccacacctgggcaggctgttggtgtctccttggtccttaggcagatactcccctgagtccccgatctagggccagctgcagagggctctctctaggcagagcgttcctggccagagctctacctctttgcctcctgctgacccctgacagcgtcccgtggcatttctttcatgtctgcatattgcatagccttgtcctcctgtgtgcctgagctcctcccttttcaataagattattagtcgtgcatgtctgtgagctgcctttcatcaccatttttcctgagtagggcttagttttattctggaaagacatctccaaggtgaggtccacccccacagcagacctcaagtagaaattgcccaatttttaccagctggagggacacccttgggtttttgtacgaagctatttaatgagcctgtgtcttggggactcagcaggctggagcttggggcctggtggaccatcacctggtgtctgtaggtggacccggtctcccacaggtgacatcaacctgagggtggcgtctttagagacaggcacatgggcagccctgttcccttcgcctctactgcgaggcctggggagatgttgttttcatgctgcttccaccatcacactggggtttctggatgggaaataaaaaaataaaggcagttcatttcccca

SEQ ID NO: 231368 - DNA, 1338 bp, Artificial Sequence
  derived and/or modified sequence
atgaccggcagcagcttcagcctggcccacctgctgatcatcagcggcctgctgtgctacagcgccggctgcctggccctgcccagcctggaccagaagaagagaggcggccacaaggcctgctgcctgctgacccccccccccccccccctgttccccccccccttcttcagaggcggcagaagccccctgctgagccccgacatgaagaacctgatgctggagctggagaccagccagagcccctgcatgcagggcagcctgggcagccccggcccccccggcccccagggcccccccggcctgcccggcaagaccggccccaagggcgagaagggcgagctgggcagacccggcagaaagggcagacccggcccccccggcgtgcccggcatgcccggccccatcggctggcccggccccgagggccccagaggcgagaagggcgacctgggcatgatgggcctgcccggcagcagaggccccatgggcagcaagggctaccccggcagcagaggcgagaagggcagcagaggcgagaagggcgacctgggccccaagggcgagaagggcttccccggcttccccggcatgctgggccagaagggcgagatgggccccaagggcgagcccggcatcgccggccacagaggccccaccggcagacccggcaagagaggcaagcagggccagaagggcgacagcggcgtgatgggcccccccggcaagcccggccccagcggccagcccggcagacccggcccccccggccccccccccgccggccagctgatcatgggccccaagggcgagagaggcttccccggcccccccggcagatgcctgtgcggccccaccatgaacgtgaacaaccccagctacggcgagagcgtgtacggccccagcagccccagagtgcccgtgatcttcgtggtgaacaaccaggaggagctggagagactgaacacccagaacgccatcgccttcagaagagaccagagaagcctgtacttcaaggacagcctgggctggctgcccatccagctgacccccttctaccccgtggactacaccgccgaccagcacggcacctgcggcgacggcctgctgcagcccggcgaggagtgcgacgacggcaacagcgacgtgggcgacgactgcatcagatgccacagagcctactgcggcgacggccacagacacgagggcgtggaggactgcgacggcagcgacttcggctacctgacctgcgagacctacctgcccggcagctacggcgacctgcagtgcacccagtactgctacatcgacagcaccccctgcagatacttcacctag

SEQ ID NO: 231369 - DNA, 1266 bp, Artificial Sequence
  derived and/or modified sequence
atggtggtgctgaaccccatgaccctgggcatctacctgcagctgttcttcctgagcatcgtgagccagcccaccttcatcaacagcgtgctgcccatcagcgccgccctgcccagcctggaccagaagaagagaggcggccacaaggcctgctgcctgctgacccccccccccccccccctgttccccccccccttcttcagaggcggcagaagccccggcccccccggcctgcccggcaagaccggccccaagggcgagaagggcgagctgggcagacccggcagaaagggcagacccggcccccccggcgtgcccggcatgcccggccccatcggctggcccggccccgagggccccagaggcgagaagggcgacctgggcatgatgggcctgcccggcagcagaggccccatgggcagcaagggctaccccggcagcagaggcgagaagggcagcagaggcgagaagggcgacctgggccccaagggcgagaagggcttccccggcttccccggcatgctgggccagaagggcgagatgggccccaagggcgagcccggcatcgccggccacagaggccccaccggcagacccggcaagagaggcaagcagggccagaagggcgacagcggcgtgatgggcccccccggcaagcccggccccagcggccagcccggcagacccggcccccccggccccccccccgccggccagctgatcatgggccccaagggcgagagaggcttccccggcccccccggcagatgcctgtgcggccccaccatgaacgtgaacaaccccagctacggcgagagcgtgtacggccccagcagccccagagtgcccgtgatcttcgtggtgaacaaccaggaggagctggagagactgaacacccagaacgccatcgccttcagaagagaccagagaagcctgtacttcaaggacagcctgggctggctgcccatccagctgacccccttctaccccgtggactacaccgccgaccagcacggcacctgcggcgacggcctgctgcagcccggcgaggagtgcgacgacggcaacagcgacgtgggcgacgactgcatcagatgccacagagcctactgcggcgacggccacagacacgagggcgtggaggactgcgacggcagcgacttcggctacctgacctgcgagacctacctgcccggcagctacggcgacctgcagtgcacccagtactgctacatcgacagcaccccctgcagatacttcacctag

SEQ ID NO: 231370 - DNA, 1368 bp, Artificial Sequence
  derived and/or modified sequence
atggtggtgctgaaccccatgaccctgggcatctacctgcagctgttcttcctgagcatcgtgagccagcccaccttcatcaacagcgtgctgcccatcagcgccgccctgcccagcctggaccagaagaagagaggcggccacaaggcctgctgcctgctgacccccccccccccccccctgttccccccccccttcttcagaggcggcagaagccccctgctgagccccgacatgaagaacctgatgctggagctggagaccagccagagcccctgcatgcagggcagcctgggcagccccggcccccccggcccccagggcccccccggcctgcccggcaagaccggccccaagggcgagaagggcgagctgggcagacccggcagaaagggcagacccggcccccccggcgtgcccggcatgcccggccccatcggctggcccggccccgagggccccagaggcgagaagggcgacctgggcatgatgggcctgcccggcagcagaggccccatgggcagcaagggctaccccggcagcagaggcgagaagggcagcagaggcgagaagggcgacctgggccccaagggcgagaagggcttccccggcttccccggcatgctgggccagaagggcgagatgggccccaagggcgagcccggcatcgccggccacagaggccccaccggcagacccggcaagagaggcaagcagggccagaagggcgacagcggcgtgatgggcccccccggcaagcccggccccagcggccagcccggcagacccggcccccccggccccccccccgccggccagctgatcatgggccccaagggcgagagaggcttccccggcccccccggcagatgcctgtgcggccccaccatgaacgtgaacaaccccagctacggcgagagcgtgtacggccccagcagccccagagtgcccgtgatcttcgtggtgaacaaccaggaggagctggagagactgaacacccagaacgccatcgccttcagaagagaccagagaagcctgtacttcaaggacagcctgggctggctgcccatccagctgacccccttctaccccgtggactacaccgccgaccagcacggcacctgcggcgacggcctgctgcagcccggcgaggagtgcgacgacggcaacagcgacgtgggcgacgactgcatcagatgccacagagcctactgcggcgacggccacagacacgagggcgtggaggactgcgacggcagcgacttcggctacctgacctgcgagacctacctgcccggcagctacggcgacctgcagtgcacccagtactgctacatcgacagcaccccctgcagatacttcacctag

SEQ ID NO: 231371 - DNA, 585 bp, Artificial Sequence
  derived and/or modified sequence
atcagcggcctgctgtgctacagcgccggctgcctggccctgcccagcctggaccagaagaagagaggcggccacaaggcctgctgcctgctgacccccccccccccccccctgttccccccccccttcttcagaggcggcagaagccccggcccccccggcctgcccggcaagaccggccccaagggcgagaagggcgagctgggcagacccggcagaaagggcagacccggcccccccggcgtgcccggcatgcccggccccatcggctggcccggccccgagggccccagaggcgagaagggcgacctgggcatgatgggcctgcccggcagcagaggccccatgggcagcaagggctaccccggcagcagaggcgagaagggcagcagaggcgagaagggcgacctgggccccaagggcgagaagggcttccccggcttccccggcatgctgggccagaagggcgagatgggccccaagggcgagcccggcatcgccggccacagaggccccaccggcagacccggcaagagaggcaagcagggccagaagggcgacagcggcgtgatgggccccccctag

SEQ ID NO: 231372 - DNA, 1338 bp, Artificial Sequence
  derived and/or modified sequence
atgaccggcagcagcttcagcctggcccacctgctgatcatcagcggcctgctgtgctacagcgccggctgcctggccctgcccagcctggaccagaagaagagaggcggccacaaggcctgctgcctgctgacccccccccccccccccctgttccccccccccttcttcagaggcggcagaagccccctgctgagccccgacatgaagaacctgatgctggagctggagaccagccagagcccctgcatgcagggcagcctgggcagccccggcccccccggcccccagggcccccccggcctgcccggcaagaccggccccaagggcgagaagggcgagctgggcagacccggcagaaagggcagacccggcccccccggcgtgcccggcatgcccggccccatcggctggcccggccccgagggccccagaggcgagaagggcgacctgggcatgatgggcctgcccggcagcagaggccccatgggcagcaagggctaccccggcagcagaggcgagaagggcagcagaggcgagaagggcgacctgggccccaagggcgagaagtgcaaccccctgctgctgctgttccccagcttccagggcgagatgggccccaagggcgagcccggcatcgccggccacagaggccccaccggcagacccggcaagagaggcaagcagggccagaagggcgacagcggcgtgatgggcccccccggcaagcccggccccagcggccagcccggcagacccggcccccccggccccccccccgccggccagctgatcatgggccccaagggcgagagaggcttccccggcccccccggcagatgcctgtgcggccccaccatgaacgtgaacaaccccagctacggcgagagcgtgtacggccccagcagccccagagtgcccgtgatcttcgtggtgaacaaccaggaggagctggagagactgaacacccagaacgccatcgccttcagaagagaccagagaagcctgtacttcaaggacagcctgggctggctgcccatccagctgacccccttctaccccgtggactacaccgccgaccagcacggcacctgcggcgacggcctgctgcagcccggcgaggagtgcgacgacggcaacagcgacgtgggcgacgactgcatcagatgccacagagcctactgcggcgacggccacagacacgagggcgtggaggactgcgacggcagcgacttcggctacctgacctgcgagacctacctgcccggcagctacggcgacctgcagtgcacccagtactgctacatcgacagcaccccctgcagatacttcacctag

SEQ ID NO: 231373 - protein, 657 aa, Artificial Sequence
  derived and/or modified sequence
MGCCSSASSAAQSSKREWKPLEDRSCTDIPWLLLFILFCIGMGFICGFSIATGAAARLVSGYDSYGNICGQKNTKLEAIPNSGMDHTQRKYVFFLDPCNLDLINRKIKSVALCVAACPRQELKTLSDVQKFAEINGSALCSYNLKPSEYTTSPKSSVLCPKLPVPASAPIPFFHRCAPVNISCYAKFAEALITFVSDNSVLHRLISGVMTSKEIILGLCLLSLVLSMILMVIIRYISRVLVWILTILVILGSLGGTGVLWWLYAKQRRSPKETVTPEQLQIAEDNLRALLIYAISATVFTVILFLIMLVMRKRVALTIALFHVAGKVFIHLPLLVFQPFWTFFALVLFWVYWIMTLLFLGTTGSPVQNEQGFVEFKISGPLQYMWWYHVVGLIWISEFILACQQMTVAGAVVTYYFTRDKRNLPFTPILASVNRLIRYHLGTVAKGSFIITLVKIPRMILMYIHSQLKGKENACARCVLKSCICCLWCLEKCLNYLNQNAYTATAINSTNFCTSAKDAFVILVENALRVATINTVGDFMLFLGKVLIVCSTGLAGIMLLNYQQDYTVWVLPLIIVCLFAFLVAHCFLSIYEMVVDVLFLCFAIDTKYNDGSPGREFYMDKVLMEFVENSRKAMKEAGKGGVADSRELKPMASGASSA

SEQ ID NO: 231374 - DNA, 1974 bp, Artificial Sequence
  derived and/or modified sequence
atgggctgctgcagcagcgccagcagcgccgcccagagcagcaagagagagtggaagcccctggaggacagaagctgcaccgacatcccctggctgctgctgttcatcctgttctgcatcggcatgggcttcatctgcggcttcagcatcgccaccggcgccgccgccagactggtgagcggctacgacagctacggcaacatctgcggccagaagaacaccaagctggaggccatccccaacagcggcatggaccacacccagagaaagtacgtgttcttcctggacccctgcaacctggacctgatcaacagaaagatcaagagcgtggccctgtgcgtggccgcctgccccagacaggagctgaagaccctgagcgacgtgcagaagttcgccgagatcaacggcagcgccctgtgcagctacaacctgaagcccagcgagtacaccaccagccccaagagcagcgtgctgtgccccaagctgcccgtgcccgccagcgcccccatccccttcttccacagatgcgcccccgtgaacatcagctgctacgccaagttcgccgaggccctgatcaccttcgtgagcgacaacagcgtgctgcacagactgatcagcggcgtgatgaccagcaaggagatcatcctgggcctgtgcctgctgagcctggtgctgagcatgatcctgatggtgatcatcagatacatcagcagagtgctggtgtggatcctgaccatcctggtgatcctgggcagcctgggcggcaccggcgtgctgtggtggctgtacgccaagcagagaagaagccccaaggagaccgtgacccccgagcagctgcagatcgccgaggacaacctgagagccctgctgatctacgccatcagcgccaccgtgttcaccgtgatcctgttcctgatcatgctggtgatgagaaagagagtggccctgaccatcgccctgttccacgtggccggcaaggtgttcatccacctgcccctgctggtgttccagcccttctggaccttcttcgccctggtgctgttctgggtgtactggatcatgaccctgctgttcctgggcaccaccggcagccccgtgcagaacgagcagggcttcgtggagttcaagatcagcggccccctgcagtacatgtggtggtaccacgtggtgggcctgatctggatcagcgagttcatcctggcctgccagcagatgaccgtggccggcgccgtggtgacctactacttcaccagagacaagagaaacctgcccttcacccccatcctggccagcgtgaacagactgatcagataccacctgggcaccgtggccaagggcagcttcatcatcaccctggtgaagatccccagaatgatcctgatgtacatccacagccagctgaagggcaaggagaacgcctgcgccagatgcgtgctgaagagctgcatctgctgcctgtggtgcctggagaagtgcctgaactacctgaaccagaacgcctacaccgccaccgccatcaacagcaccaacttctgcaccagcgccaaggacgccttcgtgatcctggtggagaacgccctgagagtggccaccatcaacaccgtgggcgacttcatgctgttcctgggcaaggtgctgatcgtgtgcagcaccggcctggccggcatcatgctgctgaactaccagcaggactacaccgtgtgggtgctgcccctgatcatcgtgtgcctgttcgccttcctggtggcccactgcttcctgagcatctacgagatggtggtggacgtgctgttcctgtgcttcgccatcgacaccaagtacaacgacggcagccccggcagagagttctacatggacaaggtgctgatggagttcgtggagaacagcagaaaggccatgaaggaggccggcaagggcggcgtggccgacagcagagagctgaagcccatggccagcggcgccagcagcgcctag

SEQ ID NO: 231375 - DNA, 1974 bp, Artificial Sequence
  derived and/or modified sequence
atgggctgctgtagttctgcctctagcgcagcccagagctccaagcgagagtggaagcctttggaagacagaagctgtaccgatattccctggctgctgctgttcatcctgttttgtatcggaatgggattcatttgcggttttagcatagccactggtgcggctgccagactggttagcggctacgacagctatggcaacatttgcgggcaaaagaacaccaagctggaagcaatccctaacagcgggatggatcacacacagcgcaagtacgtctttttccttgatccttgtaacctggacctgattaaccggaagattaagagtgtggccctctgcgtcgccgcatgcccacggcaggagctaaaaaccctctctgacgtccagaaatttgctgaaataaatggctctgccctatgttcttataatcttaagccaagcgagtacaccacttctcccaaaagctccgttctgtgccctaagttgccggtgccagctagcgcacctattcccttctttcaccgttgtgcacccgtgaacattagttgctacgctaagttcgccgaagcgctgatcacgttcgtctctgacaatagtgtcctgcaccggctgatttcaggcgtgatgacatcaaaggagatcatcttggggctttgcctgcttagtctggtcctgtcaatgatcctgatggtgatcatccgatatataagcagagtgctagtgtggattctcaccattctcgtcattctcggaagtttaggcggtacaggcgtgctgtggtggctgtacgcgaaacaacgcagatcccccaaagagactgtcacacccgagcagctccagattgccgaggataatctgagagctctgctgatttatgccatttctgccacagtcttcacggttatcttgttccttataatgctggtgatgcgtaaaagagttgctctgacaatcgccctattccacgtggccgggaaggttttcatccatctacctctcctggtctttcagcccttttggactttttttgccttggtactcttctgggtgtattggatcatgacgctgttgttccttggcaccaccggttctcctgtccagaacgagcaggggttcgtagaatttaagatttccgggcccctgcagtacatgtggtggtaccacgtggttggcttgatttggattagcgagttcatcctcgcttgtcagcaaatgacggtggccggggcggtggtcacgtactacttcaccagagataagaggaacctcccctttactcccatcctcgccagtgtcaatcggctgatcaggtaccatctcggcacggtggcaaagggcagctttatcatcactctcgttaaaatccccagaatgatcctgatgtacattcattcccagctgaagggcaaggagaacgcttgcgcaaggtgtgtcttaaaaagttgcatctgttgcttgtggtgtctggagaagtgtctgaattacttgaatcagaacgcatatacagctactgccataaattctaccaacttctgcaccagcgccaaggacgcatttgttatcctggtggaaaacgccttgcgtgttgccaccatcaatactgtgggtgatttcatgctgttcctcgggaaagtcctgatcgtctgtagcacaggtctagccggcatcatgctgctgaactaccagcaggactacaccgtttgggttttacccctcataatcgtttgcctcttcgctttcctggtagcacactgcttcctcagcatctatgagatggtggtggacgttcttttcttatgcttcgctatagataccaagtataatgatgggtcgccgggacgggagttctatatggacaaggtgctgatggaattcgtagagaattcccggaaggctatgaaggaggccggaaaggggggagtagccgattcccgggaactgaaacctatggccagcggtgcctcaagcgcctag

SEQ ID NO: 231376 - DNA, 1974 bp, Artificial Sequence
  derived and/or modified sequence
atgggttgctgctcaagcgccagtagcgctgcccagagttcgaaacgtgagtggaagcctctcgaagacagaagctgtacagacataccttggttactgctgttcatcttattttgtattgggatgggctttatttgcgggttttccatcgcaacaggcgcggctgctcgtctggtctcaggttatgacagctacggtaatatctgcggacagaaaaataccaagctggaagcaatcccaaacagcgggatggaccatacccagagaaagtatgtgttctttttagacccctgtaatcttgacctcattaacagaaagatcaagagtgtcgccttatgtgtcgctgcctgcccacggcaggagctgaagaccctgtcggatgtccagaaatttgcggaaatcaatggaagtgccctatgctcctataatctgaagccctccgaatacacaacttcccccaaatcgagtgttctatgtcccaagttaccagttcctgctagtgccccaataccattcttccaccgctgcgcacctgtcaatatttcctgctacgccaagtttgctgaagccttgatcactttcgtgtctgataactcagtgctccataggctcatcagcggcgttatgacgagtaaggagattatcctgggtctgtgtctcttaagccttgtgctcagcatgatcttgatggtaataatacggtacatctctagagtcctggtgtggatcttgaccatattggtcatcttgggtagtctggggggtacgggcgtcctgtggtggttgtacgcaaagcagagaagatcgcctaaagaaactgtgaccccagagcagctgcaaattgccgaggataatctccgggcactcctgatttacgccatctccgctactgtgtttactgttatcctgtttctaatcatgctggtgatgagaaagcgtgtagctttaacaatagctctttttcatgtcgctggcaaagtattcatccacctacccctcctcgtgtttcagcccttctggacgttttttgccctcgttcttttttgggtctattggattatgacgctcctgttccttggcacaaccggcagtcctgtgcagaatgagcagggtttcgtggaattcaagattagtggcccattacagtatatgtggtggtaccatgtggtgggactgatctggatcagcgagttcatcctggcttgccagcaaatgaccgtggcaggtgccgtggtgacgtattacttcaccagggacaagcgcaatctgccctttacgccaatactggcttctgttaatcggctgatccggtatcatctgggcacagtggctaagggttccttcattatcaccctcgtgaagatcccacgcatgattctcatgtacatacactctcagctgaaaggcaaggagaacgcttgtgcgagatgcgttttgaagagctgcatctgctgtctgtggtgcctggagaagtgcctgaactaccttaatcaaaacgcctatactgctaccgccattaattcaactaatttttgtacaagtgctaaggacgcattcgtgatactggtggaaaatgcacttcgcgtggctaccatcaacactgtgggtgatttcatgctctttctgggaaaagtgcttattgtgtgttccacaggactggccggcattatgcttctgaattatcagcaagactacactgtttgggtgctccctttgattattgtctgcctcttcgcgtttctggttgcacattgcttcctgtctatttacgaaatggtcgttgacgtgctgttcttatgttttgccattgacaccaagtataatgacggcagcccaggcagagagttctatatggacaaggttctgatggagtttgtcgagaactcaagaaaagccatgaaagaggccgggaaggggggtgtcgctgacagcagagagcttaaacctatggccagtggggcaagttcagcctag

SEQ ID NO: 231377 - DNA, 1974 bp, Artificial Sequence
  derived and/or modified sequence
atgggctgctgcagcagcgccagcagcgctgcccagagcagcaagcgggagtggaagcccctggaggacaggagctgcacagacatcccctggctgctgctcttcatcctcttctgcatcggcatgggcttcatctgtggcttcagcatcgccaccggggctgctgcccggctggtgtctggctatgacagctatggcaacatctgtggccagaagaacaccaagctggaggccatccccaacagcggcatggaccacacccagaggaaatatgtgttcttcctggacccctgcaacctggacctgatcaacaggaagatcaagtctgtggccctgtgtgtggccgcctgcccccggcaggagctgaagaccctgagtgatgtgcagaagtttgctgagatcaatggaagtgccctgtgcagctacaacctgaagcccagcgagtacaccaccagccccaagagctctgtgctgtgccccaagctgcctgtgcctgccagcgcccccatccccttcttccaccgctgtgcccctgtgaacatcagctgctacgccaagtttgctgaggccctgatcacctttgtgtctgacaacagcgtgctgcacaggctcatcagcggcgtgatgaccagcaaggagatcatcctgggcctgtgcctgctgagcctggtgctgtccatgatcctgatggtgatcatccgctacatcagccgggtgctggtgtggatcctgaccatcctggtgatcctgggcagcctgggcggcaccggggtgctgtggtggctgtatgccaagcagaggaggagccccaaggagaccgtgaccccagagcagctgcagattgctgaggacaacctgcgggccctgctgatctatgccatcagcgccaccgtcttcaccgtcatcctcttcctgatcatgctggtgatgaggaagagggtggccctgaccatcgccctcttccacgtggccggcaaggtgttcatccacctgcccctgctggtgttccagcccttctggaccttctttgccctggtgctcttctgggtgtactggatcatgaccctgctcttcctgggcaccaccggcagccctgtgcagaatgagcagggctttgtggagttcaagatcagcggccccctgcagtacatgtggtggtaccacgtggtgggcctcatctggatcagcgagttcatcctggcctgccagcagatgacagtggccggggctgtggtgacctactacttcacccgggacaagaggaacctgcccttcacccccatcctggcctctgtgaacagactcatccgctaccacctgggcaccgtggccaagggcagcttcatcatcaccctggtgaagatccccaggatgatcctgatgtacatccacagccagctgaagggcaaggaaaatgcctgtgcccgctgtgtgctgaagagctgcatctgctgcctgtggtgcctggagaagtgcctgaactacctgaaccagaatgcctacacagccacagccatcaacagcaccaacttctgcaccagcgccaaggatgcctttgtgatcctggtggagaatgccctgcgggtggccaccatcaacacagtgggggacttcatgctgttcctgggcaaggtgctgattgtgtgcagcacaggcctggccggcatcatgctgctgaactaccagcaggactacacagtgtgggtgctgcccctcatcatcgtgtgcctgtttgccttcctggtggcccactgcttcctgagcatctatgagatggtggtggatgtgctcttcctgtgctttgccatcgacaccaagtacaatgatggcagccctggccgggagttctacatggacaaggtgctgatggagtttgtggagaacagcaggaaggccatgaaggaggccggcaagggcggcgtggccgacagccgggagctgaagcccatggccagcggggccagcagcgcctag

SEQ ID NO: 231378 - DNA, 1974 bp, Artificial Sequence
  derived and/or modified sequence
atgggctgctgcagcagcgccagcagcgccgcccagagcagcaagagggaatggaagcctttagaggaccgttcatgcacagacataccatggcttctccttttcatcctgttttgtattgggatgggattcatctgcgggttcagcattgctaccggcgcagccgctcggctggtgagtggctacgatagttacggcaacatctgcggacaaaaaaacacgaagcttgaggctatccctaattccggaatggaccatactcaacggaaatacgttttcttcttggatccctgtaatctggatctgatcaatcgtaagatcaagtccgtagccctctgcgtcgctgcatgcccgagacaggagctaaagaccctgagcgacgtgcagaaatttgccgagattaacgggagtgcgctgtgttcatataatcttaaaccatctgagtacacaacttccccaaagtctagtgtcctgtgcccgaaactgcctgtccccgctagtgctcccatcccctttttccatcggtgtgcccccgtaaacatcagctgctacgctaaattcgccgaggccttaattacattcgtaagcgacaatagtgttcttcatcgtctcattagcggagttatgactagcaaagaaatcattctaggactttgcctgctgtcccttgtgctctccatgattctaatggtaattatacggtatatcagtagggtgctggtttggatcctcaccattctggtgatcttgggctcactcggcgggaccggcgtgctgtggtggctgtacgcaaagcagagaaggtccccgaaagaaaccgtgactcctgaacaactgcaaatcgctgaggacaacctgcgcgctctcctcatctatgccatctcagccactgtgttcaccgtgatcctgttcctgattatgctggtcatgcgcaagcgcgtggcactgactatcgcacttttccatgtagctgggaaagtctttatccacctgccactccttgtgttccagccattctggacctttttcgccctcgtgctgttttgggtgtattggataatgaccctgctgttcttgggtacaaccggttccccagtccaaaatgagcagggattcgtagagtttaagatcagcggaccattacaatatatgtggtggtaccacgtggtgggcctgatttggatcagcgagttcattctagcgtgtcagcagatgaccgtagccggcgctgtagtgacgtactactttacccgggataagagaaatcttccattcactccgatcttagccagcgtcaacagactcattcggtaccatttagggaccgtggctaaggggagctttattattacacttgtaaagatccctaggatgatcctcatgtacatccactctcagctgaagggtaaggaaaacgcgtgtgccagatgcgtcctgaaatcctgcatctgttgcctgtggtgtttggaaaaatgtctaaactaccttaatcaaaacgcatatacagcaacagccatcaattcaacaaacttttgcacgtcagcaaaagatgcgtttgtgattttggtcgagaacgctcttagagtggctacaattaacaccgttggcgattttatgcttttcttgggtaaagtgctgattgtttgcagcacaggactggccgggattatgcttctgaattatcagcaagattacaccgtctgggtgctgcctctcattatcgtctgcttatttgcctttttggtggctcactgctttctgtccatatacgagatggtggtcgatgtgctgtttctctgctttgccattgataccaaatacaacgacggctcccctgggcgggagttttatatggataaagttctcatggagttcgttgagaattcaaggaaagcaatgaaggaagcaggtaaaggcggagtcgccgatagccgggaactcaaaccaatggcaagcggtgctagctctgcttag

SEQ ID NO: 231379 - DNA, 1974 bp, Artificial Sequence
  derived and/or modified sequence
atgggctgctgcagcagcgccagcagcgccgcccagagcagcaagagagaatggaagccattagaggataggagctgtacagatataccttggctcttattgttcattttgttttgtattggaatgggatttatatgcggtttcagcattgccacaggcgccgccgctaggctcgtctcaggctacgactcctatggaaatatatgtggccagaaaaatacaaagctggaggccatacccaacagtgggatggatcacacccagagaaaatacgttttcttcctggatccatgtaaccttgacctgatcaacaggaagataaaaagcgtagcattatgtgttgctgcttgtcctcgccaggaactgaagaccctgagtgatgttcagaagttcgcagaaataaatggcagcgctctgtgctcctataatctgaagcccagcgagtacaccacttctcccaagagctctgtcttatgccccaaactgccggtgccagccagtgccccaatacctttctttcaccgttgcgccccagtgaacatcagctgttacgcaaagtttgccgaggcactgattacctttgttagcgacaacagcgtactccaccggctgattagcggcgttatgacctccaaagaaattatcctaggactctgtctgctgagcctcgtcctgtccatgatcttaatggtaatcatcaggtatatctctcgagtgctcgtctggatactaactattctggtaatcctggggtcgttaggggggactggcgtgttgtggtggctatacgctaagcagcgtcggtcacccaaagaaacagtcacgcctgagcagctgcagattgctgaagacaatttacgcgcattgctaatctacgctatctctgccaccgttttcaccgtgatcctgttcctgataatgctggttatgaggaaacgggtggcacttacaatcgcgctgttccatgttgctggtaaagtttttatacacctccctttattggtttttcagccattctggacattctttgcattagtgctgttttgggtgtattggataatgactttactttttctcgggacaacggggagcccagtccaaaacgagcagggctttgtcgagtttaagatctccggccccctccagtacatgtggtggtaccacgttgtgggcctgatttggatcagcgagtttatactggcctgccaacaaatgactgttgcaggcgcagtagttacatattatttcaccagagataaaaggaacctcccatttactcccatcctggcgtctgttaacagactgattaggtatcatctggggactgttgccaagggttcattcattatcaccctggttaagattcctcgaatgatattgatgtacattcattcacagcttaaagggaaggagaatgcttgtgctagatgcgtgctcaagtcttgtatatgctgcctgtggtgcctggaaaaatgtttgaactatttaaaccagaacgcgtataccgccacagccatcaactcaacaaacttttgcacatctgccaaggacgccttcgtgattttagtcgaaaacgctcttcgcgtcgctacgataaacactgtgggcgacttcatgttgttcctgggtaaagtgcttatcgtttgttctacagggctggctggcattatgctccttaactatcagcaggactacacagtgtgggttctccccctgatcatcgtatgcctgttcgcattcctggtggctcactgttttctgtccatctacgaaatggtggttgacgttctcttcctatgctttgccattgacaccaagtacaatgacggcagccctggccgagagttttacatggataaggtcctgatggagtttgttgaaaactctcgcaaggccatgaaggaggcaggcaagggcggtgttgctgattcacgcgaactcaagccaatggcatctggcgccagcagcgcgtag

SEQ ID NO: 231380 - DNA, 1974 bp, Artificial Sequence
  derived and/or modified sequence
atgggctgctgctcttcagcctcctccgcagctcaatccagtaagcgcgagtggaagcccttagaggaccgaagctgcaccgacataccttggttgttactgttcattctgttctgcatcggcatgggatttatatgtgggttttctattgctactggcgctgccgcaaggcttgtttctgggtatgacagttatgggaacatctgcgggcagaaaaatacgaaactggaagcgatccctaacagcgggatggatcacactcagcgcaaatatgtattctttctggatccctgtaacctcgacctcataaatcgcaaaattaagtccgtggctctttgtgttgctgcgtgccctcgacaggaactgaaaactctgtccgatgtccaaaaattcgctgagatcaacggctctgctctgtgctcctacaaccttaagccatctgagtacacaacatctcccaaaagttcagttttgtgtcccaaattgccagtccctgccagtgctcctattcccttcttccaccgttgtgcccctgtcaacatttcctgttatgccaaatttgccgaggcgctgattacattcgtctccgacaatagcgtgcttcatcggctcatttccggcgtgatgacgtcaaaagagataatcctagggctctgccttctgagtcttgtgttgagcatgattctaatggtcattataagatatatcagccgggttctcgtctggatactcactatcctggtcatcctcggctcacttggaggcacaggcgtgttgtggtggctgtacgcaaagcagcgtcgctccccaaaggagacagttacccccgagcaactgcagatagccgaagacaatcttcgggcactgcttatatacgccataagcgctactgtcttcacagtgattctgttcctgattatgcttgtgatgcggaagagggtcgccctgaccattgcactgttccacgttgcaggaaaagtgttcattcacctgccccttctcgtgtttcagcctttttggactttttttgccctggttctgttctgggtctactggatcatgacactgctttttcttggaaccacgggatcccccgttcaaaacgagcaagggtttgtggagttcaagatatcggggccactgcaatatatgtggtggtatcatgtggtgggactgatttggattagcgaatttatccttgcctgccaacagatgacggtggctggagccgttgttacatattattttacgcgtgacaaacgaaacctgccgtttacgccaatcctggccagcgtgaaccggctgatccgataccacctgggaaccgtggctaaagggagcttcattatcaccctggttaagattccacgaatgattctcatgtatatacatagtcagctgaagggcaaggagaacgcctgtgctcggtgcgtcctgaagtcttgcatctgttgcctgtggtgtcttgaaaagtgcctgaattatctcaaccaaaacgcctacaccgccactgccatcaacagtacaaatttttgcaccagtgcgaaagacgctttcgtgattctggtcgagaatgcattgagggtggccactattaacactgtgggtgacttcatgcttttcctgggcaaagtcctcatcgtttgctctacaggcctcgcgggaattatgttattaaactaccagcaggactataccgtctgggtgctgcccctgataattgtgtgcctttttgctttcctagtagcacattgctttctaagtatatacgagatggtggttgatgtcttattcttgtgtttcgcgatcgacacaaagtacaatgacgggtccccagggagagaattctacatggataaagtcctcatggagttcgtggagaattctcgtaaagcaatgaaggaggctggcaaagggggtgtcgctgatagtcgggagttgaagccaatggcatctggagccagcagcgcctag

SEQ ID NO: 231381 - DNA, 1974 bp, Artificial Sequence
  derived and/or modified sequence
atgggctgctgttcctcggcaagcagtgcggcacagtccagtaaaagggagtggaagccacttgaagaccgctcttgcacagatatcccctggctgcttctgttcatcctattttgcatcggcatggggtttatctgcgggttttcaatagccaccggcgctgctgcccgtctggtgtccggatacgactcctacggcaatatttgtggccaaaagaacacgaaactggaggcgatccctaacagtggcatggatcacacccaacgcaagtacgtgttctttttggacccatgtaacctagatcttattaatcggaagatcaagtccgttgctttgtgtgtggcagcatgccccaggcaggaattaaaaacccttagcgatgtccaaaaatttgcagagattaatgggtcagccctttgcagctataacttaaagccgtcagagtatactacttctcccaagagctccgtgctctgtcccaaactccctgtgcctgccagcgcccctattccgtttttccaccggtgtgcccctgtcaacatttcctgctacgcaaaattcgcagaggctctgattacatttgtgtctgacaacagtgtcctgcatcgcctcattagcggcgtcatgacatctaaggaaatcattctcggcctttgcctgctgagcctagttctgtctatgatcctaatggtgatcatacgctacatatccagggtgctggtttggatcctcaccatattggtgattctcgggtccctaggagggacaggggtgctttggtggctctacgcgaagcagcgtagatctcctaaggaaactgtgacccccgagcagctgcaaatcgcagaggacaacctgagagccctgctgatctacgcaatcagcgcaaccgtcttcaccgtaatcttgtttctcattatgcttgtcatgcggaaacgggtcgcacttacaatcgccctattccatgtagccggaaaggttttcatccacctccccctgctggtttttcaacctttttggacatttttcgccctggtcctgttctgggtttattggattatgacactcctgtttttagggacaaccgggtctcctgtgcagaacgagcaagggtttgtggagttcaaaatctccggaccactgcaatacatgtggtggtaccatgtggtggggctgatctggattagcgagttcattttggcttgccagcaaatgaccgttgctggagccgttgtgacgtattatttcacccgggataagaggaatctgccatttacacctattctggcgagtgttaaccgtctgatcagatatcacctgggcaccgttgctaaagggagttttataattacactcgttaagatcccaaggatgattctaatgtatatccattcccaattgaaagggaaggaaaatgcctgtgctcgatgcgtgctcaagtcctgcatctgctgcttgtggtgtctcgagaagtgcttgaactatctaaatcagaatgcatatacagcaactgccattaactccactaatttttgtacttctgcgaaggacgcattcgtaatattggtggagaatgcccttcgggtggccacaatcaataccgtcggagactttatgctgttcctggggaaggtgctgatcgtgtgctcaacagggctggccggaatcatgctgctcaactaccaacaggattacacggtgtgggtgctgccacttatcatcgtctgtttgtttgcattcctggtggcacactgctttctgtctatttatgagatggtcgtggatgtactgtttctgtgttttgctatagataccaaatacaacgatggaagtccagggagagagttctatatggacaaggtcctgatggagttcgtcgagaactcgagaaaggctatgaaggaggccggaaagggaggcgtggcagattcacgggagctgaaacccatggcatcaggcgcatctagcgcctag

SEQ ID NO: 231382 - protein, 624 aa, Artificial Sequence
  derived and/or modified sequence
MVRWFHRDLSGLDAETLLKGRGVHGSFLARPSRKNQGDFSLSVRVGDQVTHIRIQNSGDFYDLYGGEKFATLTELVEYYTQQQGVLQDRDGTIIHLKYPLNCSDPTSERWYHGHMSGGQAETLLQAKGEPWTFLVRESLSQPGDFVLSVLSDQPKAGPGSPLRVTHIKVMCEGGRYTVGGLETFDSLTDLVEHFKKTGIEEASGAFVYLRQPYYATRVNAADIENRVLELNKKQESEDTAKAGFWEEFESLQKQEVKNLHQRLEGQRPENKGKNRYKNILPFDHSRVILQGRDSNIPGSDYINANYIKNQLLGPDENAKTYIASQGCLEATVNDFWQMAWQENSRVIVMTTREVEKGRNKCVPYWPEVGMQRAYGPYSVTNCGEHDTTEYKLRTLQVSPLDNGDLIREIWHYQYLSWPDHGVPSEPGGVLSFLDQINQRQESLPHAGPIIVHCSAGIGRTGTIIVIDMLMENISTKGLDCDIDIQKTIQMVRAQRSGMVQTEAQYKFIYVAIAQFIETTKKKLEVLQSQKGQESEYGNITYPPAMKNAHAKASRTSSKSLESSAGTVAASPVRRGGQRGLPVPGPPVLSPDLHQLPVLAPLHPAADTRRMCMRTCTLRTRGRRK

SEQ ID NO: 231383 - DNA, 1875 bp, Artificial Sequence
  derived and/or modified sequence
atggtcagatggtttcatcgcgatttatctggcctagacgccgagacgctgctgaagggccgcggcgtgcacggatcctttttagcacggcccagccggaagaatcaaggtgatttcagcctgtcagtcagggtgggtgaccaggtgacccatattcgtatccaaaattccggagacttttatgatctgtacggaggagaaaagttcgccacccttaccgagctcgtggagtactatactcagcagcagggagtgcttcaggatagagatggaactataattcaccttaagtaccccctgaactgtagcgatcccacctctgagagatggtatcacggacatatgtcgggaggacaggccgagactctcctgcaagccaaaggcgaaccctggacatttctggtgcgggagtccctctcgcaaccaggcgattttgtcctcagcgtgctgtctgaccagccaaaggctggccccgggagtccactgcgggtgactcacattaaagtgatgtgtgaaggggggaggtatactgtgggcggcctggaaaccttcgatagcctcaccgatctggtggagcatttcaaaaaaacggggattgaggaagcttctggtgcattcgtgtatttacgccagccatactacgcgaccagagtgaatgcagcagacattgagaatcgcgttctggaacttaacaaaaaacaggagtcggaggacactgccaaggccggtttttgggaggagtttgagtcactgcagaagcaggaagttaaaaatctgcaccagcgcctcgaagggcagcggccagagaataagggaaaaaaccgctataagaatatactgccatttgaccattctagggtgatactccagggccgagactcaaacattccagggagtgattacatcaacgccaactacattaaaaatcagctgctcgggccagacgagaatgctaagacctatattgcgagccaaggatgcctcgaggccaccgtcaatgacttctggcagatggcttggcaagagaatagccgagtaattgttatgactacccgtgaagtggagaagggcagaaataaatgcgtcccctattggcctgaggtgggaatgcagagggcatacggcccctactccgtgaccaactgtggtgagcatgatacaacagaatataagttgcgaactctccaggtgtcacctttggataatggcgatctgatacgagagatatggcactatcaatatctgagttggccagatcatggggtaccaagcgagcccggcggcgtgttgtccttcctcgaccagatcaaccagagacaggagtctctgcctcatgctggacccataatagttcactgctccgccggcattggccgaactgggaccatcattgttatagacatgctcatggaaaatatttctaccaaaggcctggattgcgacatcgatatccagaaaactatccaaatggtgcgggcacaacgttcagggatggtccaaacagaggctcagtacaaattcatatacgtcgccatcgcccagtttatcgagaccacaaagaagaagctggaagtgctccagtctcagaaaggccaggagagtgaatacggcaacattacatacccccccgccatgaagaatgcgcacgctaaggcgtctcgaaccagcagcaagtcgctggagagctccgcaggcacagtggccgccagtcccgtgaggagggggggacagcgagggctccccgtcccgggccctccagtactgtcacccgacttgcaccagctgcccgttctggctcctctccatccggccgctgacacccgacggatgtgtatgcgtacctgcactttgagaacccgcggaagacgaaagtag

SEQ ID NO: 231384 - DNA, 1875 bp, Artificial Sequence
  derived and/or modified sequence
atggtgcgctggttccaccgggacctgagcggcctggatgctgagaccctgctgaagggccggggcgtgcacggcagcttcctggcccggcccagcaggaagaaccagggcgacttcagcctgtctgtgcgggtgggggaccaggtgacccacatccgcatccagaacagcggggacttctatgacctgtatggaggagagaagtttgccaccctgacagagctggtggagtactacacccagcagcagggcgtgctgcaggacagagatggcaccatcatccacctgaagtaccccctgaactgcagcgaccccaccagcgagcgctggtaccacggccacatgtctgggggccaggccgagaccctgctgcaggccaagggggagccctggaccttcctggtgcgggagagcctgagccagcccggggactttgtgctgtctgtgctgagtgaccagcccaaggccggccctggcagccccctgcgggtgacccacatcaaggtgatgtgtgagggcggccgctacacagtgggcggcctggagacctttgacagcctgacagacctggtggagcacttcaagaagacaggaattgaggaggccagcggggcctttgtgtacctgcggcagccctactatgccaccagggtgaatgctgctgacatcgagaacagagtgctggagctgaacaagaagcaggagagcgaggacacagccaaggccggcttctgggaggagtttgagagcctgcagaagcaggaggtgaagaacctgcaccagaggctggagggccagaggccagaaaataaaggcaagaaccgctacaagaacatcctgccctttgaccacagcagggtcatcctgcagggccgggacagcaacatccctggcagtgactacatcaatgccaactacatcaagaaccagctgctgggcccagatgaaaatgccaagacctacatcgccagccagggctgcctggaggccaccgtgaatgacttctggcagatggcctggcaggagaacagccgggtgattgtgatgaccacccgggaggtggagaagggcaggaacaagtgtgtgccctactggccagaggtgggcatgcagagggcctacggcccctacagcgtgaccaactgtggggagcatgacaccacagagtacaagctgcggaccctgcaggtgagccccctggacaacggggacctgatccgggagatctggcactaccagtacctgtcctggccagaccacggcgtgcccagcgagcccggcggcgtgctgtccttcctggaccagatcaaccagaggcaggagagcctgccccacgccggccccatcatcgtgcactgcagcgctggcattggaagaacaggcaccatcatcgtcatcgacatgctgatggagaacatcagcaccaagggcctggactgtgacatcgacatccagaagaccatccagatggtgcgggcccagaggagcggcatggtgcagacagaggcccagtacaagttcatctacgtggccatcgcccagttcatcgagaccaccaagaagaagctggaggtgctgcagagccagaagggccaggagagtgaatatggcaacatcacctaccccccagccatgaagaatgcccacgccaaggccagcaggaccagcagcaagagcctggagagcagcgctggcaccgtggccgccagccctgtgagaagaggaggccagaggggcctgcctgtgcccggcccccctgtgctgagcccagacctgcaccagctgcctgtgctggcccccctgcaccctgctgctgacaccaggaggatgtgcatgaggacctgcaccctgcggacccggggccgcaggaagtag

SEQ ID NO: 231385 - DNA, 1875 bp, Artificial Sequence
  derived and/or modified sequence
atggtgcggtggttccaccgggacctgagcggcctggacgccgagactttgctgaaggggcgtggcgtgcacggtagcttcctcgccagaccgtccagaaagaatcagggcgacttttcactctccgtccgggtgggggaccaggttacacacattcggatccagaacagcggcgatttctatgacctctacggcggagaaaagtttgctacactgacggaactagtggaatactacacacagcagcagggggtgttacaggatcgtgacggaaccatcattcatttaaagtatccgctcaattgcagcgatcctactagcgagcggtggtatcatggccacatgagcggtggtcaggctgaaactctgttgcaggccaaaggcgaaccttggacgtttctggtacgcgaaagcttgtcccaacccggtgactttgtgcttagtgtgctgtccgatcagcccaaggccggtccaggcagccctctgagggtcactcatatcaaggtaatgtgtgaaggcggcaggtacaccgtggggggcctagagactttcgactctctgaccgatctggtcgagcacttcaagaaaaccggtatcgaagaagcatcgggcgctttcgtgtacttgaggcagccatattacgcaacacgcgtaaatgccgcagatattgaaaatcgcgtgcttgaactcaacaagaagcaggagagtgaagataccgcaaaagccggattctgggaggagtttgagagcctgcaaaaacaagaggttaagaacctgcaccagcggttagaagggcagaggccagagaacaagggcaaaaacagatacaagaatatactgccttttgaccactctcgggtaattctacagggccgtgactccaacattcccggcagcgactatatcaatgcaaactacataaaaaaccagcttctgggacctgatgaaaatgcaaaaacatatatcgcctcccaaggatgcctcgaggcgacggttaatgacttctggcagatggcttggcaggaaaactcccgtgtgattgtaatgaccacccgagaagttgaaaagggcaggaataaatgcgtcccctattggcctgaggtaggaatgcagcgggcctacggcccatacagcgtgactaattgcggagaacacgataccacggagtataagcttaggactttgcaagtaagtcccttagacaacggcgacttaatcagggagatttggcattatcagtacctctcttggccagaccacggggtgcctagcgaacctgggggggtactcagctttctcgatcaaatcaaccaacgccaggagtccctgccccatgccggtccgataatcgtgcattgttctgccggtattgggagaactgggacgataatcgttattgatatgttgatggaaaacatctcaaccaaaggcctggactgtgatatcgatatacagaagacaatccagatggtgcgagcgcagaggtcgggaatggttcagaccgaagcccaatacaaatttatctatgttgctattgcccagtttatagagaccaccaaaaaaaaactcgaggtcttgcagtctcagaaagggcaggagtccgagtacggcaacatcacttatccccctgccatgaagaatgcccacgcaaaggcctcacggacgtcttctaaatcactggagagctctgctggcaccgtcgcagcgtctcctgtgcgaagaggaggacagcgcggactccccgtacctgggcctccagtcctgagcccagacctgcatcagctgccagtgctcgcccccctccaccctgcagcagacacgcgtcgcatgtgcatgagaacgtgcaccttgcggactcgcggtcggcggaagtag

SEQ ID NO: 231386 - DNA, 1875 bp, Artificial Sequence
  derived and/or modified sequence
atggtccgctggttccatcgagatctaagtgggttagacgcagagacactgctgaaagggaggggcgtgcatgggtcctttctcgctcggccatcaaggaaaaaccagggagacttttccctctcggttcgggtgggcgaccaagtgacacatatccggatccaaaattcaggcgatttctatgatctgtatggaggagagaagttcgctacgctcactgagcttgttgagtattatactcagcagcagggggtactccaggatagagatggtactatcatccacttgaaatatcctctcaactgcagcgatccaacatcagagagatggtaccacgggcacatgtcagggggtcaggctgagacccttctccaggcgaaaggggagccttggacattcctcgtgcgggaaagcctgagccagcctggagactttgttctgtccgttctgtccgatcagcccaaggccggaccaggcagccccttacgagtgacccacatcaaggtaatgtgtgagggcggacggtacaccgttggagggcttgagacattcgacagccttaccgacctggtggagcattttaagaagaccggcattgaagaagctagcggtgcttttgtttacctgcgacagccgtactacgccactcgggtcaacgctgcggacatcgaaaatagggtgctggagctgaacaagaagcaggaatcagaagacaccgctaaggcgggattctgggaagaattcgagagtctacagaaacaggaggtcaaaaatttgcatcagcggttggagggtcagaggcccgaaaataagggaaaaaatcgatataagaatatcctgccattcgatcattcacgcgtaattcttcaaggcagggatagcaacatccctggctcagactatatcaacgccaattacatcaaaaaccagctcctaggaccagacgaaaacgcgaagacttatattgcatctcaagggtgcctcgaggcaaccgtgaatgacttctggcaaatggcctggcaggagaattctcgcgtaatagtcatgacaaccagggaggtggagaaagggcgaaacaagtgcgtgccctactggcctgaggtgggcatgcagagagcctacggaccgtattccgtgaccaattgtggtgaacacgataccactgagtacaagctacggacgctgcaggtcagcccgctcgacaatggcgacctgattagggagatatggcactatcaatatctgtcctggccggaccacggcgtgcctagtgagcccggaggtgtccttagctttttggatcagatcaaccagagacaagaaagccttccccacgcaggccctattatcgtccactgtagtgcgggtattgggaggaccggaacaatcatcgtcatagatatgcttatggagaacatctcaaccaaaggacttgactgtgacatcgacatccagaagacaatccaaatggtacgcgctcagcggagcggaatggttcaaacagaggcccagtacaagtttatatatgtcgccatcgcgcagttcattgagaccactaaaaagaagttagaggtgctccaaagtcagaaggggcaggagagtgagtacggcaatatcacatatccacctgccatgaagaacgctcacgccaaagcttcccgaactagcagcaaatcgcttgagtcatcggccggtaccgtggccgctagtcctgtcaggcgcggtggacagagagggctgcctgtgccgggaccacccgtgctttccccagaccttcatcagctgcctgttctggcaccactgcaccctgccgctgatacccgtcgaatgtgcatgagaacttgtacattaagaactagagggagacgtaaatag

SEQ ID NO: 231387 - DNA, 2389 bp, Artificial Sequence
  derived and/or modified sequence
gctctaaaacgagaagtacaagtgagttcccccaaggggtcggccgcgcctcttcctgtccccgccctgccggctgccccaggccagtggagtggcagccccagaactgggaccaccgggggtggtgaggcggcccggcactgggagctgcatctgaggcttagtccctgagctctctgcctgcccagactagctgcacctcctcattccctgcgcccccttcctctccggaagcccccaggatggtgaggtggtttcaccgagacctcagtgggctggatgcagagaccctgctcaagggccgaggtgtccacggtagcttcctggctcggcccagtcgcaagaaccagggtgacttctcgctctccgtcagggtgggggatcaggtgacccatattcggatccagaactcaggggatttctatgacctgtatggaggggagaagtttgcgactctgacagagctggtggagtactacactcagcagcagggtgtcctgcaggaccgcgacggcaccatcatccacctcaagtacccgctgaactgctccgatcccactagtgagaggtggtaccatggccacatgtctggcgggcaggcagagacgctgctgcaggccaagggcgagccctggacgtttcttgtgcgtgagagcctcagccagcctggagacttcgtgctttctgtgctcagtgaccagcccaaggctggcccaggctccccgctcagggtcacccacatcaaggtcatgtgcgagggtggacgctacacagtgggtggtttggagaccttcgacagcctcacggacctggtggagcatttcaagaagacggggattgaggaggcctcaggcgcctttgtctacctgcggcagccgtactatgccacgagggtgaatgcggctgacattgagaaccgagtgttggaactgaacaagaagcaggagtccgaggatacagccaaggctggcttctgggaggagtttgagagtttgcagaagcaggaggtgaagaacttgcaccagcgtctggaagggcagcggccagagaacaagggcaagaaccgctacaagaacattctcccctttgaccacagccgagtgatcctgcagggacgggacagtaacatccccgggtccgactacatcaatgccaactacatcaagaaccagctgctaggccctgatgagaacgctaagacctacatcgccagccagggttgtctggaggccacggtcaatgacttctggcagatggcgtggcaggagaacagccgtgtcatcgtcatgaccacccgagaggtggagaaaggccggaacaaatgcgtcccatactggcccgaggtgggcatgcagcgtgcttatgggccctactctgtgaccaactgcggggagcatgacacaaccgaatacaaactccgtaccttacaggtctccccgctggacaatggagacctgattcgggagatctggcattaccagtacctgagctggcccgaccatggggtccccagtgagcctgggggtgtcctcagcttcctggaccagatcaaccagcggcaggaaagtctgcctcacgcagggcccatcatcgtgcactgcagcgccggcatcggccgcacaggcaccatcattgtcatcgacatgctcatggagaacatctccaccaagggcctggactgtgacattgacatccagaagaccatccagatggtgcgggcgcagcgctcgggcatggtgcagacggaggcgcagtacaagttcatctacgtggccatcgcccagttcattgaaaccactaagaagaagctggaggtcctgcagtcgcagaagggccaggagtcggagtacgggaacatcacctatcccccagccatgaagaatgcccatgccaaggcctcccgcacctcgtccaagagcttggagtctagtgcagggaccgtggctgcgtcacctgtgagacggggtggccagaggggactgccagtgccgggtccccctgtgctgtctcctgacctgcaccaactgcctgtacttgcccccctgcacccggctgcagacacaaggaggatgtgtatgagaacctgcacactaagaacaagagggaggagaaagtgaagaagcagcggtcagcagacaaggagaagagcaagggttccctcaagaggaagtgagcggtgctgtcctcaggtggccatgcctcagccctgaccctgtggaagcatttcgcgatggacagactcacaacctgaacctaggagtgccccattcttttgtaatttaaatggctgcatcccccccacctctccctgaccctgtatatagcccagccaggccccaggcagggccaacccttctcctcttgtaaataaagccctgggatcactgtg

SEQ ID NO: 231388 - DNA, 1875 bp, Artificial Sequence
  derived and/or modified sequence
atggtgagatggttccacagagacctgagcggcctggacgccgagaccctgctgaagggcagaggcgtgcacggcagcttcctggccagacccagcagaaagaaccagggcgacttcagcctgagcgtgagagtgggcgaccaggtgacccacatcagaatccagaacagcggcgacttctacgacctgtacggcggcgagaagttcgccaccctgaccgagctggtggagtactacacccagcagcagggcgtgctgcaggacagagacggcaccatcatccacctgaagtaccccctgaactgcagcgaccccaccagcgagagatggtaccacggccacatgagcggcggccaggccgagaccctgctgcaggccaagggcgagccctggaccttcctggtgagagagagcctgagccagcccggcgacttcgtgctgagcgtgctgagcgaccagcccaaggccggccccggcagccccctgagagtgacccacatcaaggtgatgtgcgagggcggcagatacaccgtgggcggcctggagaccttcgacagcctgaccgacctggtggagcacttcaagaagaccggcatcgaggaggccagcggcgccttcgtgtacctgagacagccctactacgccaccagagtgaacgccgccgacatcgagaacagagtgctggagctgaacaagaagcaggagagcgaggacaccgccaaggccggcttctgggaggagttcgagagcctgcagaagcaggaggtgaagaacctgcaccagagactggagggccagagacccgagaacaagggcaagaacagatacaagaacatcctgcccttcgaccacagcagagtgatcctgcagggcagagacagcaacatccccggcagcgactacatcaacgccaactacatcaagaaccagctgctgggccccgacgagaacgccaagacctacatcgccagccagggctgcctggaggccaccgtgaacgacttctggcagatggcctggcaggagaacagcagagtgatcgtgatgaccaccagagaggtggagaagggcagaaacaagtgcgtgccctactggcccgaggtgggcatgcagagagcctacggcccctacagcgtgaccaactgcggcgagcacgacaccaccgagtacaagctgagaaccctgcaggtgagccccctggacaacggcgacctgatcagagagatctggcactaccagtacctgagctggcccgaccacggcgtgcccagcgagcccggcggcgtgctgagcttcctggaccagatcaaccagagacaggagagcctgccccacgccggccccatcatcgtgcactgcagcgccggcatcggcagaaccggcaccatcatcgtgatcgacatgctgatggagaacatcagcaccaagggcctggactgcgacatcgacatccagaagaccatccagatggtgagagcccagagaagcggcatggtgcagaccgaggcccagtacaagttcatctacgtggccatcgcccagttcatcgagaccaccaagaagaagctggaggtgctgcagagccagaagggccaggagagcgagtacggcaacatcacctacccccccgccatgaagaacgcccacgccaaggccagcagaaccagcagcaagagcctggagagcagcgccggcaccgtggccgccagccccgtgagaagaggcggccagagaggcctgcccgtgcccggcccccccgtgctgagccccgacctgcaccagctgcccgtgctggcccccctgcaccccgccgccgacaccagaagaatgtgcatgagaacctgcaccctgagaaccagaggcagaagaaagtag

SEQ ID NO: 231389 - protein, 525 aa, Artificial Sequence
  derived and/or modified sequence
MATLLRSKLSNVATSVSNKSQAKMSGMFARMGFQAATDEEAVGFAHCDDLDFEHRQGLQMDILKAEGEPCGDEGAEAPVEGDIHYQRGSGAPLPPSGSKDQVGGGGEFGGHDKPKITAWEAGWNVTNAIQGMFVLGLPYAILHGGYLGLFLIIFAAVVCCYTGKILIACLYEENEDGEVVRVRDSYVAIANACCAPRFPTLGGRVVNVAQIIELVMTCILYVVVSGNLMYNSFPGLPVSQKSWSIIATAVLLPCAFLKNLKAVSKFSLLCTLAHFVINILVIAYCLSRARDWAWEKVKFYIDVKKFPISIGIIVFSYTSQIFLPSLEGNMQQPSEFHCMMNWTHIAACVLKGLFALVAYLTWADETKEVITDNLPGSIRAVVNIFLVAKALLSYPLPFFAAVEVLEKSLFQEGSRAFFPACYSGDGRLKSWGLTLRCALVVFTLLMAIYVPHFALLMGLTGSLTGAGLCFLLPSLFHLRLLWRKLLWHQVFFDVAIFVIGGICSVSGFVHSLEGLIEAYRTNAED

SEQ ID NO: 231390 - DNA, 2574 bp, Artificial Sequence
  derived and/or modified sequence
gctcgcgccccgcggcagctccgcagtgcactagccaccaccgccgccgccgccgctccgccagacctgctgccagcttgcccggtccagccctgagagagcctcgaacgccagctgcgagggtcatgagccagagagccccggggcgccgcgcggagagcaagcggagatagcgactttgcgccccccagccctcgccttcttgcatcgcgttccccgcatcctcgggtccttctgtcctttccgctgtccccaccgccgccatggccaccttgctccgcagcaagctgtccaacgtggccacgtccgtgtccaacaagtcccaggccaagatgagcggcatgttcgccaggatgggttttcaggcggccacggatgaggaggcggtgggcttcgcgcattgcgacgacctcgactttgagcaccgccagggcctgcagatggacatcctgaaagccgagggagagccctgcggggacgagggcgctgaagcgcccgtcgagggagacatccattatcagcgaggcagcggagctcctctgccgccctccggctccaaggaccaggtgggaggtggtggcgaattcgggggccacgacaagcccaaaatcacggcgtgggaggcaggctggaacgtgaccaacgccatccagggcatgttcgtgctgggcctaccctacgccatcctgcacggcggctacctggggttgtttctcatcatcttcgccgccgttgtgtgctgctacaccggcaagatcctcatcgcgtgcctgtacgaggagaatgaagacggcgaggtggtgcgcgtgcgggactcgtacgtggccatagccaacgcctgctgcgccccgcgcttcccaacgctgggcggccgagtggtgaacgtagcgcagatcatcgagctggtgatgacgtgcatcctgtacgtggtggtgagtggcaacctcatgtacaacagcttcccggggctgcccgtgtcgcagaagtcctggtccattatcgccacggccgtgctgctgccttgcgccttccttaagaacctcaaggccgtgtccaagttcagtctgctgtgcactctggcccacttcgtcatcaatatcctggtcatagcctactgtctatcgcgggcgcgcgactgggcctgggagaaggtcaagttctacatcgacgtcaagaagttccccatctccattggcatcatcgtgttcagctacacgtctcagatcttcctgccttcgctggagggcaatatgcagcagcccagcgagttccactgcatgatgaactggacgcacatcgcagcctgcgtgctcaagggcctcttcgcgctcgtcgcctacctcacctgggccgacgagaccaaggaggtcatcacggataacctgcccggctccatccgcgccgtggtcaacatctttctggtggccaaggcgctgttgtcctatcctctgccattctttgccgctgtcgaggtgctggagaagtcgctcttccaggaaggcagccgcgcctttttcccggcctgctacagcggcgacgggcgcctgaagtcctgggggctgacgctgcgctgcgcgctcgtcgtcttcacgctgctcatggccatttatgtgccgcacttcgcgctgctcatgggcctcaccggcagcctcacgggcgccggcctctgtttcttgctgcccagcctctttcacctgcgcctgctctggcgcaagctgctgtggcaccaagtcttcttcgacgtcgccatcttcgtcatcggcggcatctgcagcgtgtccggcttcgtgcactccctcgagggcctcatcgaagcctaccgaaccaacgcggaggactagggcgcaagggcgagcccccgccgcgcttctgcgctctctcccttctcccctcaccccgcccccaccagcccagtgcgccctgccgccgcgcttgggaggccaagctttaaacatctctggttcctagtttctgattattcggggatgggggggatgggaggggacagggattcacgatccatcgcgtctgcgtttctgttgtcctttcttttccacaacaccctggttttggggggaggcggggtgcatttgcgggcagggttctctgtccttccaagtggggccccgacactttggttccagtcatcgagggggttgggaagggagggagagggggcgcagctcgcaggcgtggcaacttgaccttgggggaatatttcacatccatccagagctcggaatctacagcgtccagccatttccagcaagagcgcttcccattccggagacgtttcaaccctgcagcgggaaaggctgactgggaaatccattttgggtgggcaatttccttcaacgaagccggaaggcgagaagccgcggcggggccagcttgcctgccggttttcaggaatctaaactctcatcttgtgcaatttatcaggtgtggaactgttctactgtgcgtgtggtgtgctcgtggtgaataagatgaaatgtatatcagaaaaaaatctatctctaatttagagtgcggtacataattatatccgcaaataaagaagagacaaaggct

SEQ ID NO: 231391 - DNA, 1578 bp, Artificial Sequence
  derived and/or modified sequence
atggcgacactactacggtctaaactgtccaacgtcgctacttcagtgagcaacaagagccaggccaaaatgtctggaatgttcgctaggatgggctttcaagccgccacagatgaggaagcagtaggcttcgcacattgcgacgatcttgacttcgaacatagacagggtttacagatggacatcttgaaggctgagggtgagccatgcggcgacgagggagccgaagctcctgtagagggggacatccactaccaacgcggaagcggggcccctctcccaccatccggtagcaaggaccaggtgggtgggggaggcgagttcgggggacatgacaagccaaagatcactgcatgggaggcagggtggaatgtgacaaatgctatccagggcatgtttgtcctgggattaccttatgcaatcctgcacggcggctatttgggactgtttcttatcatctttgcagccgtggtgtgctgctatacagggaaaatcttgattgcctgcctgtacgaggagaacgaagatggagaggttgtaagggtgcgggacagttatgtggctatcgccaacgcttgttgcgctccacgattccccactcttggagggcgggtggtgaacgtagctcagataattgagctggttatgacttgtatcctgtatgtagtggtgagcggcaacctgatgtacaactcttttcctggtctaccagttagtcagaagagctggtctatcatcgccacagcagtcctcctgccatgtgctttcctgaaaaacctgaaggcagtcagcaaatttagcctcctttgcaccctagcacactttgtgatcaacatcctcgtgatcgcttattgcctgagccgcgcaagagactgggcatgggaaaaggtgaagttctatatcgacgtgaagaaatttccaatctctatcgggatcatcgtcttcagctatacatcacagatctttttacccagtctggagggcaatatgcagcaaccctctgagtttcactgtatgatgaattggactcacatcgccgcttgcgtgctgaaaggcctgttcgcattggtcgcctacttaacatgggccgatgagaccaaagaggttatcaccgataacctgcctgggtccatccgggcggtagttaacatcttcctggtggcaaaggctctgctgtcctaccccttaccattcttcgccgccgtggaggtcctggagaaatctttatttcaagaaggcagtcgagctttctttccagcctgctattcgggtgatggcaggctgaagtcatggggacttactttgaggtgcgctctggttgtgttcaccctcctgatggcaatctacgtaccacactttgcccttctgatggggctaacgggctcgctgacgggggccggcctttgtttccttctcccaagtctcttccatttgcggctcctgtggcggaagctactgtggcaccaggtgttcttcgatgttgccatctttgtcatcggcggaatctgttccgtcagcggatttgtgcactcgctggagggtttaatcgaggcgtatcgcactaacgcggaggattag

SEQ ID NO: 231392 - DNA, 1578 bp, Artificial Sequence
  derived and/or modified sequence
atggccaccctgctgcggagcaagctgagcaatgtggccacctctgtgagcaacaagagccaggccaagatgagcggcatgtttgccaggatgggcttccaggccgccacagatgaggaggccgtgggctttgcccactgtgatgacctggactttgagcaccggcagggcctgcagatggacatcctgaaggccgagggggagccctgtggagatgagggcgctgaggcccctgtggagggggacatccactaccagaggggcagcggggcccccctgccccccagcggcagcaaggaccaggtgggcggcggcggggagtttggaggccatgacaagcccaagatcacagcctgggaggccggctggaatgtgaccaatgccatccagggcatgtttgtgctgggcctgccctatgccatcctgcatggaggctacctgggcctcttcctgatcatctttgctgctgtggtgtgctgctacaccgggaagatcctgattgcctgcctgtatgaagaaaatgaagatggagaggtggtgcgggtgcgggacagctatgtggccatcgccaatgcctgctgtgccccccgcttccccaccctgggcggccgggtggtgaatgtggcccagatcatcgagctggtgatgacctgcatcctgtatgtggtggtgtctggcaacctgatgtacaacagcttccctggcctgcctgtgtcccagaagtcctggagcatcatcgccacagctgtgctgctgccctgtgccttcctgaagaacctgaaggctgtgtccaagttcagcctgctgtgcaccctggcccactttgtgatcaacatcctggtgattgcctactgcctgagccgggcccgggactgggcctgggagaaggtgaagttctacattgatgtgaagaagttccccatcagcatcggcatcatcgtgttctcctacaccagccagatcttcctgcccagcctggagggcaacatgcagcagcccagcgagttccactgcatgatgaactggacccacatcgccgcctgtgtgctgaagggcctgtttgccctggtggcctacctgacctgggcagatgagaccaaggaggtgatcacagacaacctgcccggcagcatccgggctgtggtgaacatcttcctggtggccaaggccctgctgagctaccccctgcccttctttgctgctgtggaggtgctggagaagagcctcttccaggagggcagccgggccttcttccctgcctgctacagcggagatggccgcctgaagtcctggggcctgaccctgcgctgtgccctggtggtgttcaccctgctgatggccatctacgtgccccactttgccctgctgatgggcctgaccggcagcctgaccggggccggcctgtgcttcctgctgcccagcctcttccacctgcggctgctgtggaggaagctgctgtggcaccaggtgttctttgatgtggccatctttgtgattggaggcatctgcagcgtgtctggctttgtgcacagcctggagggcctcatcgaggcctaccgcaccaatgctgaggactag

SEQ ID NO: 231393 - DNA, 1578 bp, Artificial Sequence
  derived and/or modified sequence
atggccaccctgctgcggagcaagctgagcaacgtggccaccagcgtaagcaacaagagccaagcgaaaatgtctggcatgtttgcccggatgggttttcaggcagccactgatgaggaagctgtagggtttgcccactgcgacgatcttgacttcgaacatagacagggcttgcagatggacatcctgaaggcggaaggggagccatgcggcgacgaaggtgccgaggcaccagtggagggagatatccactatcaaaggggatccggcgctccactacccccatccggaagcaaggatcaggtaggtgggggaggcgagtttggtggccatgataagcctaagatcacggcttgggaggctgggtggaacgtgaccaacgccattcagggtatgtttgtcttgggcctaccctacgccatcctacacggaggttacttggggctgttcctaattatcttcgccgctgttgtatgttgttacaccggaaagatcctgatcgcctgcctgtacgaggaaaatgaggatggagaggtggtgcgagtgagagactcctatgtggccatcgcaaacgcctgctgcgctccccgtttccctacattgggcggtagggtggtgaacgtagctcagattatcgaactggtgatgacgtgtattttgtacgttgtggtcagcggcaacctaatgtacaacagcttcccagggctacccgtaagccagaagtcctggagtattatcgcaacggcagtattactgccctgcgcctttctcaaaaacctcaaagcggtttccaaattttcactcctctgtactttagcccacttcgtgattaacatcctagtgattgcttactgtttgtctcgggctagagactgggcgtgggagaaagtgaaattctacatagatgttaagaagtttcctataagcattggcatcattgtctttagttacacctcccaaatttttttgcctagcctggagggcaatatgcagcagcctagcgaattccattgtatgatgaattggacccatattgctgcttgtgtgttgaagggattgttcgctctagtcgcctatctgacgtgggcagatgaaaccaaagaggtcatcacagataaccttcccggatccattcgcgccgtggttaacattttcctcgtggccaaggccttgttgagttatcctcttccatttttcgcagctgtcgaggtgctcgaaaaaagcctcttccaggagggcagccgagctttcttccccgcatgctacagcggggatgggaggttaaagtcttggggacttactcttcgctgtgctcttgttgtatttacactcttaatggctatttatgtgcctcactttgctttgcttatgggtctgactggaagcctcactggcgctggtttatgtttcctgttgccatccctattccacttgcgattactttggaggaagttgctttggcaccaagtcttttttgacgttgctatctttgtgattgggggcatttgttcagtttctggatttgtccactccttggagggtttgatcgaagcttataggactaatgctgaggactag

SEQ ID NO: 231394 - DNA, 1578 bp, Artificial Sequence
  derived and/or modified sequence
atggcaacccttctgcgaagcaaactatctaatgttgctaccagtgtttcgaacaaaagccaggcgaaaatgagtggaatgttcgctcgcatgggcttccaggcggctacagatgaagaagctgtggggttcgctcactgtgatgacttggactttgagcatcgccagggcctgcagatggacattctaaaggccgagggggagccatgtggtgatgagggggctgaggctcctgtcgagggggacattcactaccagcgcggatcaggagcgccactgccaccttccgggtcaaaagatcaggttggcggaggaggtgagtttggaggccacgacaagcccaaaattaccgcctgggaggctggctggaatgtcacgaatgcaattcagggcatgtttgtcctgggccttccttatgccatcctgcatggcggatacctcggactgttcctcattattttcgcagctgtagtttgctgctataccggaaagattctgatcgcctgcctttatgaagagaatgaagacggagaggtagtgagagttagggacagctatgtcgcgattgctaatgcttgttgtgcaccccgattccctacgcttggaggtcgggttgtgaacgttgcccaaattattgagctagtgatgacatgcatactctacgtagtggtgagcggtaatctgatgtataacagcttccctggtttgccggtgtcccagaaatcctggagcattatcgcaacagccgtgctgctgccatgcgccttcttgaagaatcttaaagcagtaagcaagtttagtttgctgtgtacgctcgctcatttcgtgatcaacatcctagttatcgcttactgtctgtccagggcaagggactgggcctgggaaaaagtcaaattttacattgatgtcaaaaagttccccatatcgataggaatcatcgtcttctcctatacgagccagatttttttgccttcactagagggcaacatgcaacagccaagcgagtttcactgcatgatgaattggactcatattgctgcatgcgtgcttaaaggcctgtttgcactggtggcgtatctgacttgggcggacgagaccaaagaggtcattaccgacaacctcccaggctctatcagggctgtcgtcaacatatttttggtcgcaaaagcgctgttgtcatatcctctcccttttttcgcagccgttgaggtcctggagaaatctctctttcaagaggggtccagggccttctttcctgcttgctactccggagacggcaggcttaaatcatgggggttgacgctacggtgtgctctcgtggttttcactttgctgatggcaatctacgtcccccatttcgcattgctcatgggactgacaggctctttgacaggcgctgggctgtgcttcctccttccctctttgtttcacctcaggttactgtggagaaagcttctgtggcaccaggtgttctttgatgtggctatattcgtgattggtggcatttgctccgtttctggtttcgtgcattctctcgaaggactgatagaagcgtatcgaaccaatgctgaggattag

SEQ ID NO: 231395 - DNA, 1578 bp, Artificial Sequence
  derived and/or modified sequence
atggccaccctgctgagaagcaagctgagcaacgtggccaccagcgtgagcaacaagagccaggccaagatgagcggcatgttcgccagaatgggcttccaggccgccaccgacgaggaggccgtgggcttcgcccactgcgacgacctggacttcgagcacagacagggcctgcagatggacatcctgaaggccgagggcgagccctgcggcgacgagggcgccgaggcccccgtggagggcgacatccactaccagagaggcagcggcgcccccctgccccccagcggcagcaaggaccaggtgggcggcggcggcgagttcggcggccacgacaagcccaagatcaccgcctgggaggccggctggaacgtgaccaacgccatccagggcatgttcgtgctgggcctgccctacgccatcctgcacggcggctacctgggcctgttcctgatcatcttcgccgccgtggtgtgctgctacaccggcaagatcctgatcgcctgcctgtacgaggagaacgaggacggcgaggtggtgagagtgagagacagctacgtggccatcgccaacgcctgctgcgcccccagattccccaccctgggcggcagagtggtgaacgtggcccagatcatcgagctggtgatgacctgcatcctgtacgtggtggtgagcggcaacctgatgtacaacagcttccccggcctgcccgtgagccagaagagctggagcatcatcgccaccgccgtgctgctgccctgcgccttcctgaagaacctgaaggccgtgagcaagttcagcctgctgtgcaccctggcccacttcgtgatcaacatcctggtgatcgcctactgcctgagcagagccagagactgggcctgggagaaggtgaagttctacatcgacgtgaagaagttccccatcagcatcggcatcatcgtgttcagctacaccagccagatcttcctgcccagcctggagggcaacatgcagcagcccagcgagttccactgcatgatgaactggacccacatcgccgcctgcgtgctgaagggcctgttcgccctggtggcctacctgacctgggccgacgagaccaaggaggtgatcaccgacaacctgcccggcagcatcagagccgtggtgaacatcttcctggtggccaaggccctgctgagctaccccctgcccttcttcgccgccgtggaggtgctggagaagagcctgttccaggagggcagcagagccttcttccccgcctgctacagcggcgacggcagactgaagagctggggcctgaccctgagatgcgccctggtggtgttcaccctgctgatggccatctacgtgccccacttcgccctgctgatgggcctgaccggcagcctgaccggcgccggcctgtgcttcctgctgcccagcctgttccacctgagactgctgtggagaaagctgctgtggcaccaggtgttcttcgacgtggccatcttcgtgatcggcggcatctgcagcgtgagcggcttcgtgcacagcctggagggcctgatcgaggcctacagaaccaacgccgaggactag

SEQ ID NO: 231396 - protein, 249 aa, Artificial Sequence
  derived and/or modified sequence
MLQLWKLVLLCGVLTGTSESLLDNLGNDLSNVVDKLEPVLHEGLETVDNTLKGILEKLKVDLGVLQKSSAWQLAKQKAQEAEKLLNNVISKLLPTNTDIFGLKISNSLILDVKAEPIDDGKGLNLSFPVTANVTVAGPIIGQIINLKASLDLLTAVTIETDPQTHQPVAVLGECASDPTSISLSLLDKHSQIINKFVNSVINTLKSTVSSLLQKEICPLIRIFIHSLDVNVIQQVVDNPQHKTQLQTLI

SEQ ID NO: 231397 - DNA, 45 bp, Artificial Sequence
  derived and/or modified sequence
atgcttcagctttggaaacttgttctcctgtgcggcgtgctcact

SEQ ID NO: 231398 - DNA, 750 bp, Artificial Sequence
  derived and/or modified sequence
atgcttcagctgtggaagctagtcttgctgtgcggcgtactcacgggaacctccgagtcgctcctagacaatcttggtaatgatctatctaatgtggtggataagctagagcctgtgctccatgaggggttagaaacagtcgacaataccctgaaaggtatactggagaagttaaaggttgacctgggggtcttgcaaaaaagctcagcctggcaattggccaaacaaaaggcacaggaggctgagaaactcctcaataatgtgatctcaaagctgttgcctacgaataccgacatctttggtctaaagatcagtaatagtctcattctggacgtgaaggcagagcctatcgacgacggcaagggcctgaatctgtcatttcctgtcacggccaatgtcacagtggccggacccattattggacagatcattaacttgaaggcctcactggatctgctcacagccgtaactatcgagacagatccccagacccaccagcctgtagctgtgctgggtgagtgcgcgtcggatcccactagtataagtctgtcgctgttggataaacatagccaaatcattaacaaatttgtaaactctgtcattaacacactcaaaagcactgtcagttccctgctgcagaaagaaatatgcccgctgattcgtattttcatacactcattagacgttaacgtaatccaacaggtcgtggacaacccgcagcataaaactcaacttcagacgttgatttag

SEQ ID NO: 231399 - DNA, 750 bp, Artificial Sequence
  derived and/or modified sequence
atgctccagctctggaaactggtgcttctttgtggggttcttacagggacatctgagagcctgcttgataatctcgggaatgacctttctaatgtggtcgacaagttggagccagtgcttcatgagggccttgaaacagtagacaacacactgaaaggcatattggaaaagcttaaggtggatctcggagttctgcaaaagtcctctgcttggcagctggccaaacagaaagctcaggaagctgaaaagctcctgaacaatgtcatctctaagctcctgcctactaatacggatatcttcgggctgaaaatcagtaatagcctaatcttggatgtgaaggctgaacctattgatgacggcaaggggctgaacttaagcttcccagttaccgccaacgtaactgtggccggacccataatcggccagattatcaacctgaaggcaagcctggatcttctcaccgccgttactattgagaccgatcctcagacacatcagcctgtggccgtcctgggagagtgcgcaagcgaccccacctccatctctctgtccctcttggacaagcacagccagattatcaacaagttcgttaactccgtgatcaacactctaaaatccaccgtgtctagcctgcttcagaaggaaatttgtccccttattcgcatcttcattcactctctcgatgtgaacgtgatccagcaagtggtcgataacccccagcataagactcaattacaaaccctgatctag

SEQ ID NO: 231400 - DNA, 750 bp, Artificial Sequence
  derived and/or modified sequence
atgctacagctatggaagttagtcctcttatgcggagtccttaccggcacctccgaatctctcctcgacaacctcggcaacgatttgtccaacgtcgttgacaaactcgaaccggtgcttcacgaggggttggagactgtggataatactctgaaaggcatccttgaaaagctcaaagtggatctgggcgtcctgcaaaagtcaagtgcctggcagttagcaaagcaaaaagcccaggaggcagaaaagctgctgaataatgtgatctccaaattactgccaaccaataccgacatcttcggcctgaaaatcagtaattccctcatcctcgacgtgaaagccgagcccatcgacgacggcaagggtctgaatctgtccttcccagtgacagcaaatgtgaccgtagctggacctattataggccaaataattaatctcaaagcttctctagatttgctgaccgccgtgaccatcgaaactgacccccaaacacaccaacccgtggccgttctgggcgaatgtgcctctgatccaacatccatctccttgagcctgctggacaaacattcccaaattattaacaagtttgtcaatagcgtgattaataccctgaaatccaccgtatcctccttgcttcaaaaagagatttgtccacttatccggattttcatccactctctagatgtcaatgtaatccagcaagtggtcgacaacccgcagcataagacccaactgcagactctcatttag

SEQ ID NO: 231401 - DNA, 750 bp, Artificial Sequence
  derived and/or modified sequence
atgctccagctctggaagctagtattactgtgtggagtgctgaccggcacgtccgaatcccttctcgataacctgggaaacgacctgagtaacgtggtcgacaagttagaacccgtcctccatgaaggcttggagactgtggacaacaccctgaaaggcatacttgagaagctcaaggtggacctaggagtactgcaaaaatcttcagcatggcagctcgctaaacaaaaggcacaggaagccgagaagttactgaataatgtcatctctaagctgttaccaaccaacaccgacatttttggactgaagataagtaattccctgatcctagatgtcaaagccgaacctatcgacgacggcaaaggactgaatctgagttttcctgtaaccgccaacgttaccgttgcagggcctatcattggacaaatcattaatcttaaagcctctcttgatttgttgacggctgtcacaatagagaccgaccctcaaactcatcaaccagtcgctgtgctgggagagtgcgcttcagacccgacaagtatctctctctctttgttggacaagcacagtcaaatcattaacaagtttgtcaacagcgtaataaacactcttaagtctactgtctcctccctgctgcaaaaggaaatatgtcctttgatccgcatcttcattcactctctagacgtcaatgtgattcagcaggttgtcgataatccacagcataagacacaacttcaaaccctcatctag

SEQ ID NO: 231402 - DNA, 750 bp, Artificial Sequence
  derived and/or modified sequence
atgcttcagttatggaaattagtgttactctgcggagtcctgaccggaacctccgagagtctcctcgataatcttggcaatgatctttcgaacgtggtcgacaaacttgaaccagtcttgcacgaaggcctggagaccgtagataataccttgaagggaattctggagaagctgaaagtagatctaggagttctccagaaatccagcgcctggcaattagcgaagcaaaaagctcaggaagccgaaaagctgctcaacaacgtgatttcaaagctgttgcccaccaatacagacatctttggcctcaaaatctctaacagcctaattctggacgtgaaagcagaacctatcgatgacggtaaaggattgaatctctcattcccagtcacagcgaacgtcaccgtagccggacctattattggccagattattaaccttaaagcgagcttagatttgctgacagccgttactatagagacggacccacagactcatcaaccagtagccgttttgggagaatgtgcctccgaccctacctcaattagtctatcgctcttggacaaacattctcagatcatcaacaagtttgtcaattccgtgatcaatactctaaagagcactgttagtagcctcctccagaaggaaatctgtcctcttatccggatttttatacatagtttagacgttaacgtgatacagcaggtggtcgacaaccctcaacataaaacacaactccagaccctcatatag

SEQ ID NO: 231403 - DNA, 750 bp, Artificial Sequence
  derived and/or modified sequence
atgttgcagttatggaaactggtactattgtgcggcgttctaaccggtacatccgaaagtttgctcgataatcttggaaatgacttgtcaaacgtggtagacaagctggaacccgtgctccacgaaggtctcgagaccgttgacaacactttaaagggaatcttggagaaactaaaagtagatctgggagtgctccagaaaagctccgcatggcaattggccaagcaaaaagcacaggaagccgaaaagttgctcaacaacgtgatatctaagctacttcccaccaatacagacatttttggactgaagataagtaattccctgatcctagatgtcaaagccgaacctatcgacgacggcaaaggactgaatctgagttttcctgtaaccgccaacgttaccgttgcagggcctatcattggacaaatcattaatcttaaagcctctcttgatttgttgacggctgtcacaatagagaccgaccctcaaactcatcaaccagtcgctgtgctgggagagtgcgcttcagacccgacaagtatctctctctctttgttggacaagcacagtcaaatcattaacaagtttgtcaacagcgtaatcaacactttaaaatccactgtttcttctctcttacaaaaagaaatttgccctctgatccgcatcttcattcacagtctggacgttaacgtcatccagcaagtcgtcgacaatcctcagcacaagacccagctgcaaactctgatatag

SEQ ID NO: 231404 - DNA, 1122 bp, Artificial Sequence
  derived and/or modified sequence
ggagaatttgcaggggggtgacatcctcagacctggcccttggcactgggaagagttgatgcaaagaaattctgcgaggccagagaggaggctttgggaattgtccagcagaaacagagaagtctgaggtggtgtcaagacaaaagatgcttcagctttggaaacttgttctcctgtgcggcgtgctcactgggacctcagagtctcttcttgacaatcttggcaatgacctaagcaatgtcgtggataagctggaacctgttcttcacgagggacttgagacagttgacaatactcttaaaggcatccttgagaaactgaaggtcgacctaggagtgcttcagaaatccagtgcttggcaactggccaagcagaaggcccaggaagctgagaaattgctgaacaatgtcatttctaagctgcttccaactaacacggacatttttgggttgaaaatcagcaactccctcatcctggatgtcaaagctgaaccgatcgatgatggcaaaggccttaacctgagcttccctgtcaccgcgaatgtcactgtggccgggcccatcattggccagattatcaacctgaaagcctccttggacctcctgaccgcagtcacaattgaaactgatccccagacacaccagcctgttgccgtcctgggagaatgcgccagtgacccaaccagcatctcactttccttgctggacaaacacagccaaatcatcaacaagttcgtgaatagcgtgatcaacacgctgaaaagcactgtatcctccctgctgcagaaggagatatgtccactgatccgcatcttcatccactccctggatgtgaatgtcattcagcaggtcgtcgataatcctcagcacaaaacccagctgcaaaccctcatctgaagaggacgaatgaggaggaccactgtggtgcatgctgattggttcccagtggcttgccccacccccttatagcatctccctccaggaagctgctgccaccacctaaccagcgtgaaagcctgagtcccaccagaaggaccttcccagataccccttctcctcacagtcagaacagcagcctctacacatgttgtcctgcccctggcaataaaggcccatttctgca

SEQ ID NO: 231405 - DNA, 750 bp, Artificial Sequence
  derived and/or modified sequence
atgctgcagctgtggaagctggtgctgctgtgcggcgtgctgaccggcaccagcgagagcctgctggacaacctgggcaacgacctgagcaacgtggtggacaagctggagcccgtgctgcacgagggcctggagaccgtggacaacaccctgaagggcatcctggagaagctgaaggtggacctgggcgtgctgcagaagagcagcgcctggcagctggccaagcagaaggcccaggaggccgagaagctgctgaacaacgtgatcagcaagctgctgcccaccaacaccgacatcttcggcctgaagatcagcaacagcctgatcctggacgtgaaggccgagcccatcgacgacggcaagggcctgaacctgagcttccccgtgaccgccaacgtgaccgtggccggccccatcatcggccagatcatcaacctgaaggccagcctggacctgctgaccgccgtgaccatcgagaccgacccccagacccaccagcccgtggccgtgctgggcgagtgcgccagcgaccccaccagcatcagcctgagcctgctggacaagcacagccagatcatcaacaagttcgtgaacagcgtgatcaacaccctgaagagcaccgtgagcagcctgctgcagaaggagatctgccccctgatcagaatcttcatccacagcctggacgtgaacgtgatccagcaggtggtggacaacccccagcacaagacccagctgcagaccctgatctag

SEQ ID NO: 231406 - DNA, 750 bp, Artificial Sequence
  derived and/or modified sequence
atgctgcagctatggaaactggtcctgctctgtggcgttcttacaggcacaagcgaatccctacttgacaatctcggtaacgatctgtctaacgttgtggacaaactggaaccagttctccacgaaggcctcgaaacggttgataatactctgaaaggcattcttgaaaagctcaaagtcgatttaggggtcctccagaagagttctgcatggcagctcgctaaacaaaaagcgcaggaagcagagaagcttctcaataatgtgatttctaaactcttgccaacgaacacagatatctttggcctgaagatctccaatagcttgattctcgacgtgaaggccgaacctatcgatgacggcaaagggctgaacttgtcttttcctgtcactgcaaatgtaaccgtcgctggaccaattatcggacagatcatcaatcttaaggcatccctagatttgctaaccgcagttaccattgaaaccgatccccagactcatcagcccgtggctgtcctcggagagtgcgcctccgatcctacatctatctcattgtccttgctagacaagcacagccagattattaacaaattcgtcaattctgtgattaataccctgaaaagtactgtgtcctctctgctccagaaggaaatctgtccactgattcgcatcttcatccacagccttgatgttaatgtgatacagcaggtggtggataatccacagcacaagactcagttacagactcttatatag

SEQ ID NO: 231407 - DNA, 750 bp, Artificial Sequence
  derived and/or modified sequence
atgctacaactgtggaaattagtgttgctatgcggtgtactgacaggtactagtgagtctttgttggataacctaggcaatgatttaagcaacgtggttgacaagctcgaaccagtgctgcacgaggggctcgaaacagtggacaacaccctgaaagggatcctggagaaactgaaggtggacctgggtgtgctgcagaagtcctccgcttggcagcttgctaagcagaaagcgcaggaagctgagaagcttctgaataacgtgatctctaaactcctgccaaccaacacagacatctttgggcttaaaatcagtaactcgctcattctggatgtcaaggcagaaccaatagacgacggcaaagggctgaacttatcttttccagtgacagccaatgtgacggttgccggaccgataataggccagatcattaacctgaaagcatcccttgaccttcttaccgctgtgaccattgagactgatccacagactcaccagccagtcgccgtgctgggtgagtgtgctagcgatcctactagtatcagcttgagtttgcttgataagcactctcagatcatcaacaaatttgtgaatagcgtgatcaatacattgaagtcgaccgtcagttcgttgctccagaaggagatttgtcccctgatccgtattttcatccactccttggatgtcaatgttattcagcaggtggtggacaacccacagcacaagactcagctccagacactgatctag

SEQ ID NO: 231408 - DNA, 1047 bp, Artificial Sequence
  derived and/or modified sequence
atcccagcagactgtgcagtggggcaaggatttcatgagcatcctcctctaaacgcgtgtcaagacaaaagatgcttcagctttggaaacttgttctcctgtgcggcgtgctcactgggacctcagagtctcttcttgacaatcttggcaatgacctaagcaatgtcgtggataagctggaacctgttcttcacgagggacttgagacagttgacaatactcttaaaggcatccttgagaaactgaaggtcgacctaggagtgcttcagaaatccagtgcttggcaactggccaagcagaaggcccaggaagctgagaaattgctgaacaatgtcatttctaagctgcttccaactaacacggacatttttgggttgaaaatcagcaactccctcatcctggatgtcaaagctgaaccgatcgatgatggcaaaggccttaacctgagcttccctgtcaccgcgaatgtcactgtggccgggcccatcattggccagattatcaacctgaaagcctccttggacctcctgaccgcagtcacaattgaaactgatccccagacacaccagcctgttgccgtcctgggagaatgcgccagtgacccaaccagcatctcactttccttgctggacaaacacagccaaatcatcaacaagttcgtgaatagcgtgatcaacacgctgaaaagcactgtatcctccctgctgcagaaggagatatgtccactgatccgcatcttcatccactccctggatgtgaatgtcattcagcaggtcgtcgataatcctcagcacaaaacccagctgcaaaccctcatctgaagaggacgaatgaggaggaccactgtggtgcatgctgattggttcccagtggcttgccccacccccttatagcatctccctccaggaagctgctgccaccacctaaccagcgtgaaagcctgagtcccaccagaaggaccttcccagataccccttctcctcacagtcagaacagcagcctctacacatgttgtcctgcccctggcaataaaggcccatttctgca

SEQ ID NO: 231409 - DNA, 750 bp, Artificial Sequence
  derived and/or modified sequence
atgctgcagctgtggaagctggtgctgctgtgtggggtgctgaccggcaccagcgagagcctgctggacaacctgggcaatgacctgagcaatgtggtggacaagctggagcctgtgctgcacgagggcctggagaccgtggacaacaccctgaagggcatcctggagaagctgaaggtggacctgggcgtgctgcagaagagcagcgcctggcagctggccaagcagaaggcccaggaggccgagaagctgctgaacaacgtcatcagcaagctgctgcccaccaacacagacatcttcggcctgaagatcagcaacagcctcatcctggatgtgaaggccgagcccattgatgatggcaagggcctgaacctgtccttccctgtgacagccaacgtgacagtggccggccccatcatcggccagatcatcaacctgaaggccagcctggacctgctgacagctgtgaccatcgagacagacccccagacccaccagcctgtggccgtgctgggagaatgtgccagtgaccccaccagcatcagcctgagcctgctggacaagcacagccagatcatcaacaagtttgtgaacagcgtcatcaacaccctgaagagcacagtgagcagcctgctgcagaaggagatctgccccctcatccgcatcttcatccacagcctggatgtgaatgtcatccagcaggtggtggacaacccccagcacaagacccagctgcagaccctcatctag

SEQ ID NO: 231410 - DNA, 750 bp, Artificial Sequence
  derived and/or modified sequence
atgctgcagctgtggaagctggtgctgctgtgcggcgtgctgaccggaacgtcagagtcactgctcgacaatttaggcaacgatttatctaatgtggtggacaagctcgaacctgtgctccatgaaggccttgagactgtggacaatacgctcaagggcatactcgaaaagttgaaggtggatctaggggtgctgcaaaagagctctgcatggcagctggctaaacagaaagcacaggaagctgagaaactcctcaataacgttatctccaaactgctacctacaaacaccgacatcttcggtttgaaaatctcaaattcactgattctggatgtaaaagccgaaccaatagatgatggcaaaggactaaatttgtcatttccagtgaccgcgaacgtgactgtggccggccccatcattggacagatcatcaaccttaaagcttccctagaccttctaactgctgtgactattgaaacagacccccagacacaccagcccgtggctgttctcggagagtgcgcaagcgaccctactagtattagcctctcccttttggacaaacacagtcagataattaacaagttcgtgaatagcgtcattaatacactgaagagtaccgtaagctctctgcttcagaaggagatatgcccactgattaggattttcatccactccctggacgtcaacgttattcagcaagtcgtcgacaaccctcagcataagacccagctgcagacccttatttag

SEQ ID NO: 231411 - DNA, 750 bp, Artificial Sequence
  derived and/or modified sequence
atgctgcagctgtggaagctggtgctgctgtgcggcgtgctgaccgggacttcagagtcacttctggacaacctgggtaacgacctgagtaatgtggtagacaaactcgaaccagtcctgcatgaaggccttgagacagttgacaacactttgaaaggaatcctggaaaagctcaaggtggatctaggggtgctgcagaaatccagcgcctggcaattggccaagcagaaggcgcaggaggcggaaaagttgttgaacaatgtgatcagcaaactgcttccaaccaatactgacatctttggcttgaagatttctaactcactcatcctcgatgtgaaggcagagcccatcgatgatgggaagggcctgaacttgtctttccccgtgaccgccaacgtgactgtcgccggccccattattggtcagataattaaccttaaagcttctctcgacctgctgaccgccgtcaccattgaaaccgacccccaaactcaccagcctgtagccgtgctgggcgaatgtgcctcagatccaacgagcattagcctctctctcctagataaacattcacagattataaataagttcgtcaactctgtcatcaatacactgaagtcaaccgttagtagtctactccaaaaggagatatgtcctttgatacggatctttattcattctctggacgtcaatgtcattcagcaagtggtggataatccccaacataagacacagctccagacgcttatctag

SEQ ID NO: 231412 - RNA, 750 nt, Artificial Sequence
  derived and/or modified sequence
augcuacagcuauggaaguuaguccucuuaugcggaguccuuaccggcaccuccgaaucucuccucgacaaccucggcaacgauuuguccaacgucguugacaaacucgaaccggugcuucacgagggguuggagacuguggauaauacucugaaaggcauccuugaaaagcucaaaguggaucugggcguccugcaaaagucaagugccuggcaguuagcaaagcaaaaagcccaggaggcagaaaagcugcugaauaaugugaucuccaaauuacugccaaccaauaccgacaucuucggccugaaaaucaguaauucccucauccucgacgugaaagccgagcccaucgacgacggcaagggucugaaucuguccuucccagugacagcaaaugugaccguagcuggaccuauuauaggccaaauaauuaaucucaaagcuucucuagauuugcugaccgccgugaccaucgaaacugacccccaaacacaccaacccguggccguucugggcgaaugugccucugauccaacauccaucuccuugagccugcuggacaaacauucccaaauuauuaacaaguuugucaauagcgugauuaauacccugaaauccaccguauccuccuugcuucaaaaagagauuuguccacuuauccggauuuucauccacucucuagaugucaauguaauccagcaaguggucgacaacccgcagcauaagacccaacugcagacucucauuuag

SEQ ID NO: 231413 - RNA, 750 nt, Artificial Sequence
  derived and/or modified sequence
augcuccagcucuggaagcuaguauuacuguguggagugcugaccggcacguccgaaucccuucucgauaaccugggaaacgaccugaguaacguggucgacaaguuagaacccguccuccaugaaggcuuggagacuguggacaacacccugaaaggcauacuugagaagcucaagguggaccuaggaguacugcaaaaaucuucagcauggcagcucgcuaaacaaaaggcacaggaagccgagaaguuacugaauaaugucaucucuaagcuguuaccaaccaacaccgacauuuuuggacugaagauaaguaauucccugauccuagaugucaaagccgaaccuaucgacgacggcaaaggacugaaucugaguuuuccuguaaccgccaacguuaccguugcagggccuaucauuggacaaaucauuaaucuuaaagccucucuugauuuguugacggcugucacaauagagaccgacccucaaacucaucaaccagucgcugugcugggagagugcgcuucagacccgacaaguaucucucucucuuuguuggacaagcacagucaaaucauuaacaaguuugucaacagcguaauaaacacucuuaagucuacugucuccucccugcugcaaaaggaaauauguccuuugauccgcaucuucauucacucucuagacgucaaugugauucagcagguugucgauaauccacagcauaagacacaacuucaaacccucaucuag

SEQ ID NO: 231414 - RNA, 750 nt, Artificial Sequence
  derived and/or modified sequence
augcuucaguuauggaaauuaguguuacucugcggaguccugaccggaaccuccgagagucuccucgauaaucuuggcaaugaucuuucgaacguggucgacaaacuugaaccagucuugcacgaaggccuggagaccguagauaauaccuugaagggaauucuggagaagcugaaaguagaucuaggaguucuccagaaauccagcgccuggcaauuagcgaagcaaaaagcucaggaagccgaaaagcugcucaacaacgugauuucaaagcuguugcccaccaauacagacaucuuuggccucaaaaucucuaacagccuaauucuggacgugaaagcagaaccuaucgaugacgguaaaggauugaaucucucauucccagucacagcgaacgucaccguagccggaccuauuauuggccagauuauuaaccuuaaagcgagcuuagauuugcugacagccguuacuauagagacggacccacagacucaucaaccaguagccguuuugggagaaugugccuccgacccuaccucaauuagucuaucgcucuuggacaaacauucucagaucaucaacaaguuugucaauuccgugaucaauacucuaaagagcacuguuaguagccuccuccagaaggaaaucuguccucuuauccggauuuuuauacauaguuuagacguuaacgugauacagcagguggucgacaacccucaacauaaaacacaacuccagacccucauauag

SEQ ID NO: 231415 - RNA, 750 nt, Artificial Sequence
  derived and/or modified sequence
auguugcaguuauggaaacugguacuauugugcggcguucuaaccgguacauccgaaaguuugcucgauaaucuuggaaaugacuugucaaacgugguagacaagcuggaacccgugcuccacgaaggucucgagaccguugacaacacuuuaaagggaaucuuggagaaacuaaaaguagaucugggagugcuccagaaaagcuccgcauggcaauuggccaagcaaaaagcacaggaagccgaaaaguugcucaacaacgugauaucuaagcuacuucccaccaauacagacauuuuuggacugaagauaaguaauucccugauccuagaugucaaagccgaaccuaucgacgacggcaaaggacugaaucugaguuuuccuguaaccgccaacguuaccguugcagggccuaucauuggacaaaucauuaaucuuaaagccucucuugauuuguugacggcugucacaauagagaccgacccucaaacucaucaaccagucgcugugcugggagagugcgcuucagacccgacaaguaucucucucucuuuguuggacaagcacagucaaaucauuaacaaguuugucaacagcguaaucaacacuuuaaaauccacuguuucuucucucuuacaaaaagaaauuugcccucugauccgcaucuucauucacagucuggacguuaacgucauccagcaagucgucgacaauccucagcacaagacccagcugcaaacucugauauag

SEQ ID NO: 231416 - protein, 360 aa, Artificial Sequence
  derived and/or modified sequence
MVQAHGGRSRAQPLTLSLGAAMTQPPPEKTPAKKHVRLQERRGSNVALMLDVRSLGAVEPICSVNTPREVTLHFLRTAGHPLTRWALQRQPPSPKQLEEEFLKIPSNFVSPEDLDIPGHASKDRYKTILPNPQSRVCLGRAQSQEDGDYINANYIRGYDGKEKVYIATQGPMPNTVSDFWEMVWQEEVSLIVMLTQLREGKEKCVHYWPTEEETYGPFQIRIQDMKECPEYTVRQLTIQYQEERRSVKHILFSAWPDHQTPESAGPLLRLVAEVEESPETAAHPGPIVVHCSAGIGRTGCFIATRIGCQQLKARGEVDILGIVCQLRLDRGGMIQTAEQYQFLHHTLALYAGQLPEEPSP

SEQ ID NO: 231417 - protein, 399 aa, Artificial Sequence
  derived and/or modified sequence
MGASFWPIRQAREQQRRALSFRQTSWLSEPPLGPAPHLSMVQAHGGRSRAQPLTLSLGAAMTQPPPEKTPAKKHVRLQERRGSNVALMLDVRSLGAVEPICSVNTPREVTLHFLRTAGHPLTRWALQRQPPSPKQLEEEFLKIPSNFVSPEDLDIPGHASKDRYKTILPNPQSRVCLGRAQSQEDGDYINANYIRGYDGKEKVYIATQGPMPNTVSDFWEMVWQEEVSLIVMLTQLREGKEKCVHYWPTEEETYGPFQIRIQDMKECPEYTVRQLTIQYQEERRSVKHILFSAWPDHQTPESAGPLLRLVAEVEESPETAAHPGPIVVHCSAGIGRTGCFIATRIGCQQLKARGEVDILGIVCQLRLDRGGMIQTAEQYQFLHHTLALYAGQLPEEPSP

SEQ ID NO: 231418 - protein, 189 aa, Artificial Sequence
  derived and/or modified sequence
MPNTVSDFWEMVWQEEVSLIVMLTQLREGKEKCVHYWPTEEETYGPFQIRIQDMKECPEYTVRQLTIQYQEERRSVKHILFSAWPDHQTPESAGPLLRLVAEVEESPETAAHPGPIVVHCSAGIGRTGCFIATRIGCQQLKARGEVDILGIVCQLRLDRGGMIQTAEQYQFLHHTLALYAGQLPEEPSP

SEQ ID NO: 231419 - DNA, 1083 bp, Artificial Sequence
  derived and/or modified sequence
atggtgcaggcccacggaggaagaagtcgggctcaacccctgactctgtccttgggcgcagctatgacacagccaccaccagaaaagacccctgccaaaaagcacgtcaggctgcaggagaggcggggatcaaacgtggccctgatgctggacgttcgatctcttggggcagtcgagccaatctgcagcgtgaacactccccgggaggttaccctgcactttcttagaacagccgggcacccactcactagatgggcactgcagcgccaacctcccagtcccaaacagctggaggaggagttcctgaaaattcctagcaattttgtgtctcctgaggaccttgacatcccaggccacgcttctaaggaccggtacaaaaccattctgcccaacccccaatcccgagtgtgcctcggaagagcccaatctcaagaagatggagactatatcaacgcaaactacatccgcggatatgacggtaaggagaaagtgtacatcgcaacgcagggcccaatgcctaacactgtttctgacttttgggaaatggtctggcaggaagaagtttcactcatcgtgatgcttactcagctcagagagggaaaggagaaatgcgttcactattggccaaccgaagaggaaacttacggcccattccagatccgcatacaggacatgaaagagtgccctgaatacacggtccggcagctaacaatccagtatcaggaggagagacggtcggtgaaacacattctatttagcgcctggcctgaccaccagactccagaaagtgcgggcccactgttgcgcctggtcgctgaggtggaggagagccctgaaaccgccgcccatcccggccccatcgtggtccactgtagtgccggtatcggaaggactgggtgcttcatagcgaccagaatagggtgtcagcagctgaaagcgcgaggtgaggtggacattctgggcattgtgtgtcagctgaggctggatagagggggtatgatccaaaccgcggaacagtaccagtttttacaccataccctggccctctacgctggacagctgcctgaggagcctagtccctag

SEQ ID NO: 231420 - DNA, 1200 bp, Artificial Sequence
  derived and/or modified sequence
atgggggcaagcttctggccaatccggcaggctagggaacagcaacgccgggctcttagctttcggcagacatcttggctgagtgagcctccattaggccccgctccccatctatcaatggttcaggcccacggaggcagaagtcgcgctcagcccctgaccctgagtctcggcgctgctatgactcagccacccccggagaaaacacctgctaagaaacatgtgagactacaggagaggaggggttctaacgtcgccctgatgttggacgtccgtagtctgggggcagtcgaacccatctgtagtgtgaacaccccacgcgaagttaccctccacttcctccgcacagcaggccatccactgacgcgctgggctcttcagaggcagccgccttccccaaagcagctggaagaagagttcctcaaaatccctagtaatttcgtaagtccggaagatctcgatatccccgggcacgcatcaaaggaccgctataagactatacttccaaatcctcaaagccgagtctgcttgggtagagctcaatcacaggaggacggagactacatcaacgccaactacatccggggatacgacggtaaggaaaaggtgtacatcgctacgcagggccccatgcccaatacagtgtccgacttttgggagatggtctggcaggaagaggttagccttatcgtgatgctcacccagctccgagagggcaaagagaagtgtgtgcactactggcccactgaggaggaaacctatggtccctttcaaatacgaatccaggatatgaaggagtgtccagagtacaccgtgcgacagctgaccattcagtaccaggaggaaaggcggtcggtcaagcacattctgtttagtgcctggccagaccatcaaactccagaatccgctggacccctcctgagacttgtcgccgaggtggaggagtctcctgaaactgccgcccacccaggtcccatcgtcgttcattgttccgccgggataggtcgcaccgggtgcttcattgcaacccggatcggctgccagcaattaaaggccagaggcgaagtggacattctgggcatcgtgtgtcagttacgtctagatcggggagggatgatacagacagccgagcagtaccagtttctacatcacactctagctctgtacgccggtcagctccctgaagagccttccccttag

SEQ ID NO: 231421 - DNA, 1083 bp, Artificial Sequence
  derived and/or modified sequence
atggtgcaggcccacggggggcgatcccgcgctcagcccctcaccttgagcttgggcgccgcgatgacccagcccccacctgagaagacccccgctaaaaaacatgtgaggctccaggagcggagaggcagcaacgttgctcttatgctggacgttcgctcactcggagcagtggaacccatctgtagtgtgaatactccaagagaagtcacactgcattttctgaggaccgccgggcaccctctgactaggtgggccttacagaggcagcccccgtctccaaagcagcttgaggaggagttcctcaaaattccttccaacttcgtgtcccctgaggatctggatattcctgggcatgcctccaaggaccgctacaagactattcttcccaacccacagtcacgagtgtgtctgggacgggcgcagtctcaggaagatggagactacatcaatgctaattatatcagaggttacgatggaaaagaaaaagtttatattgctacccagggcccaatgcccaatactgtttctgatttctgggaaatggtgtggcaggaggaggtgagcctcatcgtgatgctgacacagttgagagaaggcaaggagaaatgcgtccactactggccaacagaagaagagacatatggacctttccagatcagaatccaggatatgaaggagtgtcctgagtataccgtgcggcagttgactattcagtatcaggaagaacgccgcagcgtaaaacatattctgttcagtgcttggcccgatcatcagaccccagagtctgccggacccctcctgcgcctggtggccgaggtcgaagagtccccggagaccgccgcccaccctgggccaattgtggttcactgtagcgctgggatcgggcgcaccgggtgtttcattgctacgaggattggctgccagcagcttaaagctcgcggcgaggtggatattttggggatcgtgtgccaactgaggttagaccgcggagggatgatccaaaccgccgagcagtaccagttccttcaccatacactggccttatacgcagggcagttaccagaggagccatctccgtag

SEQ ID NO: 231422 - DNA, 570 bp, Artificial Sequence
  derived and/or modified sequence
atgcccaacacggtttctgatttttgggaaatggtgtggcaggaggaggtgtcactcatcgtgatgctgacccaactgcgggaaggcaaggaaaaatgtgtccattactggccgaccgaagaagaaacatacgggcctttccagatcagaatccaggatatgaaggaatgccccgagtacacagttcgccaattaacaattcagtaccaagaagagcggcgaagcgtaaagcatatcttgttctccgcctggcctgaccaccagactcccgagtccgctggccctctgctgagactcgttgcagaagtggaagaaagtccagaaactgccgcacacccagggcctatcgtggttcactgcagcgccggcataggacgcaccggatgctttatcgccactcgtatcggttgtcaacaactgaaggcccggggagaagttgatatcctggggatagtgtgccaactcagacttgaccgagggggcatgatccaaaccgccgagcagtaccagttcctacaccataccctcgccttatatgcaggacaacttcccgaggaaccgagcccttag

SEQ ID NO: 231423 - DNA, 411 bp, Artificial Sequence
  derived and/or modified sequence
atgaaggaatgccccgaatataccgtgcgacagctcacaatccagtaccaagaggaacgtcgaagcgtgaagcacatattgttttcagcctggcctgaccatcaaactcccgaaagcgccggccctttactccgcctcgttgccgaggtagaggagtccccagagactgccgctcaccccggaccgatagtggtgcattgttcggctggcattggacgcacagggtgcttcattgccacacggattgggtgccagcagttgaaagccagaggcgaggtggatatcttaggaattgtgtgtcagcttaggttggatagggggggtatgatccagactgcagaacagtatcagtttctgcaccacacccttgcgctgtacgccggacagctcccagaggaaccgtcgccctag

SEQ ID NO: 231424 - DNA, 1083 bp, Artificial Sequence
  derived and/or modified sequence
atggtgcaggcccatggaggccgcagccgggcccagcccctgaccctgagcctgggcgccgccatgacccagcccccacctgagaagaccccagccaagaagcacgtgcggctgcaggagcggcggggcagcaatgtggccctgatgctggatgtgcgcagcctgggcgctgtggagcccatctgcagcgtgaacaccccccgggaggtgaccctgcacttcctgaggacagctggccaccccctgacccgctgggccctgcagaggcagccccccagccccaagcagctggaggaggagttcctgaagatccccagcaactttgtgtccccagaggacctggacatccctggccacgccagcaaggaccgctacaagaccatcctgcccaacccccagagccgggtgtgcctgggccgggcccagagccaggaggatggagactacatcaatgccaactacatccggggctatgatggcaaggagaaggtgtacatcgccacccagggccccatgcccaacacagtgtctgacttctgggagatggtgtggcaggaggaggtgtccctgattgtgatgctgacccagctgcgggagggcaaggagaagtgtgtgcactactggcccacagaggaggagacctacggccccttccagatccgcatccaggacatgaaggaatgtcctgagtacacagtgcggcagctgaccatccagtaccaggaggagcggcgctctgtgaagcacatcctcttcagcgcctggccagaccaccagaccccagagagcgctggccccctgctgcggctggtggccgaggtggaggagagccctgagacagctgcccaccctggccccatcgtggtgcactgcagcgctggcattggaagaacaggctgcttcatcgccacccgcatcggctgccagcagctgaaggcccggggggaggtggacatcctgggcatcgtgtgccagctgcggctggacagaggaggcatgatccagacagctgagcagtaccagttcctgcaccacaccctggccctgtatgccggccagctgcctgaggagcccagcccctag

SEQ ID NO: 231425 - DNA, 1200 bp, Artificial Sequence
  derived and/or modified sequence
atgggcgccagcttctggcccatccggcaggcccgggagcagcagaggcgggccctgtccttccggcagacctcctggctgtctgagccccccctgggccctgccccccacctgtccatggtgcaggcccacggcggccgcagccgggcccagcccctgaccctgagcctgggcgccgccatgacccagcccccacctgagaagaccccagccaagaagcacgtgcggctgcaggagcggcggggcagcaatgtggccctgatgctggatgtgcgcagcctgggcgctgtggagcccatctgcagcgtgaacaccccccgggaggtgaccctgcacttcctgaggacagctggccaccccctgacccgctgggccctgcagaggcagccccccagccccaagcagctggaggaggagttcctgaagatccccagcaactttgtgtccccagaggacctggacatccctggccacgccagcaaggaccgctacaagaccatcctgcccaacccccagagccgggtgtgcctgggccgggcccagagccaggaggatggagactacatcaatgccaactacatccggggctatgatggcaaggagaaggtgtacatcgccacccagggccccatgcccaacacagtgtctgacttctgggagatggtgtggcaggaggaggtgtccctcatcgtgatgctgacccagctgcgggagggcaaggagaagtgtgtgcactactggcccacagaggaggagacctacggccccttccagatccgcatccaggacatgaaggagtgcccagagtacacagtgcggcagctgaccatccagtaccaggaggagaggagatctgtgaagcacatcctcttcagcgcctggccagaccaccagaccccagagagcgctggccccctgctgcggctggtggccgaggtggaggagagccctgagacagctgcccaccctggccccatcgtggtgcactgcagcgctggcatcggccgcacaggctgcttcatcgccaccagaattggctgccagcagctgaaggcccggggggaggtggacatcctgggcatcgtgtgccagctgcggctggaccggggcggcatgatccagacagctgagcagtaccagttcctgcaccacaccctggccctgtatgccggccagctgcctgaggagcccagcccctag

SEQ ID NO: 231426 - DNA, 570 bp, Artificial Sequence
  derived and/or modified sequence
atgcccaacacagtgtctgacttctgggagatggtgtggcaggaggaggtgtccctcatcgtgatgctgacccagctgcgggagggcaaggagaagtgtgtgcactactggcccacagaggaggagacctacggccccttccagatccgcatccaggacatgaaggagtgcccagagtacacagtgcggcagctgaccatccagtaccaggaggagaggagatctgtgaagcacatcctcttcagcgcctggccagaccaccagaccccagagagcgctggccccctgctgcggctggtggccgaggtggaggagagccctgagacagctgcccaccctggccccatcgtggtgcactgcagcgctggcatcggccgcacaggctgcttcatcgccaccagaattggctgccagcagctgaaggcccggggggaggtggacatcctgggcatcgtgtgccagctgcggctggaccggggcggcatgatccagacagctgagcagtaccagttcctgcaccacaccctggccctgtatgccggccagctgcctgaggagcccagcccctag

SEQ ID NO: 231427 - DNA, 411 bp, Artificial Sequence
  derived and/or modified sequence
atgaaggaatgtcctgagtacacagtgcggcagctgaccatccagtaccaggaggagcggcgctctgtgaagcacatcctcttcagcgcctggccagaccaccagaccccagagagcgctggccccctgctgcggctggtggccgaggtggaggagagccctgagacagctgcccaccctggccccatcgtggtgcactgcagcgctggcattggaagaacaggctgcttcatcgccacccgcatcggctgccagcagctgaaggcccggggggaggtggacatcctgggcatcgtgtgccagctgcggctggacagaggaggcatgatccagacagctgagcagtaccagttcctgcaccacaccctggccctgtatgccggccagctgcctgaggagcccagcccctag

SEQ ID NO: 231428 - DNA, 1083 bp, Artificial Sequence
  derived and/or modified sequence
atggtgcaggcccacggcggccggagccgggcccagcccctgaccttgtctttaggggcggcaatgactcaacccccaccagagaagactcccgccaagaaacacgttcggttacaagagaggcgcggaagcaacgtagcgctgatgctagacgtacgctctctgggcgccgttgagcctatctgttccgtgaacacaccgagagaagttaccctgcattttctgcgcaccgccggccaccctcttactcgctgggccctgcaaaggcagccgccatcccctaaacagttggaggaggagtttctaaagattccatcaaatttcgtgtcacccgaagatctggatatacccgggcatgcaagcaaggatcgctacaagacgattttacccaatccccagtcaagggtatgtcttggccgggctcaatcccaggaggatggagactatataaacgccaactacattaggggatacgatgggaaggagaaggtgtacatcgctacgcaggggcctatgcctaacacagtttctgatttctgggagatggtgtggcaagaggaagttagtctcatcgtgatgctcacccagctaagagaaggtaaggaaaagtgtgtgcactattggccaaccgaggaggaaacctacggcccctttcaaattagaatccaagacatgaaggagtgccctgagtacaccgtgcggcagttgacaatccaataccaggaagagcgaagaagcgtaaagcacattttattctctgcctggcccgatcatcaaaccccagaaagcgccggcccactgctcagactagtcgccgaagttgaggagtcccctgaaactgccgcccacccaggccccatcgtagtgcattgttctgccggcattggtcggacaggatgttttatcgccacaagaatcggctgtcagcaacttaaggccaggggagaggtggacatactcggaattgtctgccagctgaggctcgacagaggagggatgattcaaacggcggagcagtatcagttcttgcaccacaccctggcactatatgctggccagcttcctgaggagccatctccgtag

SEQ ID NO: 231429 - DNA, 1200 bp, Artificial Sequence
  derived and/or modified sequence
atgggcgccagcttctggcccatccggcaggcccgggagcagcagcggagggccttgagtttccggcagaccagctggctgtccgagcccccccttggccctgctccacatctgtccatggtgcaggcgcacggcggtaggtcccgcgcgcagcctctgacactgagcctgggagcggccatgactcaaccaccacccgaaaaaacccctgcaaagaagcatgtgagattgcaggagcgtcggggcagtaatgttgccctgatgctggacgtgagaagccttggtgctgtcgagcctatttgcagcgtgaacacaccgagggaagtgacactgcattttctgcgtaccgcaggtcaccccctgacacgctgggccctgcagcgtcaaccacctagtccaaaacagctcgaagaggagtttttgaagatcccaagcaactttgtgagccccgaggatttggacattccaggacacgccagcaaggatcgctacaaaactatactccctaacccccagagtcgcgtctgcctgggaagggctcaatcacaggaagatggcgactacatcaatgccaactatatccgcgggtacgacggtaaagaaaaagtttatatcgctacccagggccctatgcccaacaccgtgtcagatttttgggagatggtgtggcaggaagaagtgtcacttattgtcatgttgactcagttaagagagggcaaggagaagtgcgttcactattggcctacagaggaggagacttacgggccattccagatccgaattcaagacatgaaggagtgccctgagtatacggtcagacagctcacaatccagtaccaagaagagagacgcagcgttaaacacattctgttctccgcttggccagaccaccagacgccggagtccgcgggtccactactcaggttagtggccgaagtggaagagtcacctgaaacagccgctcacccaggtcccatcgttgtacactgcagcgccgggataggtcgcacaggctgttttatcgctacacgcattggatgtcagcaactcaaagctcggggggaggtggatattttgggcatcgtatgccagctgcgtctcgatagaggaggcatgatccagactgctgaacaataccaattccttcatcatactctggccctgtatgcggggcagcttccagaggagcccagcccttag

SEQ ID NO: 231430 - DNA, 1083 bp, Artificial Sequence
  derived and/or modified sequence
atggtgcaggcccacggcggccggagccgggcccagcccctgaccctcagtctcggcgcagccatgacacagcccccacccgagaagacaccagccaaaaaacacgtgagacttcaggagcggaggggctctaatgtggctttgatgctggatgtgcggtcattgggtgctgtggaaccgatttgttcggtgaacactcctcgtgaagtgaccttgcattttcttagaaccgctggccatcccctgacacggtgggctcttcagagacaacccccctcccccaagcagctggaagaagaatttctcaaaatcccaagcaacttcgtgtctccggaagacctggacatcccggggcacgcgtcaaaagaccggtacaagactatattgcctaaccctcagagtcgcgtctgcctgggaagggctcagtcccaagaagatggtgattatattaacgcaaactatatcagaggctatgacggtaaagaaaaagtgtacatcgctacacaggggcctatgccgaacaccgtaagcgacttttgggagatggtgtggcaggaagaggtcagcctcatagtgatgctgacacagctccgcgaaggaaaggaaaaatgtgtacactattggcctacagaagaggaaacatatggcccattccaaatccggattcaagatatgaaggagtgccctgagtataccgtgcggcagctgacaattcaatatcaggaggaaagacgctccgtgaaacatatacttttttccgcctggccagatcaccagactccagagagcgcagggcccttactgcgtctagtggcggaggtcgaagagtctccggaaactgcagcccatcccggccctatcgtagtgcactgtagcgccggaataggacgcactgggtgtttcattgctacccgcatcggatgccagcagttgaaggcccgcggagaggtggacattctgggaatagtttgtcagttgcgactggatcggggcggcatgatccaaaccgcagagcagtaccagtttctccaccatacgttggccctctacgctggacagcttccagaagagccttcaccgtag

SEQ ID NO: 231431 - DNA, 570 bp, Artificial Sequence
  derived and/or modified sequence
atgcccaacaccgtgagcgacttctgggagatggtgtggcaggaggaagtgtcgctcatcgtcatgttgacccaactgagagaaggcaaggaaaagtgtgtacattattggccaaccgaggaggagacctacggtccgttccagattcgcattcaggatatgaaggaatgtcctgaatacacagtcaggcagttgacgattcaatatcaggaggaacgcagaagcgtaaagcacatactcttctctgcctggccggaccaccagactccagaatcagcagggccattactcaggctcgtggctgaggtggaggaatcacccgagactgcggcgcacccaggccccattgtagttcactgtagtgcaggaataggccggactggctgttttattgccacccggataggctgtcagcagcttaaagctcggggcgaggtggacattctcggcattgtttgccagcttcggctagaccgaggtgggatgattcaaactgcagagcagtaccagttcctacatcataccttagcgctctatgccggacaactgcccgaggagccatcaccttag

SEQ ID NO: 231432 - DNA, 411 bp, Artificial Sequence
  derived and/or modified sequence
atgaaggagtgccccgagtacaccgtgcggcagctgaccatccagtatcaggaagaacgccgcagtgtgaaacacatactattcagcgcctggccagaccatcagactcccgagtctgctggacccctgctacggctcgtggccgaggtggaggaaagcccggagactgccgctcacccggggcctatcgtggtgcattgctctgccgggatcgggaggacagggtgcttcatcgctaccagaattgggtgtcaacagctgaaggcccgcggagaagtggacatcctgggcatcgtctgccagttgaggctggatcgtggaggcatgattcagaccgcagagcagtaccaatttctccatcacacattggctttgtatgccggccagctgcccgaagaaccatcaccatag

SEQ ID NO: 231433 - DNA, 1083 bp, Artificial Sequence
  derived and/or modified sequence
atggtgcaagcccacggtggacgaagccgagctcagccactcaccctaagtctaggagccgctatgacacaaccaccaccggagaaaacacccgcaaagaaacacgtgaggcttcaggaacggcgaggtagcaacgttgccctgatgctcgatgttcgttcattgggcgcagtcgagcctatctgttctgtgaatacgccacgggaagtaactctgcacttcctcagaacagccggtcatccactgactcggtgggccctgcaacggcagcccccatctcctaagcagttggaagaggagtttctgaaaatcccttctaatttcgtaagtcctgaagatttagatataccaggccacgcatcaaaggacaggtacaagacgatattgcctaacccacaaagcagagtgtgccttggaagagcccaaagtcaggaagacggcgattatatcaatgcgaactacatccggggttacgatgggaaagaaaaagtgtacatagccacccagggacctatgcctaacacagtgagtgacttctgggagatggtttggcaggaagaggtatctctgatcgtgatgttaacacaactgcgcgaagggaaagagaagtgcgttcactattggcccactgaggaggagacttacggaccatttcagatccgcattcaggacatgaaggagtgcccagaatacactgtcaggcagctcacgattcaatatcaggaggaaagaaggtccgtgaagcatattttgttctcagcatggccagaccaccagaccccagagagcgctggcccactgctccggctggttgctgaggtggaggagagtcctgaaacagctgcccatccaggcccaattgtcgtccattgcagcgctgggatcgggaggaccggctgctttatagccacccggattggatgtcagcagctgaaggcccgaggtgaagtggacatcctggggatagtttgtcagttgagattggacagggggggaatgatccagacggcggagcagtatcagttccttcaccacactcttgccctttacgcaggccaactgcctgaggaacctagtccctag

SEQ ID NO: 231434 - DNA, 1200 bp, Artificial Sequence
  derived and/or modified sequence
atgggcgcttcgttctggccgatcagacaggctagagaacaacagcggcgagccctctcttttagacaaaccagctggctgtccgagccgccattgggtccagccccacacttgtccatggtgcaggcacacggaggcaggtcaagagcacagcctctgactctgtccctcggtgccgcaatgacccagccgcctcccgaaaaaacacctgcaaaaaaacatgtacgtctgcaggagagaaggggttcaaatgtcgctttgatgttggatgtgcgctctctgggcgcagttgaacctatctgcagtgtgaacacccctagggaagtgacactccatttcttacgcactgctggccaccctttgacaagatgggctttgcagcggcagccccctagcccaaagcagctggaggaagaatttctgaagatacccagtaatttcgtgtcgccggaggacctggacattcccggtcacgcctcaaaagaccggtacaagaccatcttacctaaccctcagtcaagggtctgcctgggcagggcccagagtcaggaagatggagactacattaacgccaactacatccgcggttatgacgggaaagagaaagtgtatattgcaacccaaggtcccatgccaaacacagtcagtgacttctgggagatggtgtggcaggaggaggtttcgttgatcgtgatgctgactcaactgcgcgaggggaaggaaaagtgcgtgcactattggccaacagaagaggagacctacgggccatttcagatccgaattcaggacatgaaagaatgtcctgagtacacagtgcgtcagttgaccattcagtaccaggaggaacggaggtctgtgaagcatattttgttttccgcgtggcctgatcatcaaacacccgaaagcgcaggccctctgctgaggctggtcgccgaggtcgaagagtcacccgaaaccgccgctcacccaggtccaatagtggtacattgttccgccggaatcggccgtactggctgcttcattgcaactaggattggttgtcagcagttgaaagccaggggtgaggtcgatatcctcggcatcgtttgccaacttcgactagaccgtgggggtatgattcagaccgcagagcaataccaattcctgcaccacacactggctctttacgcaggtcagctgcccgaggagccatccccatag

SEQ ID NO: 231435 - DNA, 1083 bp, Artificial Sequence
  derived and/or modified sequence
atggtgcaagcccatggaggcagatcgcgcgcacagcctcttacactgagtctgggtgctgccatgacgcagcctcctccagaaaaaactccggctaagaagcacgtcaggctgcaggagagacggggaagtaacgtggcattgatgctagacgtgcggtctctgggagccgtcgagcccatatgctcggtgaacactcctagggaggtgaccctccatttcctgcggacagccggacacccactcactcgctgggcactgcagcgacagcctcctagcccaaagcaactggaagaggagttcctcaaaattccatcaaattttgtttcccccgaggatttagacattcctggccatgcttccaaggaccgctacaaaacaatactgcctaatccacagtcccgcgtctgcctcggcagggcccagtcacaggaggatggggactacatcaatgctaactacatcaggggctatgacggtaaagagaaggtgtacatcgccacgcaaggccctatgcctaataccgtaagtgacttttgggagatggtctggcaggaagaggtttccctgatcgtcatgctgacacaactgagagagggcaaggaaaaatgtgtccattattggccaactgaagaggagacctatgggccttttcagatccgaatccaggacatgaaagagtgtccagagtacaccgtccgccagcttactattcagtatcaggaggaaaggaggtctgtgaagcacattctcttcagcgcctggcctgatcaccagacacccgaaagcgcagggcctctgctcaggctggtcgccgaagtggaggaaagccccgagactgccgcacacccagggccaatcgtcgtgcactgcagtgccggaataggcagaacaggctgcttcattgccaccaggataggttgccagcagcttaaagcgcgtggggaagtagatatcctaggcattgtgtgtcagctgaggctcgaccggggtggtatgatccagacggctgaacagtatcagtttctgcatcacacattagccctttatgcgggacagcttcctgaggaaccgtccccatag

SEQ ID NO: 231436 - DNA, 570 bp, Artificial Sequence
  derived and/or modified sequence
atgcccaatactgtgtctgacttttgggagatggtctggcaagaggaggtgtctctcatcgtgatgttaactcagctgagggaaggtaaagagaagtgtgtgcattactggcccaccgaggaggaaacatatggacccttccaaattcggattcaggacatgaaggagtgcccggaatacaccgtgagacagctgacaattcagtatcaagaggagcggaggagtgtaaagcacattttgttctctgcatggcccgaccatcagactccggaaagtgctgggccattattaaggttggtggccgaagtcgaggagagccctgaaaccgcagcacatccaggcccaatcgtagtgcactgcagcgcagggatagggagaactggctgctttatcgcgacccggattggctgccaacagctcaaggcacgtggggaagttgacattctgggtattgtatgccaacttcgattagatcggggtgggatgattcagactgctgagcagtatcaattcctgcaccatacccttgcactgtatgcaggacaattaccagaagagccctccccttag

SEQ ID NO: 231437 - DNA, 411 bp, Artificial Sequence
  derived and/or modified sequence
atgaaagagtgtccggaatacaccgtaagacagctgacaattcagtatcaggaggaacgcaggagtgtgaagcacatactgttctctgcatggccagaccaccagacccctgagtctgccggaccactcctgagattggtcgccgaagtggaagagtcgcccgagaccgccgctcaccctggccctatcgtcgtgcattgttcggcgggaattggacggacgggctgcttcattgcaacacggatcggatgccagcagctcaaggcacgcggagaagtggacatcctgggcatcgtctgtcaactcagactggacagggggggaatgatacagactgcagagcagtaccaatttttacaccataccctcgccctctacgccggtcagttaccggaagaacctagcccgtag

SEQ ID NO: 231438 - DNA, 3265 bp, Artificial Sequence
  derived and/or modified sequence
ccagaaacagacctgggagtggaacagcagcagttaggagaggaccctgctggggtccaggagcccgcctgcctggctgcccaaccagctccaacactgctggaggcctccattctctgttcaggggaaggcccactggttagctcagagatggcttctgcgtgctttctcccttccgtcctagagaacacatattttctgtttcctcccttgccttctcccacttggacctgctcagagccctgtgtactctggtgtgtggcctctctcccctctctcttttcctccttctggattctttcctatcttcatccacaatctctaccctttatcttgccgttactctaccccgagactgccttctgccctgggtcccaccaaatagatcctgtccttcccttagtgaaaatgaggccacctcttggggaacagaagacgccccagtgaaaacagagtgcaaacctggcctggcatgggagcctccttctggccaatcaggcaggccagagaacagcagcggagggccctgtctttcaggcagacctcatggctgagtgagcctcccctgggcccagcaccccacctcagcatggtccaagcccatggggggcgctccagagcacagccgttgaccttgtctttgggggcagccatgacccagcctccgcctgaaaaaacgccagccaagaagcatgtgcgactgcaggagaggcggggctccaatgtggctctgatgctggacgttcggtccctgggggccgtagaacccatctgctctgtgaacacaccccgggaggtcaccctacactttctgcgcactgctggacacccccttacccgctgggcccttcagcgccagccacccagccccaagcaactggaagaagaattcttgaagatcccttcaaactttgtcagccccgaagacctggacatccctggccacgcctccaaggaccgatacaagaccatcttgccaaatccccagagccgtgtctgtctaggccgggcacagagccaggaggacggagattacatcaatgccaactacatccgaggctatgacgggaaggagaaggtctacattgccacccagggccccatgcccaacactgtgtcggacttctgggagatggtgtggcaagaggaagtgtccctcattgtcatgctcactcagctccgagagggcaaggagaaatgtgtccactactggcccacagaagaggaaacctatggacccttccagatccgcatccaggacatgaaagagtgcccagaatacactgtgcggcagctcaccatccagtaccaggaagagcgccggtcagtaaagcacatcctcttttcggcctggccagaccatcagacaccagaatcagctgggcccctgctgcgcctagtggcagaggtggaggagagcccggagacagccgcccaccccgggcctatcgtagtccactgcagtgcagggattggccggacgggctgcttcatcgccacgcgaattggctgtcaacagctgaaagcccgaggagaagtggacattctgggtattgtgtgccaactgcggctagacagaggggggatgatccagacggcagagcagtaccagttcctgcaccacactttggccctgtatgcaggccagctgcctgaggaacccagcccctgacccctgccaccctccggtggcccaggtgcctacctccctcaagcctgggaaggtgggtctggggaaagtgggccgagtgatctgggggtaccccttgggttggtgtggggaaggagtgcctccttagtggtgcttgcagtcacaggaagcagcagcagtaaggacaaggggccggattccaggtcttcaacactggccactcctctgcttcctctgttggccccagatggacagtaaggggaacctccaatgtctctctgaacttaaagacaggagctggcatttatgacagacaaagaaagaagcccaggtgtcctggtgttctctgagacactctttgtgagcttcagtttcctgttctataacatgaacataagtgcttagctgccatgagggaaaagtaatgagagaagtttctagaagccactccagccactccttcctggggctgacaaaagggtgattccaagatcatccttcacccgaggtcctgcccaagcacaggccagatgcaagaatggggaaaagtctggtcctgatctccaagtctcaacatcctatcagtgactctgctccctgaccacacatcggaagggctggatgaccccaatcaaaagaaagaacaaggactctggttacccttgcctccacccatgtgtcataagagtaggctacagaggtgaccaggcctggcagttgaaatctctggaagagggaacatgtggggactactcagaggcaaagaggagctgctcctgcctccatggttgctggccactcccaccaactactcttagggaggctaagcagtctctgttttgcttccatggctcaaataataccctgggtatgcaggacccactataccttgcatttgctgagtacacctagagagcttggctgtttccaaaaacaatcagggtcataaccatccatgcagacatggaggctcggctgaaccaggactcctcactgtctacctgagagaatgagcacccctcatccatctcagcatcaacacaatttccaggggacctcaggtctacctcaggactgaacgccacacctcaggattcctcctccttgaatctgagactggctgcccattctgagatggggatgaaggtaagatgccgcatcaccaggcacgccgcccctgacagctgccttgataccagctctctgtggaaacccccgaggagttggatctggagaacagctgggcctcctcactcaggacttctctcctgaagaacacgcagtgctaaaactgaggatgatttccctaatgcttctgcttggccttatggaggagctgctccttccttacagccttggggatggacttgcccacacctccacctcccctgagccctgtgagaggcacgactgtctatgccaatgaggctcggtggggggctctcaagtgcctgatcctgccctgggctcagagccagcccagagggaagcaactgcacagccccacaggccctccctggcactgtccccccaaccccatctcagagctcagagggtacaagctccagaacagtaaccaagtgggaaaataaagacttcttggatgactgactc

SEQ ID NO: 231439 - DNA, 1189 bp, Artificial Sequence
  derived and/or modified sequence
agccctcaaagacagaccgacagacagacagacagctggcaagaggcagcctgggggccacagctgcttcagcagacctcatggctgagtgagcctcccctgggcccagcaccccacctcagcatggtccaagcccatggggggcgctccagagcacagccgttgaccttgtctttgggggcagccatgacccagcctccgcctgaaaaaacgccagccaagaagcatgtgcgactgcaggagagaagatcccttcaaactttgtcagccccgaagacctggacatccctggccacgcctccaaggaccgatacaagaccatcttgccaaatccccagagccgtgtctgtctaggccgggcacagagccaggaggacggagattacatcaatgccaactacatccgaggctatgacgggaaggagaaggtctacattgccacccagggccccatgcccaacactgtgtcggacttctgggagatggtgtggcaagaggaagtgtccctcattgtcatgctcactcagctccgagagggcaaggagaaatgtgtccactactggcccacagaagaggaaacctatggacccttccagatccgcatccaggacatgaaagagtgcccagaatacactgtgcggcagctcaccatccagtaccaggaagagcgccggtcagtaaagcacatcctcttttcggcctggccagaccatcagacaccagaatcagctgggcccctgctgcgcctagtggcagaggtggaggagagcccggagacagccgcccaccccgggcctatcgtagtccactgcagtgcagggattggccggacgggctgcttcatcgccacgcgaattggctgtcaacagctgaaagcccgaggagaagtggacattctgggtattgtgtgccaactgcggctagacagaggggggatgatccagacggcagagcagtaccagttcctgcaccacactttggccctgtatgcaggccagctgcctgaggaacccagcccctgacccctgccaccctccggtggcccaggtgcctacctccctcaagcctgggaaggtgggtctggggaaagtgggccgagtgatctgggggtaccccttgggttggtgtggggaaggagtgcctccttagtggtgcttgcagtcacaggaagcagcagcagtaaggacaa

SEQ ID NO: 231440 - DNA, 1147 bp, Artificial Sequence
  derived and/or modified sequence
aaagacagaccgacagacagacagacagctggcaagaggcagcctgggggccacagctgcttcagcagacctcatggctgagtgagcctcccctgggcccagcaccccacctcagcatggtccaagcccatggggggcgctccagagcacagccgttgaccttgtctttgggggcagccatgacccagcctccgcctgaaaaaacgccagccaagaagcatgtgcgactgcaggagaggcggggctccaatgtggctctgatgctggacgttcggtccctgggggccgtagaacccatctgctctgtgaacacaccccgggaggtcaccctacactttctgcgcactgctggacacccccttacccgctgggcccttcagcgccagccacccagccccaagcaactggaagaagaattcttgaagaggaaacctatggacccttccagatccgcatccaggacatgaaagagtgcccagaatacactgtgcggcagctcaccatccagtaccaggaagagcgccggtcagtaaagcacatcctcttttcggcctggccagaccatcagacaccagaatcagctgggcccctgctgcgcctagtggcagaggtggaggagagcccggagacagccgcccaccccgggcctatcgtagtccactgcagtgcagggattggccggacgggctgcttcatcgccacgcgaattggctgtcaacagctgaaagcccgaggagaagtggacattctgggtattgtgtgccaactgcggctagacagaggggggatgatccagacggcagagcagtaccagttcctgcaccacactttggccctgtatgcaggccagctgcctgaggaacccagcccctgacccctgccaccctccggtggcccaggaagcagcagcagtaaggacaaggggccggattccaggtcttcaacactggccactcctctgcttcctctgttggccccagatggacagtaaggggaacctccaatgtctctctgaacttaaagacaggagctggcatttatgacagacaaagaaagaagcccaggtgtcctggtgttctctgagacactctttgtgagcttcagtttcctgttctataacatgaacataagtgcttagctgccatga

SEQ ID NO: 231441 - DNA, 1083 bp, Artificial Sequence
  derived and/or modified sequence
atggtgcaggcccacggcggcagaagcagagcccagcccctgaccctgagcctgggcgccgccatgacccagcccccccccgagaagacccccgccaagaagcacgtgagactgcaggagagaagaggcagcaacgtggccctgatgctggacgtgagaagcctgggcgccgtggagcccatctgcagcgtgaacacccccagagaggtgaccctgcacttcctgagaaccgccggccaccccctgaccagatgggccctgcagagacagccccccagccccaagcagctggaggaggagttcctgaagatccccagcaacttcgtgagccccgaggacctggacatccccggccacgccagcaaggacagatacaagaccatcctgcccaacccccagagcagagtgtgcctgggcagagcccagagccaggaggacggcgactacatcaacgccaactacatcagaggctacgacggcaaggagaaggtgtacatcgccacccagggccccatgcccaacaccgtgagcgacttctgggagatggtgtggcaggaggaggtgagcctgatcgtgatgctgacccagctgagagagggcaaggagaagtgcgtgcactactggcccaccgaggaggagacctacggccccttccagatcagaatccaggacatgaaggagtgccccgagtacaccgtgagacagctgaccatccagtaccaggaggagagaagaagcgtgaagcacatcctgttcagcgcctggcccgaccaccagacccccgagagcgccggccccctgctgagactggtggccgaggtggaggagagccccgagaccgccgcccaccccggccccatcgtggtgcactgcagcgccggcatcggcagaaccggctgcttcatcgccaccagaatcggctgccagcagctgaaggccagaggcgaggtggacatcctgggcatcgtgtgccagctgagactggacagaggcggcatgatccagaccgccgagcagtaccagttcctgcaccacaccctggccctgtacgccggccagctgcccgaggagcccagcccctag

SEQ ID NO: 231442 - DNA, 1200 bp, Artificial Sequence
  derived and/or modified sequence
atgggcgccagcttctggcccatcagacaggccagagagcagcagagaagagccctgagcttcagacagaccagctggctgagcgagccccccctgggccccgccccccacctgagcatggtgcaggcccacggcggcagaagcagagcccagcccctgaccctgagcctgggcgccgccatgacccagcccccccccgagaagacccccgccaagaagcacgtgagactgcaggagagaagaggcagcaacgtggccctgatgctggacgtgagaagcctgggcgccgtggagcccatctgcagcgtgaacacccccagagaggtgaccctgcacttcctgagaaccgccggccaccccctgaccagatgggccctgcagagacagccccccagccccaagcagctggaggaggagttcctgaagatccccagcaacttcgtgagccccgaggacctggacatccccggccacgccagcaaggacagatacaagaccatcctgcccaacccccagagcagagtgtgcctgggcagagcccagagccaggaggacggcgactacatcaacgccaactacatcagaggctacgacggcaaggagaaggtgtacatcgccacccagggccccatgcccaacaccgtgagcgacttctgggagatggtgtggcaggaggaggtgagcctgatcgtgatgctgacccagctgagagagggcaaggagaagtgcgtgcactactggcccaccgaggaggagacctacggccccttccagatcagaatccaggacatgaaggagtgccccgagtacaccgtgagacagctgaccatccagtaccaggaggagagaagaagcgtgaagcacatcctgttcagcgcctggcccgaccaccagacccccgagagcgccggccccctgctgagactggtggccgaggtggaggagagccccgagaccgccgcccaccccggccccatcgtggtgcactgcagcgccggcatcggcagaaccggctgcttcatcgccaccagaatcggctgccagcagctgaaggccagaggcgaggtggacatcctgggcatcgtgtgccagctgagactggacagaggcggcatgatccagaccgccgagcagtaccagttcctgcaccacaccctggccctgtacgccggccagctgcccgaggagcccagcccctag

SEQ ID NO: 231443 - DNA, 570 bp, Artificial Sequence
  derived and/or modified sequence
atgcccaacaccgtgagcgacttctgggagatggtgtggcaggaggaggtgagcctgatcgtgatgctgacccagctgagagagggcaaggagaagtgcgtgcactactggcccaccgaggaggagacctacggccccttccagatcagaatccaggacatgaaggagtgccccgagtacaccgtgagacagctgaccatccagtaccaggaggagagaagaagcgtgaagcacatcctgttcagcgcctggcccgaccaccagacccccgagagcgccggccccctgctgagactggtggccgaggtggaggagagccccgagaccgccgcccaccccggccccatcgtggtgcactgcagcgccggcatcggcagaaccggctgcttcatcgccaccagaatcggctgccagcagctgaaggccagaggcgaggtggacatcctgggcatcgtgtgccagctgagactggacagaggcggcatgatccagaccgccgagcagtaccagttcctgcaccacaccctggccctgtacgccggccagctgcccgaggagcccagcccctag

SEQ ID NO: 231444 - DNA, 411 bp, Artificial Sequence
  derived and/or modified sequence
atgaaggagtgccccgagtacaccgtgagacagctgaccatccagtaccaggaggagagaagaagcgtgaagcacatcctgttcagcgcctggcccgaccaccagacccccgagagcgccggccccctgctgagactggtggccgaggtggaggagagccccgagaccgccgcccaccccggccccatcgtggtgcactgcagcgccggcatcggcagaaccggctgcttcatcgccaccagaatcggctgccagcagctgaaggccagaggcgaggtggacatcctgggcatcgtgtgccagctgagactggacagaggcggcatgatccagaccgccgagcagtaccagttcctgcaccacaccctggccctgtacgccggccagctgcccgaggagcccagcccctag

SEQ ID NO: 231445 - protein, 162 aa, Artificial Sequence
  derived and/or modified sequence
MDAVDATMEKLRAQCLSRGASGIQGLARFFRQLDRDGSRSLDADEFRQGLAKLGLVLDQAEAEGVCRKWDRNGSGTLDLEEFLRALRPPMSQAREAVIAAAFAKLDRSGDGVVTVDDLRGVYSGRAHPKVTLAEFQDYYSGVSASMNTDEEFVAMMTSAWQL

SEQ ID NO: 231446 - DNA, 489 bp, Artificial Sequence
  derived and/or modified sequence
atggatgccgttgacgccaccatggagaaactcagggcccagtgtcttagtaggggagcgtcaggtatccaaggcctggcccggtttttccggcagctggaccgtgatggcagtcgatccctggacgctgacgaattcagacaaggacttgccaagctgggtcttgtgctggatcaggcagaggcagaaggggtctgccgcaaatgggaccggaatggtagcggtacgctcgacttagaggagtttctccgagcactcagacctccaatgagtcaggcccgtgaggctgtaatagccgcagcctttgcgaagcttgaccgctccggtgatggcgtcgtcacggtcgacgacttaaggggagtgtactccgggagggcccacccgaaagtcactttagccgagttccaagactattacagcggggtgagcgctagcatgaacacggacgaagaattcgtcgccatgatgacaagcgcttggcaactttag

SEQ ID NO: 231447 - DNA, 489 bp, Artificial Sequence
  derived and/or modified sequence
atggatgctgtggatgccaccatggagaagctgcgggcccagtgcctgagcagaggagccagcggcatccagggcctggcccgcttcttccggcagctggacagagatggcagccgcagcctggatgctgatgagttccggcagggcctggccaagctgggcctggtgctggaccaggccgaggccgagggcgtgtgcaggaagtgggacagaaatggcagcggcaccctggacctggaggagttcctgcgggccctgcggccccccatgagccaggcccgggaggccgtgattgctgctgcctttgccaagctggacagaagtggagatggagtggtgacagtggatgacctgcggggcgtgtacagcggccgggcccaccccaaggtgaccctggccgagttccaggactactacagcggcgtgtctgcctccatgaacacagatgaggagtttgtggccatgatgaccagcgcctggcagctgtag

SEQ ID NO: 231448 - DNA, 489 bp, Artificial Sequence
  derived and/or modified sequence
atggacgccgtggacgccaccatggagaagctgcgggcccagtgcctgagtcggggtgcaagcgggatccaaggcctggcccgtttttttcgccagctggatcgggatggttctaggtctttagatgcggatgagttccgtcagggcctggccaaattaggcctggtgctcgatcaagccgaggcagaaggggtctgtcgaaaatgggacaggaacgggtcagggacactggatctggaggagttcctacgagctctgagacccccaatgtcccaggccagggaagccgtgatcgcggccgcttttgctaaactggataggtctggagatggtgtggtgaccgtagatgacctgcgcggggtatattccggcagggcccaccctaaggtgaccctagccgaatttcaagactattattctggtgtgagtgcaagtatgaacacagacgaggagtttgtggccatgatgacctccgcgtggcagctgtag

SEQ ID NO: 231449 - DNA, 489 bp, Artificial Sequence
  derived and/or modified sequence
atggacgccgtggacgccaccatggagaaacttcgcgctcagtgtctctccaggggtgcctccggaatacagggactggcgaggttctttagacaattagacagagacggttcccggtcacttgacgcagacgagttccgtcagggacttgccaagcttggcctcgtgctggaccaggcagaagctgagggggtgtgccgcaagtgggacagaaatggtagcggcaccctcgacctggaagagtttctcagagccctcagaccacctatgagccaggcaagggaagcagtgatcgcggctgcctttgcaaagctcgatagaagtggagatggagttgtcaccgtggatgatctgaggggagtgtacagcggcagggcccatcctaaggttacattggccgagttccaggattattatagcggcgtgtctgccagcatgaatacggatgaagagttcgtggccatgatgactagtgcctggcagctgtag

SEQ ID NO: 231450 - DNA, 1525 bp, Artificial Sequence
  derived and/or modified sequence
acagtgcattcatgcagctgggccccaccccatctccagaggcaccttccactagcaacagtctccccaggcacaacacagctaacacaaggccccgcaggcaggactctgggacagacgcaggccagctgcccagagcccagaccaagcatggacgccgtggatgccaccatggagaaactccgggcacagtgcctgtcccgcggggcctcgggcatccagggcctggccaggtttttccgccaactagaccgggacgggagcagatccctggacgctgatgagttccggcagggtctggccaaactcgggctggtgctggaccaggcggaggcagagggtgtgtgcaggaagtgggaccgcaatggcagcgggacgctggatctggaggagttccttcgggcgctgcggccccccatgtcccaggcccgggaggctgtcatcgcagctgcatttgccaagctggaccgcagtggggacggcgtcgtgacggtggacgacctccgcggggtgtacagtggccgtgcccaccccaaggtcacactggcggaattccaggactactacagcggcgtgagtgcctccatgaacacggatgaggagttcgtggccatgatgaccagtgcctggcagctgtgagcagctccggctcagccctgctgccctggcctgtcactccccacccctgccggagacctcccttccctgggccccttctctcctgggcagccacaccacagagcggggaggggcaggtgggggaatggaggctgcaggactggctagaccaggtccctgccggtccaccaggcggaggtgggacaaaggtcctaacaggagtcactggctcaggaccccagggagaaacgctctccccacccacgccatgctgaccagagatcttgcagcccctgtggatgcccccgccgaggtcccccgatccccgcacccggactgctgctccctgcccctcccttgcgggtcccccaggaagccaggtgaccccaggtgggaggctgtgtgtggaggccatcctggaaggaagtttagacctgcccaggtgtggagcgaggggcacaggggcatcctaacctcagaaactgaaataaagcctttgaaaaaaaaatctgtaaaacatcaacccccaatcagaagatggcaaatggggaataaaaatagcaggtaacatgtccagcgggcccagtatctacattctggtgagcggcccgaggctgggagctctgggcgggggcagaccggcggggccttgcagcaggggtgggggtaaagtgcgggtggtggtggagagaacagggctgtggctggaccccagcactggtgacacgctgggtgggagcatgaggccccaggctgctggaggtcctcgcccggggaggtggaggccgttcctggtcaggggcttcctgaggcccctggggcatgcagaggccagggttttagttaaaagtttaatgtagttcccaaatacatttcatatgacaatcttacataaatgttccaaaac

SEQ ID NO: 231451 - DNA, 489 bp, Artificial Sequence
  derived and/or modified sequence
atggacgccgtggacgccaccatggagaagctgagagcccagtgcctgagcagaggcgccagcggcatccagggcctggccagattcttcagacagctggacagagacggcagcagaagcctggacgccgacgagttcagacagggcctggccaagctgggcctggtgctggaccaggccgaggccgagggcgtgtgcagaaagtgggacagaaacggcagcggcaccctggacctggaggagttcctgagagccctgagaccccccatgagccaggccagagaggccgtgatcgccgccgccttcgccaagctggacagaagcggcgacggcgtggtgaccgtggacgacctgagaggcgtgtacagcggcagagcccaccccaaggtgaccctggccgagttccaggactactacagcggcgtgagcgccagcatgaacaccgacgaggagttcgtggccatgatgaccagcgcctggcagctgtag

SEQ ID NO: 231452 - protein, 562 aa, Artificial Sequence
  derived and/or modified sequence
MSRSLLLWFLLFLLLLPPLPVLLADPGAPTPVNPCCYYPCQHQGICVRFGLDRYQCDCTRTGYSGPNCTIPGLWTWLRNSLRPSPSFTHFLLTHGRWFWEFVNATFIREMLMRLVLTVRSNLIPSPPTYNSAHDYISWESFSNVSYYTRILPSVPKDCPTPMGTKGKKQLPDAQLLARRFLLRRKFIPDPQGTNLMFAFFAQHFTHQFFKTSGKMGPGFTKALGHGVDLGHIYGDNLERQYQLRLFKDGKLKYQVLDGEMYPPSVEEAPVLMHYPRGIPPQSQMAVGQEVFGLLPGLMLYATLWLREHNRVCDLLKAEHPTWGDEQLFQTTRLILIGETIKIVIEEYVQQLSGYFLQLKFDPELLFGVQFQYRNRIAMEFNHLYHWHPLMPDSFKIGGGRNMDHHILHVAVDVIRESREMRLQPFNEYRKRFGMKPYTSFQELVGEKEMAAELEELYGDIDALEFYPGLLLEKCHPNSIFGESMIEIGAPFSLKGLLGNPICSPEYWKPSTFGGEVGFNIVKTATLKKLVCLNTKTCPYVSFRVPDASQDDGPAVERPSTEL

SEQ ID NO: 231453 - DNA, 2328 bp, Artificial Sequence
  derived and/or modified sequence
gcgccatgagccggagtctcttgctctggttcttgctgttcctgctcctgctcccgccgctccccgtcctgctcgcggacccaggggcgcccacgccagtgaatccctgttgttactatccatgccagcaccagggcatctgtgtccgcttcggccttgaccgctaccagtgtgactgcacccgcacgggctattccggccccaactgcaccatccctggcctgtggacctggctccggaattcactgcggcccagcccctctttcacccacttcctgctcactcacgggcgctggttctgggagtttgtcaatgccaccttcatccgagagatgctcatgcgcctggtactcacagtgcgctccaaccttatccccagtccccccacctacaactcagcacatgactacatcagctgggagtctttctccaacgtgagctattacactcgtattctgccctctgtgcctaaagattgccccacacccatgggaaccaaagggaagaagcagttgccagatgcccagctcctggcccgccgcttcctgctcaggaggaagttcatacctgacccccaaggcaccaacctcatgtttgccttctttgcacaacacttcacccaccagttcttcaaaacttctggcaagatgggtcctggcttcaccaaggccttgggccatggggtagacctcggccacatttatggagacaatctggagcgtcagtatcaactgcggctctttaaggatgggaaactcaagtaccaggtgctggatggagaaatgtacccgccctcggtagaagaggcgcctgtgttgatgcactacccccgaggcatcccgccccagagccagatggctgtgggccaggaggtgtttgggctgcttcctgggctcatgctgtatgccacgctctggctacgtgagcacaaccgtgtgtgtgacctgctgaaggctgagcaccccacctggggcgatgagcagcttttccagacgacccgcctcatcctcataggggagaccatcaagattgtcatcgaggagtacgtgcagcagctgagtggctatttcctgcagctgaaatttgacccagagctgctgttcggtgtccagttccaataccgcaaccgcattgccatggagttcaaccatctctaccactggcaccccctcatgcctgactccttcaagatcggtgggggcaggaacatggaccaccacatcctgcatgtggctgtggatgtcatcagggagtctcgggagatgcggctgcagcccttcaatgagtaccgcaagaggtttggcatgaaaccctacacctccttccaggagctcgtaggagagaaggagatggcagcagagttggaggaattgtatggagacattgatgcgttggagttctaccctggactgcttcttgaaaagtgccatccaaactctatctttggggagagtatgatagagattggggctcccttttccctcaagggtctcctagggaatcccatctgttctccggagtactggaagccgagcacatttggcggcgaggtgggctttaacattgtcaagacggccacactgaagaagctggtctgcctcaacaccaagacctgtccctacgtttccttccgtgtgccggatgccagtcaggatgatgggcctgctgtggagcgaccatccacagagctctgaggggcaggaaagcagcattctggaggggagagctttgtgcttgtcattccagagtgctgaggccagggctgatggtcttaaatgctcattttctggtttggcatggtgagtgttggggttgacatttagaactttaagtctcacccattatctggaatattgtgattctgtttattcttccagaatgctgaactccttgttagcccttcagattgttaggagtggttctcatttggtctgccagaatactgggttcttagttgacaacctagaatgtcagatttctggttgatttgtaacacagtcattctaggatgtggagctactgatgaaatctgctagaaagttagggggttcttattttgcattccagaatcttgactttctgattggtgattcaaagtgttgtgttcctggctgatgatccagaacagtggctcgtatcccaaatctgtcagcatctggctgtctagaatgtggatttgattcattttcctgttcagtgagatatcatagagacggagatcctaaggtccaacaagaatgcattccctgaatctgtgcctgcactgagagggcaaggaagtggggtgttcttcttgggacccccactaagaccctggtctgaggatgt

SEQ ID NO: 231454 - DNA, 1689 bp, Artificial Sequence
  derived and/or modified sequence
atgagcagaagcctgctgctgtggttcctgctgttcctgctgctgctgccccccctgcccgtgctgctggccgaccccggcgcccccacccccgtgaacccctgctgctactacccctgccagcaccagggcatctgcgtgagattcggcctggacagataccagtgcgactgcaccagaaccggctacagcggccccaactgcaccatccccggcctgtggacctggctgagaaacagcctgagacccagccccagcttcacccacttcctgctgacccacggcagatggttctgggagttcgtgaacgccaccttcatcagagagatgctgatgagactggtgctgaccgtgagaagcaacctgatccccagcccccccacctacaacagcgcccacgactacatcagctgggagagcttcagcaacgtgagctactacaccagaatcctgcccagcgtgcccaaggactgccccacccccatgggcaccaagggcaagaagcagctgcccgacgcccagctgctggccagaagattcctgctgagaagaaagttcatccccgacccccagggcaccaacctgatgttcgccttcttcgcccagcacttcacccaccagttcttcaagaccagcggcaagatgggccccggcttcaccaaggccctgggccacggcgtggacctgggccacatctacggcgacaacctggagagacagtaccagctgagactgttcaaggacggcaagctgaagtaccaggtgctggacggcgagatgtacccccccagcgtggaggaggcccccgtgctgatgcactaccccagaggcatccccccccagagccagatggccgtgggccaggaggtgttcggcctgctgcccggcctgatgctgtacgccaccctgtggctgagagagcacaacagagtgtgcgacctgctgaaggccgagcaccccacctggggcgacgagcagctgttccagaccaccagactgatcctgatcggcgagaccatcaagatcgtgatcgaggagtacgtgcagcagctgagcggctacttcctgcagctgaagttcgaccccgagctgctgttcggcgtgcagttccagtacagaaacagaatcgccatggagttcaaccacctgtaccactggcaccccctgatgcccgacagcttcaagatcggcggcggcagaaacatggaccaccacatcctgcacgtggccgtggacgtgatcagagagagcagagagatgagactgcagcccttcaacgagtacagaaagagattcggcatgaagccctacaccagcttccaggagctggtgggcgagaaggagatggccgccgagctggaggagctgtacggcgacatcgacgccctggagttctaccccggcctgctgctggagaagtgccaccccaacagcatcttcggcgagagcatgatcgagatcggcgcccccttcagcctgaagggcctgctgggcaaccccatctgcagccccgagtactggaagcccagcaccttcggcggcgaggtgggcttcaacatcgtgaagaccgccaccctgaagaagctggtgtgcctgaacaccaagacctgcccctacgtgagcttcagagtgcccgacgccagccaggacgacggccccgccgtggagagacccagcaccgagctgtag

SEQ ID NO: 231455 - DNA, 1689 bp, Artificial Sequence
  derived and/or modified sequence
atgagcagatccctccttctctggtttctcttgtttttactcctgcttccccccctgcccgtacttctggcagatcccggggcccccacgcctgtgaacccctgttgctactatccctgtcagcaccagggaatatgtgtccgattcggtcttgacagataccaatgcgattgtacacgaacaggctatagcggtccaaactgtactatccccgggttgtggacttggctacggaactctctaaggccgtccccttcttttacacacttcttgcttacccacgggagatggttttgggaattcgtgaatgctacttttattcgtgagatgctgatgcgcttggtgctcaccgtgcggtcaaacctcattccctcacctccaacctataactctgcacatgactacattagctgggaaagcttctccaacgtgtcctactatacaaggattctgccatccgtaccaaaagactgcccaacccccatgggcaccaaaggcaagaagcaattgcccgatgcccagctcctggctcgccggtttctgctccgccggaagttcattcccgatccccaaggcacaaacctgatgttcgcttttttcgcacagcattttacccatcagtttttcaaaacgtctggtaaaatgggccctggcttcactaaggccctgggccatggggttgacctgggacatatctatggggataatttggagaggcagtaccagctgcggctatttaaagatgggaaactcaaatatcaagtgttagacggcgaaatgtatcctccttccgtggaggaagctcctgtgcttatgcactatcccaggggcatacctccccagtcccagatggcagttggccaagaagtatttggcctacttccaggactgatgttgtacgctactctgtggctgagagaacacaacagggtatgtgacctgctgaaagctgaacaccctacttggggcgatgaacagctcttccaaactaccaggctgatcctgattggcgagaccattaagattgttatcgaggagtacgtgcaacagctctccgggtactttctccagctcaagttcgaccctgaactgttatttggagtacagttccagtatcgaaacaggatcgctatggaatttaaccacctttatcattggcatccactcatgcctgactcttttaagattggcggcggaagaaacatggatcaccacattctgcacgtggctgttgatgtgatcagggaaagtcgggagatgcgtcttcagccatttaatgagtataggaagagattcgggatgaaaccctacacatctttccaggagctggttggcgaaaaagagatggcagccgaactggaggagctgtacggggacattgacgctctggagttttacccagggctcctgctggaaaaatgtcatccgaactctatttttggggaatcaatgatcgagatcggtgcgcccttttccttgaaaggcctcctaggcaatcctatctgttcacctgagtactggaaacccagcacattcggtggcgaagttggatttaacatagtgaaaactgccacattgaagaagctggtgtgcctgaacaccaaaacctgcccttatgtgagttttagggtaccagatgcgtctcaggacgatggacccgcagtggagagaccgtcgactgagctctag

SEQ ID NO: 231456 - DNA, 1689 bp, Artificial Sequence
  derived and/or modified sequence
atgagccgcagcctgctgctgtggttcctgctcttcctgctgctgctgccccccctgcctgtgctgctggccgaccccggggcccccacccctgtgaacccctgctgctactacccctgccagcaccagggcatctgtgtgcgcttcggcctggaccgctaccagtgtgactgcaccaggacaggctacagcggccccaactgcaccatccctggcctgtggacctggctgaggaacagcctgcggcccagccccagcttcacccacttcctgctgacccacggccgctggttctgggagtttgtgaatgccaccttcatccgggagatgctgatgaggctggtgctgactgtgcgcagcaacctgatccccagcccccccacctacaacagcgcccatgactacatctcctgggagagcttcagcaatgtgtcctactacacccgcatcctgcccagcgtgcccaaggactgccccacccccatgggcaccaagggcaagaagcagctgcctgatgcccagctgctggcccggcgcttcctgctgcggaggaagttcatcccagacccccagggcaccaacctgatgtttgccttctttgcccagcacttcacccaccagttcttcaagaccagcggcaagatgggccctggcttcaccaaggccctgggccatggagtggacctgggccacatctatggagacaacctggagcggcagtaccagctgcggctcttcaaggatggcaagctgaagtaccaggtgctggatggagagatgtacccacccagcgtggaggaggcccctgtgctgatgcactacccccggggcatccccccccagagccagatggctgtgggccaggaggtgtttggcctgctgcccggcctgatgctgtatgccaccctgtggctgcgggagcacaacagagtgtgtgacctgctgaaggccgagcaccccacctggggagatgagcagctgttccagaccaccaggctcatcctgattggagagaccatcaagatcgtcatcgaggagtatgtgcagcagctgagcggctacttcctgcagctgaagtttgatcctgagctgctgtttggagtgcagttccagtacagaaaccgcatcgccatggagttcaaccacctgtaccactggcaccccctgatgccagacagcttcaagattggaggcggcaggaacatggaccaccacatcctgcacgtggccgtggatgtgatccgggagagccgggagatgaggctgcagcccttcaatgagtacaggaagcgcttcggcatgaagccctacaccagcttccaggagctggtgggggagaaggagatggctgctgagctggaggagctgtatggagacattgatgccctggagttctacccaggcctgctgctggagaagtgccaccccaacagcatctttggagagagcatgattgaaattggagcccccttcagcctgaagggcctgctgggcaaccccatctgcagccctgagtactggaagcccagcaccttcggcggggaggtgggcttcaacatcgtgaagacagccaccctgaagaagctggtgtgcctgaacaccaagacctgcccctacgtgtccttccgggtgcctgatgccagccaggatgatggccctgctgtggagcggcccagcacagagctgtag

SEQ ID NO: 231457 - DNA, 1689 bp, Artificial Sequence
  derived and/or modified sequence
atgagccggagcctgctgctgtggttcctgctgttcctgctgctgttacctcccctccctgtcctgcttgccgaccccggcgctcccactccagtgaatccatgttgctactacccttgtcagcaccagggtatttgcgtcaggttcgggttagatcgctaccagtgcgattgcaccagaactggatactcaggcccaaactgcacgattcccggactgtggacctggttgcgcaactcattaagaccaagtccctcttttacgcacttcttgttaactcacggcagatggttctgggagttcgtgaacgcaacgtttattcgggaaatgcttatgaggctagtgctcaccgtgcgatctaacctgattccctccccaccaacttataatagcgctcacgactatatctcatgggagtcatttagcaatgtctcttattacacgcgtatcctgccatccgtgcccaaggactgtccaacccccatgggtactaaagggaagaaacagctgcccgatgctcagttgctcgcaaggagattcttactgaggcggaagtttattcccgaccctcagggaactaacctcatgtttgcgttcttcgcccagcacttcacgcaccagtttttcaaaacttctggtaagatggggcctggcttcaccaaagccttggggcatggtgtggatctggggcatatttacggagataacctcgaacggcaataccaattaagactgttcaaagatggcaagcttaaatatcaggtgctcgacggggagatgtatcccccttcagtggaagaagcacccgtgttaatgcactacccacggggaatccccccacagtcacagatggctgtgggccaggaggttttcggtttactccccgggctgatgctctatgccaccctgtggctgagggaacataatagggtgtgtgacctcctgaaagccgaacatccgacctggggggatgaacagttgttccaaacgacccgcctgatccttatcggggagacaatcaaaatcgtgatagaggaatatgtgcagcagctgtcagggtatttcctccagctcaagtttgaccccgaacttctctttggagtccagttccagtaccgtaaccggatcgccatggagtttaatcatttgtaccactggcaccccctcatgcctgactcctttaaaataggaggtggacgtaatatggaccatcacattcttcatgttgccgtcgacgtgatccgtgaaagtagagagatgcgtctgcagccgttcaacgaataccggaaaaggtttgggatgaaaccctatacaagctttcaggagctcgttggggaaaaagagatggccgcggagctagaggagttgtacggagacatcgacgcactggaattttatcccggcctgctactcgaaaaatgccaccccaacagcatatttggagaatcgatgatagaaattggtgcaccttttagcctgaagggcctcctgggtaaccccatttgttcacccgagtactggaaaccaagcacctttggcggtgaggtgggcttcaatattgtaaagacagcaacgctcaaaaagctcgtgtgcctgaacaccaagacctgcccttatgtgtcttttagagtccccgacgcttctcaggatgatggccccgccgtcgagagaccttctactgagctgtag

SEQ ID NO: 231458 - DNA, 1689 bp, Artificial Sequence
  derived and/or modified sequence
atgagtcgctccttgctcctctggttcctgctattcctgctcctgctgccaccgttgcctgtcctgcttgccgaccctggtgcccctactcccgtgaatccatgttgctattatccctgtcagcaccaggggatctgcgtgagatttggtctggaccgctaccagtgtgattgcacaaggaccggttatagcggccctaattgcaccatccctggcctctggacgtggctgaggaacagcctacgcccttctccttcttttacccactttctgcttacacacggtagatggttctgggaatttgttaatgctacctttattcgagagatgttgatgcgcctggtactcacagtgagatccaatctcatcccttccccacctacttataacagtgcacacgactatatatcttgggaaagcttcagtaatgtgtcctattatactcgcatcctcccgagcgtgccaaaggactgccccacgccaatgggcactaaaggcaaaaagcagctgcctgacgcccaactgcttgctcgcagatttctcttaaggcgaaagtttattcctgatccccaggggaccaatcttatgttcgctttctttgctcagcacttcacacatcagttttttaaaacctctggaaaaatgggacctggattcaccaaggcccttggccacggagtggacctggggcatatctatggcgacaacctggaacggcagtatcagctgaggttgttcaaggacgggaagctgaaataccaggtcttagacggcgaaatgtatcctccgtcagttgaagaggcaccagttctcatgcactatcctaggggtatcccaccacagagccaaatggccgtgggccaggaagtcttcggcctgctgccgggacttatgctctatgccaccctatggctccgtgagcacaatagggtgtgtgaccttttgaaagctgaacatcccacgtggggtgatgagcagttatttcagaccaccaggcttatcctgatcggggagaccatcaaaatagtgattgaggagtacgttcagcagctatcagggtactttctccagctgaaatttgaccccgagctgctgtttggcgtgcagtttcagtacaggaaccgcatcgccatggaatttaaccatctgtatcactggcacccattgatgccggacagttttaaaatcggcggtggcaggaatatggaccatcatatcctgcatgtggccgtagacgtgatccgagaatccagagagatgcgcctgcagccctttaatgaatatcgtaagcgatttggcatgaaaccatatacctcttttcaggagctggtgggagagaaagaaatggccgcagagctagaagaactctatggagatatcgacgccctggaattctaccccggactcctgctggagaaatgtcatcccaatagcattttcggggagagcatgattgagatcggagccccattcagtctgaagggtctgctgggtaaccccatctgcagccctgaatattggaaaccctcaaccttcggtggtgaagtgggctttaatattgtgaaaaccgcgacacttaaaaagctggtctgcctcaacaccaagacttgcccttatgtgtcttttcgcgtgcctgacgccagccaggatgacggcccagcggtggagcgacccagtactgaactctag

SEQ ID NO: 231459 - protein, 284 aa, Artificial Sequence
  derived and/or modified sequence
MKTSAELHEQEKPPSSPRATGPGRLGHARGRGPDALRGGAAGPGRASSGAPRERKMAPHDPGSLTTLVPWAAALLLALGVERALALPEICTQCPGSVQNLSKVAFYCKTTRELMLHARCCLNQKGTILGLDLQNCSLEDPGPNFHQAHTTVIIDLQANPLKGDLANTFRGFTQLQTLILPQHVNCPGGINAWNTITSYIDNQICQGQKNLCNNTGDPEMCPENGSCVPDGPGLLQCVCADGFHGYKCMRQGSFSLLMFFGILGATTLSVSILLWATQRRKAKTS

SEQ ID NO: 231460 - protein, 171 aa, Artificial Sequence
  derived and/or modified sequence
MLHARCCLNQKGTILGLDLQNCSLEDPGPNFHQAHTTVIIDLQANPLKGDLANTFRGFTQLQTLILPQHVNCPGGINAWNTITSYIDNQICQGQKNLCNNTGDPEMCPENGSCVPDGPGLLQCVCADGFHGYKCMRQGSFSLLMFFGILGATTLSVSILLWATQRRKAKTS

SEQ ID NO: 231461 - protein, 75 aa, Artificial Sequence
  derived and/or modified sequence
MLHARCCLNQKGTILGLDLQNCSLEDPGPNFHQAHTTVIIDLQANPLKGDLANTFRGFTQLQTLILPQHVNCPGG

SEQ ID NO: 231462 - DNA, 1240 bp, Artificial Sequence
  derived and/or modified sequence
ggatggaggggcccgagtttctgcgaagccgcgacctcggcgtccggacgcggggaacaccgggctgagggagtctgcagtcggctccgggaagccgcgcggcgacgggggaggccttcactaaaggggaaaaggaagagggggtcggccagtatccccgaaagagggctagggcgcatgaagaccagcgcagagctccacgagcaggaaaagcccccaagcagccccagggcgactggaccgggccgcttaggccacgcccggggaagagggcctgacgcgctgcggggcggggccgcggggccgggtcgcgcgagcagcggagcaccaagggaacggaaaatggcgcctcacgacccgggtagtcttacgaccctggtgccctgggctgccgccctgctcctcgctctgggcgtggaaagggctctggcgctacccgagatatgcacccaatgtccagggagcgtgcaaaatttgtcaaaagtggccttttattgtaaaacgacacgagagctaatgctgcatgcccgttgctgcctgaatcagaagggcaccatcttggggctggatctccagaactgttctctggaggaccctggtccaaactttcatcaggcacataccactgtcatcatagacctgcaagcaaaccccctcaaaggtgacttggccaacaccttccgtggctttactcagctccagactctgatactgccacaacatgtcaactgtcctggaggaattaatgcctggaatactatcacctcttatatagacaaccaaatctgtcaagggcaaaagaacctttgcaataacactggggacccagaaatgtgtcctgagaatggatcttgtgtacctgatggtccaggtcttttgcagtgtgtttgtgctgatggtttccatggatacaagtgtatgcgccagggctcgttctcactgcttatgttcttcgggattctgggagccaccactctatccgtctccattctgctttgggcgacccagcgccgaaaagccaagacttcatgaactacataggtcttaccattgacctaagatcaatctgaactatcttagcccagtcagggagctctgcttcctagaaaggcatctttcgccagtggattcgcctcaaggttgaggccgccattggaagatgaaaaattgcactcccttggtgtagacaaataccagttcccattggtgttgttgcctataataaacacttttttctttt

SEQ ID NO: 231463 - DNA, 1059 bp, Artificial Sequence
  derived and/or modified sequence
tggcgcctcacgacccgggtagtcttacgaccctggtgccctgggctgccgccctgctcctcgctctgggcgtggaaagggctctggcgctacccgaggtacagaagcaagtttgaggtcgggctgaagcagggtcgctggccagccgtgcgtcgcgctcgccagcggctcccccttctcctcggcgggcctgcggttctgatttcgtccctgacgcttcccgaccctgcccagccagatatgcacccaatgtccagggagcgtgcaaaatttgtcaaaagtggccttttattgtaaaacgacacgagagctaatgctgcatgcccgttgctgcctgaatcagaagggcaccatcttggggctggatctccagaactgttctctggaggaccctggtccaaactttcatcaggcacataccactgtcatcatagacctgcaagcaaaccccctcaaaggtgacttggccaacaccttccgtggctttactcagctccagactctgatactgccacaacatgtcaactgtcctggaggaattaatgcctggaatactatcacctcttatatagacaaccaaatctgtcaagggcaaaagaacctttgcaataacactggggacccagaaatgtgtcctgagaatggatcttgtgtacctgatggtccaggtcttttgcagtgtgtttgtgctgatggtttccatggatacaagtgtatgcgccagggctcgttctcactgcttatgttcttcgggattctgggagccaccactctatccgtctccattctgctttgggcgacccagcgccgaaaagccaagacttcatgaactacataggtcttaccattgacctaagatcaatctgaactatcttagcccagtcagggagctctgcttcctagaaaggcatctttcgccagtggattcgcctcaaggttgaggccgccattggaagatgaaaaattgcactcccttggtgtagacaaataccagttcccattggtgttgttgcctataataaacacttttttctttttttttcctctctttctttttaa

SEQ ID NO: 231464 - DNA, 855 bp, Artificial Sequence
  derived and/or modified sequence
atgaagaccagcgccgagctgcacgagcaggagaagccccccagcagccccagagccaccggccccggcagactgggccacgccagaggcagaggccccgacgccctgagaggcggcgccgccggccccggcagagccagcagcggcgcccccagagagagaaagatggccccccacgaccccggcagcctgaccaccctggtgccctgggccgccgccctgctgctggccctgggcgtggagagagccctggccctgcccgagatctgcacccagtgccccggcagcgtgcagaacctgagcaaggtggccttctactgcaagaccaccagagagctgatgctgcacgccagatgctgcctgaaccagaagggcaccatcctgggcctggacctgcagaactgcagcctggaggaccccggccccaacttccaccaggcccacaccaccgtgatcatcgacctgcaggccaaccccctgaagggcgacctggccaacaccttcagaggcttcacccagctgcagaccctgatcctgccccagcacgtgaactgccccggcggcatcaacgcctggaacaccatcaccagctacatcgacaaccagatctgccagggccagaagaacctgtgcaacaacaccggcgaccccgagatgtgccccgagaacggcagctgcgtgcccgacggccccggcctgctgcagtgcgtgtgcgccgacggcttccacggctacaagtgcatgagacagggcagcttcagcctgctgatgttcttcggcatcctgggcgccaccaccctgagcgtgagcatcctgctgtgggccacccagagaagaaaggccaagaccagctag

SEQ ID NO: 231465 - DNA, 855 bp, Artificial Sequence
  derived and/or modified sequence
atgaagacttccgcagagctgcacgaacaggagaagcccccatcctcaccaagagctaccggacccgggcggctggggcacgctagagggagagggcccgacgccttgcgcggcggtgccgccggccctggtcgggcttctagcggtgccccacgggaacggaagatggccccacatgatcccggttctctaacaacgcttgtgccgtgggcggcagctttactgctggccctgggcgtcgaacgcgcgttggctctgccagagatttgcacacaatgccccggcagcgtgcaaaatttatctaaagtggccttctattgcaagacaacccgggaactcatgcttcacgctagatgctgcctcaaccagaaaggcaccatcctgggacttgatctgcagaactgtagtctggaggatcccggaccgaatttccatcaggcgcacactacggtcattattgacctgcaggctaatccccttaaaggcgatctcgcaaatacattccggggcttcacccagctgcagactctgatcctaccacaacatgtgaattgccctggggggatcaatgcttggaatacaattacaagttatatcgataatcagatttgtcaaggccaaaagaacctctgtaacaatacgggagatcctgagatgtgccccgagaacgggagctgtgtgcccgacgggcccgggctgctccagtgtgtttgcgctgacggctttcacgggtataagtgcatgcgccagggctcattctccttgctgatgttttttgggatccttggtgcaaccacattgtctgtaagcattctgctctgggctactcaacggcgaaaggctaaaacaagttag

SEQ ID NO: 231466 - DNA, 855 bp, Artificial Sequence
  derived and/or modified sequence
atgaagaccagcgctgagctgcacgagcaggagaagccacccagcagcccccgggccaccggccctggccgcctgggccacgcccggggccggggcccagatgccctgcggggcggcgctgctggccctggccgggccagcagcggggccccccgggagaggaagatggcccctcatgaccccggcagcctgaccaccctggtgccctgggccgccgccctgctgctggccctgggcgtggagcgggccctggccctgcctgagatctgcacccagtgccccggctctgtgcagaacctgagcaaggtggccttctactgcaagaccacccgggagctgatgctgcacgcccgctgctgcctgaaccagaagggcaccatcctgggcctggacctgcagaactgcagcctggaggaccccggccccaacttccaccaggcccacaccaccgtcatcatcgacctgcaggccaaccccctgaagggggacctggccaacaccttccggggcttcacccagctgcagaccctcatcctgccccagcacgtgaactgccctgggggcatcaatgcctggaacaccatcaccagctacatcgacaaccagatctgccagggccagaagaacctgtgcaacaacacaggagaccctgagatgtgcccagaaaatggcagctgtgtgcctgatggccctggcctgctgcagtgtgtgtgtgctgatggcttccacggctacaagtgcatgaggcagggcagcttcagcctgctgatgttcttcggcatcctgggcgccaccaccctgtctgtgtccatcctgctgtgggccacccagaggaggaaggccaagaccagctag

SEQ ID NO: 231467 - DNA, 855 bp, Artificial Sequence
  derived and/or modified sequence
atgaagaccagcgccgagctgcacgagcaggagaagccccccagcagccctcgtgcgaccgggcccggccgcctgggccacgctcgcggtcgaggccctgatgccctcagaggtggtgcagccgggcctggccgggcctcatccggggcccctcgcgaacgcaagatggcaccacatgatccagggagtctgaccaccctcgtgccatgggcggctgcactgctccttgcgctgggggtggaaagagccctcgctttgcccgagatttgtacccaatgtccaggctccgtgcagaatttatccaaagtggcgttttattgcaagactacccgggagttgatgctccatgcacgttgctgtctgaaccaaaagggaaccatccttggtctggaccttcagaactgctcactggaagacccaggaccaaacttccaccaggcccacacgacagtgatcatagaccttcaggccaaccctctgaaaggtgacctggccaacacgttcagaggatttacacagttgcagactctcatcctgccccagcacgtgaactgcccaggagggattaatgcctggaataccattacctcctatatcgataatcagatttgccagggacagaagaatctctgtaataatactggggatcctgagatgtgtccggagaatggctcctgtgtgcctgatggacccgggcttctgcagtgtgtatgcgccgacggcttccacggctacaaatgtatgcggcaggggtccttcagtttgctgatgttcttcggaattttgggcgctactaccctgagcgtctctatcttgctttgggcgactcagcggcggaaggccaaaacctcctag

SEQ ID NO: 231468 - DNA, 855 bp, Artificial Sequence
  derived and/or modified sequence
atgaaaacatcagctgagttgcacgaacaggaaaagcctccctcatctcctcgtgccactggccctggccgactggggcacgccagggggcgagggccagacgctctgcgagggggagccgcaggccctggcagagcttcatcaggggctccacgcgagaggaaaatggctccccacgatccgggaagcctaacaacactggtgccctgggccgctgctttactcctggccctcggtgtggaaagggccctcgcccttcccgagatatgtacacaatgcccagggtcggtccagaacctgagcaaggtcgccttttactgtaagacaaccagggagctcatgctccacgccaggtgctgtctaaatcagaaggggacaatccttggattggatcttcaaaactgctcgcttgaggatcccggaccaaacttccaccaggcccacaccacagttattattgacctgcaggctaatcctttgaagggtgacttagctaacacatttcgtgggtttactcagctgcagactctgattctgccgcagcacgtaaattgccccggaggcattaatgcctggaacacgattacttcctacatcgataaccaaatttgccaaggtcagaagaacttatgcaataacaccggagaccccgaaatgtgcccggagaacggctcatgcgtgcccgatggtcccggactacttcagtgtgtttgcgccgacgggttccatgggtataaatgcatgcgtcagggcagtttctccttattgatgttttttggaatcctcggcgcaaccacactttcagtatccatcctgctctgggctactcagcggcgaaaagctaaaacttcttag

SEQ ID NO: 231469 - DNA, 823 bp, Artificial Sequence
  derived and/or modified sequence
aactttccttatggtcatctttgggtggagccaccacttccagttctgatcttctcattctggttgagtacctgggcttgccagtgcaccccccaggaacaccgcctagtccagggctcccacaggtctcagactgacaggagactgggtcatatgaccagcactagccaatgagctgtgagtacacgtgacacagggacaagctgggtcatgtgactggcactagccaatgagctgtgaggacgtgagcacaggtccagctaggctgggtcatatgacaagcattagccaatgagctgtgaggacacgtgagtacaggtccagctaggctgggacatgtgactggcactggcccatgggctgtgagcacaggtcaggtcagccccttcctgctgcttcccaccgtgtgtgctccttgtctgacttgatatgagaactaacccaatatggcaggaagccactgacatgtgggagccgtgcatggcagtggccagcgtccttgtcctgcgggggctctgtggacatcactcgccttcagaacactgagccctcctacctcctgatatccagggctgccgatgggaaatcccaggctgccgcggctcctgtgtgctttgaagttttcaggatttttgtcaaacatccggggacccttagctggagaggatggcatgggtgacacgcagctggccagggtgcgcgactctgctctcaagaccccctggaggcccgccccctgccccccaccagctcattcgttagatgattggaagtgactgcctacgtcttctttcaggataaagcctcaagtcctgcaactatt

SEQ ID NO: 231470 - protein, 21 aa, Artificial Sequence
  derived and/or modified sequence
TRSSRAGLQFPVGRVHRLLRK

SEQ ID NO: 231471 - protein, 128 aa, Artificial Sequence
  derived and/or modified sequence
MSGRGKQGGKARAKAKTRSSRAGLQFPVGRVHRLLRKGNYAERVGAGAPVYLAAVLEYLTAEILELAGNAARDNKKTRIIPRHLQLAIRNDEELNKLLGKVTIAQGGVLPNIQAVLLPKKTESHHKAK

SEQ ID NO: 231472 - DNA, 387 bp, Artificial Sequence
  derived and/or modified sequence
atgagtggcagagggaaacaaggggggaaagcacgcgcaaaggcgaagactaggtcaagccgggcaggcctgcagtttccagtgggcagagtccatcggcttctgcggaaaggcaattacgccgagagggtgggggccggagcccccgtctatctggctgcagtcctagagtacttaacagcggagattttggaactggctgggaacgccgctcgggacaataagaagactcggatcattcctaggcacttgcagctggccattcgaaacgacgaggaattgaacaagctgctaggaaaggtgacaattgctcaggggggtgtgcttcccaacattcaggccgtcctcctacccaaaaaaaccgagtctcatcacaaagcgaagtag

SEQ ID NO: 231473 - DNA, 387 bp, Artificial Sequence
  derived and/or modified sequence
atgagcggccggggcaagcagggcggcaaggcccgggccaaggccaagaccaggagcagccgggccggcctgcagtttcctgtgggccgggtgcaccggctgctgaggaaaggaaattatgcagagcgggtgggcgctggggcccctgtgtacctggccgctgtgctggagtacctgacagctgagatcctggagctggccggaaatgctgcccgggacaacaagaagacccgcatcatccccaggcacctgcagctggccatcagaaatgatgaggagctgaacaagctgctgggcaaggtgaccatcgcccagggcggcgtgctgcccaacatccaggccgtgctgctgcccaagaagacagagagccaccacaaggccaagtag

SEQ ID NO: 231474 - DNA, 387 bp, Artificial Sequence
  derived and/or modified sequence
atgagcggccggggcaagcagggcggcaaggcccgggccaaggccaagacccgcagctctcgagccggtcttcagttcccagttgggagagttcaccgcttgctccggaaggggaactacgctgagagagtgggagccggcgccccggtctacctggcggctgtgttagagtatttaacagccgaaatcttggagctggctggcaacgccgcccgggacaataagaagacccggattatacctagacatcttcaattggcaattagaaatgatgaagaactgaataagcttctgggcaaggtgactattgcccagggaggggtgcttcccaacatacaggccgtactcctgcctaagaagacggagtctcatcacaaggccaagtag

SEQ ID NO: 231475 - DNA, 387 bp, Artificial Sequence
  derived and/or modified sequence
atgtccggaaggggcaagcagggtgggaaggccagagcaaaggctaaaaccagatcctcccgtgccggtctccagtttccagtgggacgggtccaccggctcctgagaaagggtaactatgccgagcgcgtgggcgcaggcgctcccgtgtatctggcagccgtattggaatacctgaccgcagagatattagagttagccggaaacgctgctagggacaataaaaaaaccaggattataccccgtcatctgcagctggctatccggaacgacgaggaattgaacaaactcctcgggaaagtgacgatagcccagggcggtgtcctaccaaatattcaggctgtactattgcctaaaaagaccgaaagccatcataaagcaaagtag

SEQ ID NO: 231476 - DNA, 387 bp, Artificial Sequence
  derived and/or modified sequence
atgagcggcagaggcaagcagggcggcaaggccagagccaaggccaagaccagaagcagcagagccggcctgcagttccccgtgggcagagtgcacagactgctgagaaagggcaactacgccgagagagtgggcgccggcgcccccgtgtacctggccgccgtgctggagtacctgaccgccgagatcctggagctggccggcaacgccgccagagacaacaagaagaccagaatcatccccagacacctgcagctggccatcagaaacgacgaggagctgaacaagctgctgggcaaggtgaccatcgcccagggcggcgtgctgcccaacatccaggccgtgctgctgcccaagaagaccgagagccaccacaaggccaagtag

SEQ ID NO: 231477 - DNA, 457 bp, Artificial Sequence
  derived and/or modified sequence
aggcgctgcctttcctcgttggctactttcagtaagttgtgaccagtatgtctggacgtggcaagcaaggcggtaaagctcgcgccaaggccaagacccgctcttctcgggctgggcttcagttccccgtgggccgagtgcaccgcctgctccgcaagggtaattatgccgagcgggttggagccggcgcgccagtgtacctggctgcggtgctggagtacctgaccgctgagatcctggagctggctggcaatgcggcccgcgacaacaagaagacccgtatcatcccgcgtcacctccaactggccatccgcaacgacgaggagctcaacaagctgctgggcaaagtcaccatcgcgcagggtggtgtcttgcccaatatccaggccgtgctgctgcctaagaagactgagagccaccataaggccaaataaggagcgaggttgtgaaaactgga

SEQ ID NO: 231478 - DNA, 339 bp, Artificial Sequence
  derived and/or modified sequence
atgtcaggacggggcaaaggcggaaaaggattagctaaggccaagacctgcagctccttacccggcctgcagttccccggtcgagtgcggcatttgttccggaaaggcaactactttgagcccgtgggagctggggctccagtgtatttgcagtatttagcagctgaaattctcgagctagttggaagcgcgatcagagataaaactcgctctatcatcccaaggcacctccagctcgccattcgcaacgatgaagaggttaataaacagctggggaatgttaccattgctcagggcggggtgctgtcaaacattcaggccgtcctcctccccaaatag

SEQ ID NO: 231479 - DNA, 339 bp, Artificial Sequence
  derived and/or modified sequence
atgtctggacgtggtaagggcgggaagggtttggctaaagcaaaaacttgttcgtcgctaccgggcttgcagttcccaggcagagtccgtcatctttttcgaaagggcaattattttgagccggtcggagccggtgcgccagtgtacttacaatacctggccgccgagatcttagaactggtgggcagcgccatacgtgacaagacccgcagcatcatcccccgccacctgcagctggccatccgaaacgacgaggaggtcaacaagcagctgggcaacgtcactattgctcagggaggcgtcctgtccaatattcaggccgtcctgttgccaaaataa

SEQ ID NO: 231480 - DNA, 339 bp, Artificial Sequence
  derived and/or modified sequence
atgagcggccggggcaagggcggcaagggcctggccaaggccaagacctgcagcagcctgcccggcctgcagtttcctggccgggtgcgccacctgttcagaaaaggaaactactttgagcctgtgggcgctggggcccctgtgtacctgcagtacctggccgctgagatcctggagctggtgggcagcgccatccgggacaagaccaggagcatcatccccaggcacctgcagctggccatcagaaatgatgaggaggtgaacaagcagctgggcaatgtgaccatcgcccagggcggcgtgctgagcaacatccaggccgtgctgctgcccaagtag

SEQ ID NO: 231481 - DNA, 339 bp, Artificial Sequence
  derived and/or modified sequence
atgagcggccggggcaagggcggcaagggcctggccaaggccaagacatgttcatcccttccaggcttacagtttcctgggagggtcaggcatcttttccggaagggaaattactttgaacctgtgggggctggagcccctgtgtatctacagtatctcgcggctgagatcctggagttggtcggctccgccatccgtgataagacaaggtccattattccacgacatctgcagcttgccatacggaatgacgaggaggtgaacaagcagctcggtaatgtaactatcgcccaaggtggggtcctctccaacattcaggccgtccttcttcccaaatag

SEQ ID NO: 231482 - DNA, 339 bp, Artificial Sequence
  derived and/or modified sequence
atgtccggcagaggaaaaggcggaaagggtctggccaaagccaaaacatgtagctctctacccggtctccaatttcccggtagagtccgccacctgttccggaaaggcaattattttgagcccgtaggagctggtgcacccgtgtacttacagtatcttgcagccgaaattttggagttggttggtagcgcaatccgcgacaagacacgctccatcataccgagacacttacagcttgccatccgaaatgatgaggaggtcaacaaacagctcggcaacgtcactatcgcccagggtggggtccttagtaacattcaggctgttcttctgccaaagtag

SEQ ID NO: 231483 - DNA, 339 bp, Artificial Sequence
  derived and/or modified sequence
atgagcggcagaggcaagggcggcaagggcctggccaaggccaagacctgcagcagcctgcccggcctgcagttccccggcagagtgagacacctgttcagaaagggcaactacttcgagcccgtgggcgccggcgcccccgtgtacctgcagtacctggccgccgagatcctggagctggtgggcagcgccatcagagacaagaccagaagcatcatccccagacacctgcagctggccatcagaaacgacgaggaggtgaacaagcagctgggcaacgtgaccatcgcccagggcggcgtgctgagcaacatccaggccgtgctgctgcccaagtag

SEQ ID NO: 231484 - protein, 950 aa, Artificial Sequence
  derived and/or modified sequence
MNTEAEQQLLHHARNGNAEEVRQLLETMARNEVIADINCKGRSKSNLGWTPLHLACYFGHRQVVQDLLKAGAEVNVLNDMGDTPLHRAAFTGRKELVMLLLEYNADTTIVNGSGQTAKEVTHAEEIRSMLEAVERTQQRKLEELLLAAAREGKTTELTALLNRPNPPDVNCSDQLGNTPLHCAAYRAHKQCALKLLRSGADPNLKNKNDQKPLDLAQGAEMKHILVGNKVIYKALKRYEGPLWKSSRFFGWRLFWVVLEHGVLSWYRKQPDAVHNIYRQGCKHLTQAVCTVKSTDSCLFFIKCFDDTIHGFRVPKNSLQQSREDWLEAIEEHSAYSTHYCSQDQLTDEEEEDTVSAADLKKSLEKAQSCQQRLDREISNFLKMIKECDMAKEMLPSFLQKVEVVSEASRETCVALTDCLNLFTKQEGVRNFKLEQEQEKNKILSEALETLATEHHELEQSLVKGSPPASILSEDEFYDALSDSESERSLSRLEAVTARSFEEEGEHLGSRKHRMSEEKDCGGGDALSNGIKKHRTSLPSPMFSRNDFSIWSILRKCIGMELSKITMPVIFNEPLSFLQRLTEYMEHTYLIHKASSLSDPVERMQCVAAFAVSAVASQWERTGKPFNPLLGETYELVRDDLGFRLISEQVSHHPPISAFHAEGLNNDFIFHGSIYPKLKFWGKSVEAEPKGTITLELLEHNEAYTWTNPTCCVHNIIVGKLWIEQYGNVEIINHKTGDKCVLNFKPCGLFGKELHKVEGYIQDKSKKKLCALYGKWTECLYSVDPATFDAYKKNDKKNTEEKKNSKQMSTSEELDEMPVPDSESVFIIPGSVLLWRIAPRPPNSAQMYNFTSFAMVLNEVDKDMESVIPKTDCRLRPDIRAMENGEIDQASEEKKRLEEKQRAARKNRSKSEEDWKTRWFHQGPNPYNGAQDWIYSGSYWDRNYFNLPDIY

SEQ ID NO: 231485 - protein, 568 aa, Artificial Sequence
  derived and/or modified sequence
MIKECDMAKEMLPSFLQKVEVVSEASRETCVALTDCLNLFTKQEGVRNFKLEQEQEKNKILSEALETLATEHHELEQSLVKGSPPASILSEDEFYDALSDSESERSLSRLEAVTARSFEEEGEHLGSRKHRMSEEKDCGGGDALSNGIKKHRTSLPSPMFSRNDFSIWSILRKCIGMELSKITMPVIFNEPLSFLQRLTEYMEHTYLIHKASSLSDPVERMQCVAAFAVSAVASQWERTGKPFNPLLGETYELVRDDLGFRLISEQVSHHPPISAFHAEGLNNDFIFHGSIYPKLKFWGKSVEAEPKGTITLELLEHNEAYTWTNPTCCVHNIIVGKLWIEQYGNVEIINHKTGDKCVLNFKPCGLFGKELHKVEGYIQDKSKKKLCALYGKWTECLYSVDPATFDAYKKNDKKNTEEKKNSKQMSTSEELDEMPVPDSESVFIIPGSVLLWRIAPRPPNSAQMYNFTSFAMVLNEVDKDMESVIPKTDCRLRPDIRAMENGEIDQASEEKKRLEEKQRAARKNRSKSEEDWKTRWFHQGPNPYNGAQDWIYSGSYWDRNYFNLPDIY

SEQ ID NO: 231486 - protein, 437 aa, Artificial Sequence
  derived and/or modified sequence
MSEEKDCGGGDALSNGIKKHRTSLPSPMFSRNDFSIWSILRKCIGMELSKITMPVIFNEPLSFLQRLTEYMEHTYLIHKASSLSDPVERMQCVAAFAVSAVASQWERTGKPFNPLLGETYELVRDDLGFRLISEQVSHHPPISAFHAEGLNNDFIFHGSIYPKLKFWGKSVEAEPKGTITLELLEHNEAYTWTNPTCCVHNIIVGKLWIEQYGNVEIINHKTGDKCVLNFKPCGLFGKELHKVEGYIQDKSKKKLCALYGKWTECLYSVDPATFDAYKKNDKKNTEEKKNSKQMSTSEELDEMPVPDSESVFIIPGSVLLWRIAPRPPNSAQMYNFTSFAMVLNEVDKDMESVIPKTDCRLRPDIRAMENGEIDQASEEKKRLEEKQRAARKNRSKSEEDWKTRWFHQGPNPYNGAQDWIYSGSYWDRNYFNLPDIY

SEQ ID NO: 231487 - DNA, 2853 bp, Artificial Sequence
  derived and/or modified sequence
atgaatactgaagctgaacagcaactgcttcaccacgcacggaacggcaacgccgaagaagtgcgacagttgctggagaccatggcacgcaatgaagttatcgccgacataaactgcaagggcagatccaagtccaatctgggctggacccccctgcatctcgcgtgttactttggacatcgccaggtagttcaagacctcctgaaagccggcgccgaggtaaatgtgttgaatgacatgggcgatacccccctgcaccgtgctgcctttacaggccggaaagaactcgtaatgctcctactagagtacaacgccgatactacaatagtgaacggttccgggcagacagccaaggaggtgacacatgctgaagaaatccgctcgatgctcgaggcagtagaaagaacacagcagcggaagctcgaggagctcctcctagcggcagctcgggaaggcaaaacgactgagctgaccgccctcctgaatcgccctaacccacctgatgttaattgctctgaccagctgggcaacacgccactgcattgcgctgcctaccgggcccacaagcagtgtgcccttaagttgctgaggtctggggcggaccctaacctaaaaaacaaaaacgaccaaaagccattagacctggcacagggtgcagagatgaagcatatcctggtcgggaataaagtgatctataaagcccttaaacgttacgagggtccactctggaagtcatctaggttctttggatggaggctgttctgggtggttctggaacatggcgtattgtcatggtatcggaagcagccagatgcagttcacaatatatatcgccaaggctgtaagcacctgacccaagccgtgtgcacagtgaaatccaccgatagttgcctgtttttcattaagtgctttgacgatacgatccacgggttccgcgtccccaagaactctctgcaacagagtcgggaggattggctcgaagcgatagaggagcacagcgcctactctacacattactgctctcaggatcagttgaccgacgaagaagaggaggacactgtaagtgccgccgacctgaagaagagtctggagaaggctcagagctgtcaacagcgccttgatcgggagatttcgaacttcttgaaaatgataaaagagtgcgacatggccaaggagatgctgccctccttcttgcagaaggtggaggtagttagcgaggcctcccgtgaaacatgcgtggccctaacagactgtctgaatctgtttaccaagcaagagggcgtcagaaatttcaaactggaacaggaacaagagaagaacaaaatactatctgaagccctcgagaccctggcgaccgagcatcacgaattggaacagagtcttgtgaagggaagccctcccgctagcattctaagcgaagacgagttttatgacgccttgtctgacagtgagtcagaacgcagcctgtctaggctggaagctgtcaccgccaggtcttttgaagaggagggcgaacatctgggcagtagaaaacataggatgtctgaggagaaagactgtggtgggggggacgcgctcagcaacggcattaagaaacaccgcacaagtctgccatccccaatgttctcccgtaacgatttttccatttggagtatccttcggaaatgtatcggaatggagttaagcaagatcactatgcccgtcatcttcaatgagcctctgtcttttctccagcgactcaccgagtacatggaacatacctaccttatccataaggcttcaagcctgtcagatcctgtggagcgcatgcaatgtgtagcagctttcgctgtgagcgcggtcgcctcccagtgggagcgaactgggaaaccctttaatcctctgcttggcgagacatacgagctggtgcgggacgatctcggatttagactgatcagtgagcaggtgtctcaccatccccccatctccgcatttcacgctgagggcttgaataatgactttatcttccacgggagcatctacccgaagttaaagttttggggcaagtcagtcgaagcagagcccaaaggcacaatcacgttggagcttctggaacacaacgaggcctatacgtggacgaatccaacatgttgcgtacataacatcatagtgggtaagctgtggattgagcaatacgggaatgttgagatcattaatcacaagacaggggataaatgtgtattgaattttaagccatgcggcttgttcggcaaggagctgcacaaagtggagggatacatacaggacaagtcaaagaaaaaactttgcgctctctatggtaagtggactgaatgcctgtattccgtggatccggccacattcgacgcatataaaaaaaatgataagaagaataccgaggaaaagaagaatagcaaacagatgagcacctctgaggaactggatgaaatgcctgtgcccgactcagaatctgttttcatcatacccggctctgtgttactttggagaattgctccccgtcctccaaattccgcccaaatgtataactttacgagtttcgcaatggtactcaacgaagttgataaagatatggaatccgtgatccccaagaccgattgccgtctgcgccccgacatccgggcaatggagaacggcgagattgaccaggcctcggaggaaaaaaaaaggctcgaagagaagcagcgagccgctcgtaagaatcggtcaaagtctgaggaggattggaaaacacgttggtttcaccagggacctaacccttataacggggctcaggattggatttatagcggctcttattgggaccggaattatttcaatctgccagatatttattag

SEQ ID NO: 231488 - DNA, 1707 bp, Artificial Sequence
  derived and/or modified sequence
atgataaaggaatgcgacatggctaaggagatgctcccaagtttcctccagaaagtcgaagtggtgtccgaggcgagccgagagacctgcgtggcacttaccgactgtctcaacctcttcacgaaacaggagggtgtgcggaatttcaaactcgaacaggagcaggagaagaacaagatcttgtccgaagctctcgaaacattggcgacggaacatcatgagctagaacaaagcctcgtgaaggggagtccgccagcaagcattctgtccgaagatgagttttacgacgctctgtctgatagtgaatccgagcggtccctctccaggctggaggctgtgacggcccggtcattcgaggaggaaggcgagcatctaggctcacgcaaacatagaatgtcagaagagaaggactgcggcggaggagacgccctcagtaatggtattaagaaacacagaacaagcctcccttcccctatgttttctagaaatgacttctcaatatggtcaatattgaggaagtgtatcgggatggagctaagcaagataaccatgccggtgatcttcaacgagcccctgagttttctgcaacggcttaccgagtacatggagcacacctaccttatccacaaagctagcagccttagtgatcctgtcgaaaggatgcagtgcgtggcagctttcgctgtctctgctgttgccagccagtgggagcgcaccggcaaaccgttcaacccactgctgggcgaaacatacgagctggtgcgcgacgatctggggttccggctgatctctgaacaggtttctcaccatccacctattagtgcattccacgccgaaggccttaacaatgacttcatctttcatggtagcatttaccctaaacttaaattctggggcaagagcgtcgaagcggagcctaagggcaccatcaccctggagctgctggaacacaacgaagcatacacctggacgaatccgacctgctgcgtgcataacattattgtgggaaagctttggatcgagcagtacggaaacgtggagattatcaaccataaaactggcgacaagtgtgttctgaactttaagccctgtggactgtttgggaaagagctgcataaagtggaagggtatatccaggacaaaagtaaaaagaaactctgtgccctgtacgggaaatggacagaatgcctctacagcgttgacccagcaacattcgatgcctacaaaaaaaatgacaagaagaatacagaagaaaagaagaatagtaagcagatgtctaccagcgaggaactggatgaaatgcctgtccccgattccgaatccgtgttcattatacctggaagtgtgctactctggcggattgccccaaggcctccgaattccgcacagatgtataatttcacctccttcgctatggtactgaatgaggtggacaaagacatggaatcagtgattccaaaaacagactgccggcttcgcccagacatcagggctatggaaaacggagagatagaccaagccagcgaggagaagaaacggttagaagaaaagcagcgagcggccaggaagaacaggtccaagtccgaggaggactggaaaacaaggtggttccatcaaggacctaacccttataacggagcacaggactggatctattccggttcctactgggacaggaactactttaatctgcctgacatctactag

SEQ ID NO: 231489 - DNA, 2853 bp, Artificial Sequence
  derived and/or modified sequence
atgaacacagaagctgagcagcagctgctgcaccacgccagaaatggaaatgctgaggaggtgcggcagctgctggagaccatggccagaaatgaggtgattgctgacatcaactgcaagggccgcagcaagagcaacctgggctggacccccctgcacctggcctgctacttcggccaccggcaggtggtgcaggacctgctgaaggccggggctgaggtgaatgtgctgaatgacatgggagacacccccctgcaccgggccgccttcaccggcaggaaggagctggtgatgctgctgctggagtacaatgctgacaccaccatcgtgaatggaagtggccagacagccaaggaggtgacccatgctgaggagatccgctccatgctggaggccgtggagaggacccagcagaggaagctggaggagctgctgctggccgccgcccgggagggcaagaccacagagctgacagccctgctgaaccggcccaaccccccagatgtgaactgcagcgaccagctgggcaacacccccctgcactgtgccgcctaccgggcccacaagcagtgtgccctgaagctgctgcggagcggggctgaccccaacctgaagaacaagaatgaccagaagcccctggacctggcccagggcgctgagatgaagcacatcctggtgggcaacaaggtgatctacaaggccctgaagagatatgagggccccctgtggaagagcagccgcttcttcggctggaggctcttctgggtggtgctggagcacggcgtgctgtcctggtacaggaagcagccagatgctgtgcacaacatctaccggcagggctgcaagcacctgacccaggccgtgtgcaccgtgaagagcacagacagctgcctcttcttcatcaagtgctttgatgacaccatccacggcttccgggtgcccaagaacagcctgcagcagagccgggaggactggctggaggccatcgaggagcacagcgcctacagcacccactactgcagccaggaccagctgacagatgaggaggaggaggacacagtgtctgctgctgacctgaagaagagcctggagaaggcccagagctgccagcagaggctggaccgggagatcagcaacttcctgaagatgatcaaggaatgtgacatggccaaggagatgctgcccagcttcctgcagaaggtggaggtggtgtctgaggccagccgggagacctgtgtggccctgacagactgcctgaacctcttcaccaagcaggagggcgtgaggaacttcaagctggagcaggagcaggagaagaacaagatcctgtctgaggccctggagaccctggccacagagcaccacgagctggagcagagcctggtgaagggcagccccccagccagcatcctgtctgaagatgagttctatgatgccctgagtgacagcgagagcgagaggagcctgagccggctggaggccgtgacagcccggagctttgaggaggagggggagcacctgggcagcaggaagcacaggatgtctgaggagaaggactgtggcggcggagatgccctgagcaatggcatcaagaagcacaggaccagcctgcccagccccatgttcagcagaaatgacttcagcatctggagcatcctgaggaaatgtattggcatggagctgagcaagatcaccatgcctgtgatcttcaatgagcccctgtccttcctgcagaggctgacagagtacatggagcacacctacctgatccacaaggccagcagcctgagtgaccctgtggagaggatgcagtgtgtggccgcctttgctgtgtctgctgtggccagccagtgggagaggacaggcaagcccttcaaccccctgctgggggagacctatgagctggtgagagatgacctgggcttccgcctcatcagcgagcaggtgagccaccacccccccatcagcgccttccacgccgagggcctgaacaatgacttcatcttccacggcagcatctaccccaagctgaagttctggggcaagtctgtggaggccgagcccaagggcaccatcaccctggagctgctggagcacaatgaggcctacacctggaccaaccccacctgctgcgtgcacaacatcatcgtgggcaagctgtggattgagcagtatggaaatgtggagatcatcaaccacaagacaggagacaagtgtgtgctgaacttcaagccctgtggcctgtttgggaaggagctgcacaaggtggagggctacatccaggacaagagcaagaagaagctgtgtgccctgtatggcaagtggacagaatgtctgtacagcgtggaccctgccacctttgatgcctacaagaagaatgacaagaagaacacagaggagaagaagaacagcaagcagatgagcaccagcgaggagctggatgagatgcctgtgcctgattctgagagcgtcttcatcatccctggctctgtgctgctgtggagaattgccccccggccccccaacagcgcccagatgtacaacttcaccagctttgccatggtgctgaatgaggtggacaaggacatggagagcgtcatccccaagacagactgccgcctgcggccagacatccgggccatggagaatggagaaattgaccaggccagcgaggagaagaagaggctggaggagaagcagagagctgccaggaagaacagaagcaagtctgaggaggactggaagacccgctggttccaccagggccccaacccctacaatggagcccaggactggatctacagcggcagctactgggacaggaactacttcaacctgcctgacatctactag

SEQ ID NO: 231490 - DNA, 1707 bp, Artificial Sequence
  derived and/or modified sequence
atgatcaaggaatgtgacatggccaaggagatgctgcccagcttcctgcagaaggtggaggtggtgtctgaggccagccgggagacctgtgtggccctgacagactgcctgaacctcttcaccaagcaggagggcgtgaggaacttcaagctggagcaggagcaggagaagaacaagatcctgtctgaggccctggagaccctggccacagagcaccacgagctggagcagagcctggtgaagggcagccccccagccagcatcctgtctgaagatgagttctatgatgccctgagtgacagcgagagcgagaggagcctgagccggctggaggccgtgacagcccggagctttgaggaggagggggagcacctgggcagcaggaagcacaggatgtctgaggagaaggactgtggcggcggagatgccctgagcaatggcatcaagaagcacaggaccagcctgcccagccccatgttcagcagaaatgacttcagcatctggagcatcctgaggaaatgtattggcatggagctgagcaagatcaccatgcctgtgatcttcaatgagcccctgtccttcctgcagaggctgacagagtacatggagcacacctacctgatccacaaggccagcagcctgagtgaccctgtggagaggatgcagtgtgtggccgcctttgctgtgtctgctgtggccagccagtgggagaggacaggcaagcccttcaaccccctgctgggggagacctatgagctggtgagagatgacctgggcttccgcctcatcagcgagcaggtgagccaccacccccccatcagcgccttccacgccgagggcctgaacaatgacttcatcttccacggcagcatctaccccaagctgaagttctggggcaagtctgtggaggccgagcccaagggcaccatcaccctggagctgctggagcacaatgaggcctacacctggaccaaccccacctgctgcgtgcacaacatcatcgtgggcaagctgtggattgagcagtatggaaatgtggagatcatcaaccacaagacaggagacaagtgtgtgctgaacttcaagccctgtggcctgtttgggaaggagctgcacaaggtggagggctacatccaggacaagagcaagaagaagctgtgtgccctgtatggcaagtggacagaatgtctgtacagcgtggaccctgccacctttgatgcctacaagaagaatgacaagaagaacacagaggagaagaagaacagcaagcagatgagcaccagcgaggagctggatgagatgcctgtgcctgattctgagagcgtcttcatcatccctggctctgtgctgctgtggagaattgccccccggccccccaacagcgcccagatgtacaacttcaccagctttgccatggtgctgaatgaggtggacaaggacatggagagcgtcatccccaagacagactgccgcctgcggccagacatccgggccatggagaatggagaaattgaccaggccagcgaggagaagaagaggctggaggagaagcagagagctgccaggaagaacagaagcaagtctgaggaggactggaagacccgctggttccaccagggccccaacccctacaatggagcccaggactggatctacagcggcagctactgggacaggaactacttcaacctgcctgacatctactag

SEQ ID NO: 231491 - DNA, 2853 bp, Artificial Sequence
  derived and/or modified sequence
atgaacaccgaggccgagcagcagctgctgcaccacgcccggaacggcaatgcagaggaggtgagacaactcctcgagacaatggcccgaaacgaagtgatagcagatattaattgcaaaggccggagcaaaagcaacttggggtggaccccccttcatcttgcatgctacttcggccaccgtcaagtggtgcaggatctgttgaaggcaggcgcagaggtgaacgtcctaaacgacatgggcgatacccctttgcacagggccgccttcacaggccgcaaagagctggtaatgcttcttctggaatataacgcagacaccacgatcgttaatgggtcagggcagaccgctaaggaggtgactcatgcggaggagattcgctccatgctggaggccgtggagcgcacgcagcagcgtaaattggaagagcttctgcttgcggctgcaagggagggcaaaactacagagctcaccgcgctgctgaaccgaccgaatccaccagatgtgaattgctcggatcagttggggaacacccccttgcattgtgctgcctatcgcgcccataaacagtgcgcgctgaaactgcttcgtagcggtgcagatccgaatcttaagaacaaaaatgatcaaaaaccacttgatctggcccagggggcagaaatgaagcacatcctcgtcggcaataaagtcatttataaggcattgaagaggtatgagggccctctgtggaaatcaagtaggttctttgggtggaggctgttttgggttgttctggaacatggggttctttcctggtacaggaaacagcccgacgctgtgcacaacatttaccgccaggggtgtaaacatttgacacaggcagtttgtaccgtgaagtcaaccgatagctgcttattcttcatcaagtgttttgacgataccatccacggatttcgcgtgcccaagaattccctgcagcaaagccgcgaagactggttagaggcaatagaggaacactcagcctacagtacacactactgtagccaggaccagttaacagacgaagaagaagaggacacagtgagcgcggcggatctcaagaaatccttagagaaagctcagtcgtgtcaacagagactagatagagagatcagcaactttctaaaaatgattaaagaatgtgatatggccaaggaaatgctcccttcttttctgcagaaggtcgaagtggtgtctgaggcctctagggaaacctgtgttgccctgacagattgcctcaatctgttcacaaaacaggaaggcgtcaggaattttaagcttgagcaggaacaggaaaagaacaaaatcctgtccgaagccctggagactctggccaccgaacatcatgagctggaacagtctctggttaagggtagcccccctgcaagcattctgtccgaggacgaattctatgacgctctgagtgactcagaatctgagagatctctgtcgagactcgaggccgtcaccgctaggagcttcgaagaagagggcgagcatttaggctcccggaaacatcggatgagtgaggagaaggactgtggcggtggagatgcccttagtaacggaatcaaaaagcatcgaacctccttgccatctccgatgtttagccgtaacgatttctccatttggtcaattcttcggaagtgtattggcatggaactatctaaaatcactatgcctgtgattttcaacgagcccctgtctttcctgcaaagattgaccgagtacatggaacatacatatctcatccacaaggcctcctcactgtcagaccccgtcgaacggatgcagtgtgtcgcagctttcgccgtctctgccgttgcttctcagtgggaaaggactggaaagcctttcaaccccctgctaggtgaaacctacgagcttgtccgtgacgacctcggcttcagactgataagtgaacaggtgagtcatcacccccccatctcagcattccacgcggaaggactgaacaatgacttcatcttccatggtagtatatatcctaaactgaagttttggggaaagtcagttgaagcagaacctaaagggacaatcactctagaactattagaacataatgaggcatacacttggaccaatcccacttgttgcgtccacaatattatcgtggggaagctgtggattgaacagtacggcaacgttgagattatcaaccacaagaccggcgacaaatgtgtgctgaactttaagccctgtgggctattcgggaaggaactgcacaaagtggaaggctacatccaggacaagtccaagaagaagctgtgtgccctgtatggcaaatggacagagtgcctctattctgtggatcctgccacctttgacgcatacaagaaaaacgataaaaagaacaccgaggaaaaaaagaatagcaagcagatgtccacgagtgaagaactagatgaaatgccagtccccgacagcgagagcgtgtttataatcccaggctccgtgttactctggaggatcgcaccgcggccacctaacagtgcccaaatgtacaattttactagttttgcgatggtgctcaacgaggtggataaagatatggagagtgtaattcccaagactgattgtaggttaaggccagatattcgggccatggaaaatggagaaattgaccaagcttcggaggagaaaaaaagactagaggaaaagcagagggcggctaggaaaaacaggagtaaaagcgaggaggactggaagacccgctggtttcatcaaggacccaacccctataatggagcacaggattggatttattctggatcctactgggatcgcaactatttcaatttgcccgatatatattag

SEQ ID NO: 231492 - DNA, 1707 bp, Artificial Sequence
  derived and/or modified sequence
atgatcaaggagtgcgacatggccaaggagatgctgcccagcttcttgcaaaaggtcgaggtggttagcgaggcttcccgggaaacctgcgtggcattaaccgattgtcttaacctgttcacaaaacaggagggcgttcgaaattttaagctcgaacaagagcaagagaaaaacaaaatcctgagcgaggctttagagacccttgccacggagcaccacgagctcgagcagtctttggtgaaagggagcccgcctgcaagcattctgtccgaggatgagttctacgacgccctgagcgacagtgagtccgaacgatcactgtctaggctcgaagcagtcaccgctagatccttcgaggaagaaggtgagcacctgggtagcaggaagcatagaatgtctgaggaaaaggattgcggcggaggggatgccctgtccaatggaattaagaagcacagaacttcattaccgtcccctatgtttagcagaaatgacttttcgatctggtctattttgcgcaagtgcatcggcatggagctgtccaaaattaccatgccagtgatcttcaacgagcccctaagctttctgcagaggctcacggaatatatggaacacacctaccttatacacaaggcaagttccctgagtgatcccgttgaacggatgcagtgcgtggctgcatttgccgtgagcgcggtcgcctcgcagtgggagaggaccggcaaaccttttaatccactgctgggggaaacttacgagctggttagggacgacctaggcttccggctgatatcagagcaggtgtcccaccaccctcccatctccgcattccatgccgaaggtttgaacaatgactttattttccatggatccatataccccaagctcaaattctggggcaagtccgttgaagccgagcctaaagggacgataacattagagctcctcgagcacaacgaggcctatacttggactaacccaacctgctgtgtgcataacattatcgttgggaaactgtggatcgagcagtacggcaacgtggagataattaatcacaaaactggcgataagtgtgtgttaaattttaaaccatgcgggttattcggtaaggagctgcacaaggtggaaggttatatccaagataagtcaaagaagaaactgtgtgcattgtatggcaaatggaccgagtgtctgtattcggtggatccggccacgtttgacgcctataagaaaaatgacaagaaaaataccgaggagaaaaagaacagcaagcaaatgagtacctctgaggaattagatgagatgccggtgcctgattcagagagcgtctttattattccgggatcagtcctactgtggcgcatagctccaaggccaccgaattccgcccagatgtataattttacttcatttgccatggtccttaatgaagtcgacaaagacatggagagcgtcattcctaagactgactgtaggctccgaccagatatccgcgcgatggaaaatggcgagattgaccaagccagtgaggaaaagaagagacttgaggaaaagcaaagagcagctcggaagaatcgcagtaagagcgaggaagactggaaaacccggtggtttcaccaggggcccaatccatataatggcgcacaggattggatctactctggttcttattgggatcgcaattacttcaaccttcctgatatttattag

SEQ ID NO: 231493 - DNA, 4195 bp, Artificial Sequence
  derived and/or modified sequence
ctgcggggaggggcggcgccacctcgcgctccgccgtggtcccggcgccgggtcccggagacagacgttacgcgggctcgagcgtcctcggggagtgccagccagagttggtgacgaccacttcctcgacgtggggcgggcggacgggaagcctggggtcgtggccaccgcctcgggagctctgggagcccgggtgaccgcgtagaaatgaacacagaagcggagcaacagcttctccatcacgccagaaatggcaatgctgaagaagtaagacaactattagagaccatggcgaggaatgaagtgattgctgacattaattgcaaaggaagaagtaagtctaacttgggctggacacctctacatctggcatgctattttggacacagacaagtggtccaggatctgttgaaggctggtgcagaagtgaatgtgttgaatgacatgggagacacgccgcttcatcgagctgcctttacaggacgaaaggagttggtaatgcttctcttagaatataatgctgatactactattgttaatgggagtggacagacagcaaaagaagttactcatgctgaagaaatcagaagcatgcttgaagctgtagaaaggactcaacaaagaaagcttgaagaattacttttagcagcagcaagagaaggcaaaacaacagaactcacagctctgctcaacaggcccaatcctcctgatgttaactgttcggatcagttaggaaatacacccttgcattgtgcagcttaccgggcccataaacaatgtgccttaaagcttctaagaagtggagcagaccctaatctgaagaacaaaaatgatcagaaacctcttgaccttgcccagggtgctgaaatgaaacacattcttgttggtaataaggtcatctacaaagcattgaaacgatatgagggccctctctggaagagttcaagattttttggctggagattattctgggtagtgttagagcatggagtcctttcatggtataggaaacagcctgatgcagttcataatatttatcgccagggatgcaaacacctgactcaagcagtatgcacggtaaaatccactgatagctgcctcttctttattaaatgctttgatgacaccattcatggcttccgggttcctaagaatagccttcagcagtcaagagaggactggctggaagcaatagaagaacattctgcttacagcactcactactgttcccaggaccagctgactgatgaggaggaggaagatacggtttctgctgcagacctgaagaaatcattagagaaagcacagtcatgccaacagcgactagatagggaaatttccaactttctcaaaatgattaaggagtgtgacatggctaaagaaatgcttccatcatttcttcagaaagttgaagttgtctcagaagcttctagagaaacttgtgtagctttgactgattgccttaatctcttcaccaaacaagaaggggtgaggaattttaaattggaacaagagcaagaaaaaaacaaaatcttgtcagaagcactggagacgctggccactgaacatcatgaattagagcagtctctggtgaaaggctctccacccgccagcatccttagcgaggacgagttctatgatgcgctgtcagattccgagtccgaaaggtccctgagtagattggaagcagtgacagcacgctcctttgaagaggaaggagagcatttgggcagtagaaaacacagaatgtccgaagaaaaagactgtggtggcggagatgctctctccaatggcatcaagaaacacagaacaagtttgccttctcctatgttttccagaaatgacttcagtatctggagcatcctcagaaaatgtattggaatggaactatccaagatcacgatgccagttatatttaatgagcctctgagcttcctacagcgcctaactgaatacatggagcatacttacctcatccacaaggccagttcactctctgatcctgtggaaaggatgcagtgtgtagctgcgtttgctgtatctgctgttgcttctcagtgggaacggactggaaaacctttcaacccactgctgggagagacttatgaattagtgcgagatgaccttggatttagactcatctccgaacaggtcagccatcacccaccaatcagtgcatttcatgctgaaggattaaacaatgacttcatctttcatggctctatctatcccaaactgaaattctgggggaagagtgtagaagcagaacccaaaggaaccatcaccttggagctccttgaacacaatgaggcatatacatggacaaatcccacctgctgtgtgcataatatcattgtgggtaaactgtggatcgaacagtatggcaatgtggaaattataaaccacaagactggggacaaatgtgtgttgaattttaagccatgtggcctttttggtaaggaattacacaaagttgaaggctacattcaagataaaagcaaaaagaagctctgtgccctctatgggaagtggactgaatgtttatacagtgttgaccctgccacgtttgacgcttacaaaaaaaatgataagaaaaatacagaagagaagaagaacagcaaacagatgagcacctctgaggagttggatgaaatgccagtgccggattctgaaagtgtattcattatccctggaagcgttcttctatggcgaatagccccacggcctccaaattctgcccagatgtataattttactagttttgcaatggttttgaatgaagtagacaaagacatggagagtgtgattcccaagacagactgcaggttacggcctgacatcagagccatggaaaatggagagatagatcaagctagtgaagaaaaaaaacgacttgaggaaaaacaaagagcagcccgcaaaaacaggtccaagtcagaagaggactggaagacgaggtggttccatcaaggtcctaatccctacaatggagcacaggactggatttactctggcagctactgggacagaaattacttcaatttgcctgacatttattaaaatgcatacaagtcagggtgtttggctaatctacaaataagtcttaaacctatgtttttaaatttttttcccttggtttctacttatcttttaaaaaaaaaaatgaaaaaacactcatgagataactgcatttcacccaacaaaagcagggtataaggcgatattggtgatgaaagtcttaggaaaaatgcataattttgctataaaatgtacttatttggaatactattttatatagaggtaagagaacactgctggggaatatgctttttatggttgctgttgccatatttactgaaggtttatacctaaatgtaactttagctttatggaactatatagtaatcccaaatcaagttattttgaatatttttatgctgtcatgcttgaatgttttagatgtaacctttgacatatttagaactctcctcctatacaatgtttattctcagatatagaggttatgtcattttataaagacttcattgataagatggcttttattcatactaatcctcccaatgttaccccttccatcttccaagaagaaaaaaaatgcctgaatattcagaatagatatttctgatttgaaaattctaaagaattaaactggaaaagtatttcatttacttagtgctctgaatttacttttacagttttctgcagtcagtatcattaaaatggttaagtttacatttgaactgaaaatatgtataaaatctagcaattcacaaaaatgccctagaaatatagattttaatcaccattacataatgacaaaccttgttaaatgcttccacttccagtggcaaatgccactagggaaagtaagttgcactcatgtaagtatcaaactatataaaaggaggccttgtgcatttcaagtttgcaaagtacctgtgtacttaaaatatgtgtggagacctactgtacagtagttttgcccctttaattggggcacattcatcttaaatcttatagtatttatccacccaaaccccagactgagatactgctcccaggggcctaggtagctgccagtccgtgattttaattgctgtcttgaagttaacaagtgttataatgaaataatctacctgatgctaaataaaggctttagaatgttccccaaaag

SEQ ID NO: 231494 - DNA, 1859 bp, Artificial Sequence
  derived and/or modified sequence
gaagtcttctgaagtgacaccagtgccttatccctagaggaatatcagcatagaaagcacagtcatgccaacagcgactagatagggaaatttccaactttctcaaaatgattaaggagtgtgacatggctaaagaaatgcttccatcatttcttcagaaagttgaagttgtctcagaagcttctagagaaacttgtgtagctttgactgattgccttaatctcttcaccaaacaagaaggggtgaggaattttaaattggaacaagagcaagaaaaaaacaaaatcttgtcagaagcactggagacgctggccactgaacatcatgaattagagcagtctctggtgaaaggctctccacccgccagcatccttagcgaggacgagttctatgatgcgctgtcagattccgagtccgaaaggtccctgagtagattggaagcagtgacagcacgctcctttgaagaggaaggagagcatttgggcagtagaaaacacagaatgtccgaagaaaaagactgtggtggcggagatgctctctccaatggcatcaagaaacacagaacaagtttgccttctcctatgttttccagaaatgacttcagtatctggagcatcctcagaaaatgtattggaatggaactatccaagatcacgatgccagttatatttaatgagcctctgagcttcctacagcgcctaactgaatacatggagcatacttacctcatccacaaggccagttcactctctgatcctgtggaaaggatgcagtgtgtagctgcgtttgctgtatctgctgttgcttctcagtgggaacggactggaaaacctttcaacccactgctgggagagacttatgaattagtgcgagatgaccttggatttagactcatctccgaacaggtcagccatcacccaccaatcagtgcatttcatgctgaaggattaaacaatgacttcatctttcatggctctatctatcccaaactgaaattctgggggaagagtgtagaagcagaacccaaaggaaccatcaccttggagctccttgaacacaatgaggcatatacatggacaaatcccacctgctgtgtgcataatatcattgtgggtaaactgtggatcgaacagtatggcaatgtggaaattataaaccacaagactggggacaaatgtgtgttgaattttaagccatgtggcctttttggtaaggaattacacaaagttgaaggctacattcaagataaaagcaaaaagaagctctgtgccctctatgggaagtggactgaatgtttatacagtgttgaccctgccacgtttgacgcttacaaaaaaaatgataagaaaaatacagaagagaagaagaacagcaaacagatgagcacctctgaggagttggatgaaatgccagtgccggattctgaaagtgtattcattatccctggaagcgttcttctatggcgaatagccccacggcctccaaattctgcccagatgtataattttactagttttgcaatggttttgaatgaagtagacaaagacatggagagtgtgattcccaagacagactgcaggttacggcctgacatcagagccatggaaaatggagagatagatcaagctagtgaagaaaaaaaacgacttgaggaaaaacaaagagcagcccgcaaaaacaggtccaagtcagaagaggactggaagacgaggtggttccatcaaggtcctaatccctacaatggagcacaggactggatttactctggcagctactgggacagaaattacttcaatttgcctgacatttattaaaatgcatacaagtcagggtgtttggctaatctacaaataagtctt

SEQ ID NO: 231495 - DNA, 3318 bp, Artificial Sequence
  derived and/or modified sequence
ccagggccggtgtctccaggagagggccgagcgcacagcagctctaggacctcgcaggcgcctcggcgcggcactcacgtagagcccaaggagcagtccccgacctctcctcggagggccgtgcaggcttccccggcggtccctacctgcgcctccgcccgccagcggcgctggggaaggggaggagcggcccggacgctgcccgccgcgcgcagggagccgcccgccgcaggccttgccgccgcccgcccgcgctctccccgcgagccccggagggcgggtctgcggccgagccagcggcggcggaggggcagcgcagacctctgcggcccgggcgggcgcggcgcgggagtcctgggccgctggcgggcaacgcctctgcccgacctcgctggggaaggctggcgctgctgcccggccggagccaggggcaggctgcgcaaaggtgacttagggagaccttgcgggccgccctgggtcgcgcctcccggatcggctcgcctcggctcgactggaggggaggaggaggagcaggccgagcgcattcgcgctggagcttgcgaggagcgcagggtggagcgcgccagccggggtcctcggatctggcccaggtgaggaattttaaattggaacaagagcaagaaaaaaacaaaatcttgtcagaagcactggagacgctggccactgaacatcatgaattagagcagtctctggtgaaaggctctccacccgccagcatccttagcgaggacgagttctatgatgcgctgtcagattccgagtccgaaaggtccctgagtagattggaagcagtgacagcacgctcctttgaagaggaaggagagcatttgggcagtagaaaacacagaatgtccgaagaaaaagactgtggtggcggagatgctctctccaatggcatcaagaaacacagaacaagtttgccttctcctatgttttccagaaatgacttcagtatctggagcatcctcagaaaatgtattggaatggaactatccaagatcacgatgccagttatatttaatgagcctctgagcttcctacagcgcctaactgaatacatggagcatacttacctcatccacaaggccagttcactctctgatcctgtggaaaggatgcagtgtgtagctgcgtttgctgtatctgctgttgcttctcagtgggaacggactggaaaacctttcaacccactgctgggagagacttatgaattagtgcgagatgaccttggatttagactcatctccgaacaggtcagccatcacccaccaatcagtgcatttcatgctgaaggattaaacaatgacttcatctttcatggctctatctatcccaaactgaaattctgggggaagagtgtagaagcagaacccaaaggaaccatcaccttggagctccttgaacacaatgaggcatatacatggacaaatcccacctgctgtgtgcataatatcattgtgggtaaactgtggatcgaacagtatggcaatgtggaaattataaaccacaagactggggacaaatgtgtgttgaattttaagccatgtggcctttttggtaaggaattacacaaagttgaaggctacattcaagataaaagcaaaaagaagctctgtgccctctatgggaagtggactgaatgtttatacagtgttgaccctgccacgtttgacgcttacaaaaaaaatgataagaaaaatacagaagagaagaagaacagcaaacagatgagcacctctgaggagttggatgaaatgccagtgccggattctgaaagtgtattcattatccctggaagcgttcttctatggcgaatagccccacggcctccaaattctgcccagatgtataattttactagttttgcaatggttttgaatgaagtagacaaagacatggagagtgtgattcccaagacagactgcaggttacggcctgacatcagagccatggaaaatggagagatagatcaagctagtgaagaaaaaaaacgacttgaggaaaaacaaagagcagcccgcaaaaacaggtccaagtcagaagaggactggaagacgaggtggttccatcaaggtcctaatccctacaatggagcacaggactggatttactctggcagctactgggacagaaattacttcaatttgcctgacatttattaaaatgcatacaagtcagggtgtttggctaatctacaaataagtcttaaacctatgtttttaaatttttttcccttggtttctacttatcttttaaaaaaaaaaatgaaaaaacactcatgagataactgcatttcacccaacaaaagcagggtataaggcgatattggtgatgaaagtcttaggaaaaatgcataattttgctataaaatgtacttatttggaatactattttatatagaggtaagagaacactgctggggaatatgctttttatggttgctgttgccatatttactgaaggtttatacctaaatgtaactttagctttatggaactatatagtaatcccaaatcaagttattttgaatatttttatgctgtcatgcttgaatgttttagatgtaacctttgacatatttagaactctcctcctatacaatgtttattctcagatatagaggttatgtcattttataaagacttcattgataagatggcttttattcatactaatcctcccaatgttaccccttccatcttccaagaagaaaaaaaatgcctgaatattcagaatagatatttctgatttgaaaattctaaagaattaaactggaaaagtatttcatttacttagtgctctgaatttacttttacagttttctgcagtcagtatcattaaaatggttaagtttacatttgaactgaaaatatgtataaaatctagcaattcacaaaaatgccctagaaatatagattttaatcaccattacataatgacaaaccttgttaaatgcttccacttccagtggcaaatgccactagggaaagtaagttgcactcatgtaagtatcaaactatataaaaggaggccttgtgcatttcaagtttgcaaagtacctgtgtacttaaaatatgtgtggagacctactgtacagtagttttgcccctttaattggggcacattcatcttaaatcttatagtatttatccacccaaaccccagactgagatactgctcccaggggcctaggtagctgccagtccgtgattttaattgctgtcttgaagttaacaagtgttataatgaaataatctacctgatgctaaataaaggctttagaatgttccccaaaag

SEQ ID NO: 231496 - DNA, 2853 bp, Artificial Sequence
  derived and/or modified sequence
atgaatacagaagccgagcagcagctgctgcatcacgcgaggaacgggaatgcagaagaagtccggcaactcctcgaaacaatggcgcgtaatgaagtgatcgccgatattaactgtaaagggaggtcaaaaagcaatcttgggtggactccactgcacttagcttgctatttcgggcatagacaggtggtccaggatcttctgaaggcaggcgcagaggtcaacgtgttaaacgacatgggcgatactccattacatcgcgctgctttcacaggcagaaaagagctagtcatgctgctgcttgaatacaatgctgacacaacgatcgtgaatggttcgggccagacagccaaggaggttacccacgccgaggaaatcagatcaatgctggaggctgtcgagcggacacagcagaggaagctagaggaacttctgctggccgctgctagagagggcaagaccaccgaactgactgccctcctgaacaggcccaaccccccagatgtcaactgttccgatcaactagggaatacgccgcttcactgcgccgcatatagagctcataagcagtgcgctctgaagttgctgcgatccggcgctgatccgaatctcaagaacaaaaatgatcaaaaacctctggacttggctcagggcgcagaaatgaaacacatcctagtgggcaacaaggtgatctataaggccctcaaaaggtatgagggtcctctgtggaagtcttcacgcttctttggctggagactgttttgggtggtcctggagcatggcgtgctgagctggtaccggaaacagcctgatgcggtccacaacatctataggcagggatgtaagcatctcacgcaggctgtctgcactgtgaagtcaaccgactcctgtctgttcttcataaaatgctttgacgacacaattcatgggtttagggtaccgaaaaacagtcttcagcaatcaagggaggactggctcgaggccatcgaggagcatagcgcctactccacccactactgttcccaggatcagctgaccgacgaggaagaggaggatactgtgagcgcagccgatctgaaaaagtctctggagaaggcccagtcttgccagcagcgattggaccgggagatatctaacttcctcaaaatgatcaaagagtgtgacatggccaaggaaatgctcccaagtttcctgcagaaagtcgaagtagtgtctgaggccagtagagagacgtgtgtggctttgaccgactgcctaaatcttttcacaaagcaagagggggtaagaaatttcaaattagaacaggaacaggagaaaaataagatcctcagcgaggccttagagaccctggcaactgaacatcatgagttggagcagagtctggttaaggggagcccccctgcttcaatcctgtctgaggacgagttttacgatgcccttagtgattctgagagtgagagatcactgtctcgcctggaggccgtcacagcacggagcttcgaggaagaaggggagcatttggggtctaggaagcacagaatgtcagaagagaaagactgcggcggtggggacgctttaagcaatgggatcaagaaacatcgcacttcgttaccgtctcctatgttctcccgcaatgatttcagcatctggtcaatcctcaggaagtgtatcggtatggagctgagcaaaatcacaatgcctgtgatttttaatgaacccctatctttcctccagcggctgactgaatatatggagcacacctacctcatacacaaggcctcttctctctccgatcccgttgagaggatgcagtgtgttgccgcttttgccgtgtccgccgtggctagccagtgggaacggaccggcaaaccatttaatccacttttgggagagacctacgagctggtccgagatgacctcggcttccgactcattagtgagcaagtaagccaccatccacccatctctgcctttcacgcagagggactgaataacgatttcatttttcacggcagcatctatcctaagctcaagttttggggcaaaagcgtcgaggccgaaccgaagggtactattacactggaactcctggaacacaacgaggcatacacttggaccaatcctacctgctgtgtgcataacataatagtgggtaagctctggatcgagcaatacggcaatgtggaaataatcaaccacaagaccggggacaagtgcgtgcttaatttcaagccctgcggcttatttggcaaggagctgcacaaagtcgaagggtacattcaggacaagagcaaaaagaaactttgcgcactctacgggaagtggaccgagtgtctgtactctgtcgaccctgctaccttcgacgcctacaagaagaacgataaaaaaaatacagaggagaaaaagaattctaaacagatgtcgaccagtgaggagttagacgagatgcctgttccggacagtgaaagcgtatttatcatccccggaagcgtactcctgtggcggatagcacctagacccccaaattcagcgcagatgtataattttacttccttcgcaatggtgctgaatgaggttgacaaagatatggaaagcgtcattccaaaaactgactgtcggctgaggcctgatattagggccatggaaaatggtgagatcgatcaagccagtgaggagaaaaagcgactcgaggaaaaacaacgtgccgcacggaagaataggtctaagagcgaggaggactggaaaaccaggtggttccatcaggggccaaatccatacaacggcgcacaggattggatttattccgggtcctattgggacaggaattacttcaacttacctgacatctactag

SEQ ID NO: 231497 - DNA, 1707 bp, Artificial Sequence
  derived and/or modified sequence
atgattaaagagtgcgacatggctaaggaaatgctcccctcctttttgcagaaggtcgaggtcgtctcagaagccagtagggagacgtgcgtggccctcactgattgcctgaacctcttcactaaacaggaaggggtccgtaattttaagctggagcaggaacaggaaaaaaacaaaatactgtctgaggccctggaaaccctggctacagaacaccacgagctcgagcaaagtttggtgaagggcagcccccctgccagcatactcagtgaggacgagttttacgatgccctgagcgatagcgaatccgagcggtcgctgtctagattggaggccgttaccgccaggagtttcgaggaggagggtgagcacctggggtctcgtaagcatagaatgtctgaagagaaagactgcggaggcggtgacgccctcagtaacggcattaaaaaacaccgcacatctctgcctagccccatgttctcacggaatgatttttcaatttggtccatcctccgcaagtgtatcgggatggagctctccaaaattaccatgcccgtcatctttaacgagcctctgtccttcttgcagagattaaccgagtacatggaacacacatacttaattcacaaagcttcgtccctgtccgaccccgtagagcgcatgcaatgtgtcgcagcatttgcagtgtccgccgtcgctagccagtgggagaggacaggcaagccctttaatcccctgctgggggagacttacgaacttgtacgggatgacctgggctttaggctgatctccgagcaggtttctcatcaccctcccatctccgcctttcacgcagaaggtttgaataatgattttattttccatggctccatttacccaaaacttaaattctggggcaagtccgtggaggcagagccaaagggcacaatcacactagaactcctagaacacaatgaagcctatacttggaccaatcccacatgctgtgtgcacaacataatagtggggaagctctggattgaacagtacgggaacgtggaaataatcaaccataaaacgggagacaagtgcgttctgaacttcaagccatgcggattattcggaaaagagctgcacaaagtggaggggtatatccaggacaagtctaagaagaagctatgtgccctgtacggaaaatggactgaatgcttatactccgtggatccagctactttcgacgcctacaagaaaaacgacaagaaaaacactgaagagaagaagaacagtaagcagatgtctacatcagaggagttggacgaaatgccagtgccagattctgagagcgtgttcataattccaggttctgtgctcctctggcggatcgcccctaggcctccgaactccgcgcagatgtacaacttcacaagctttgctatggtgctgaacgaggtggataaggacatggaatccgtgattccgaagaccgactgtaggctccgtccagatatcagagcaatggaaaacggtgagatagatcaggcttccgaggaaaaaaagcggcttgaggaaaagcagagggcagccaggaagaatagaagcaaaagcgaagaggattggaagacccgatggttccaccaagggccaaatccctataacggtgcccaagactggatctactctggtagttattgggaccgcaactacttcaacttacccgacatctattag

SEQ ID NO: 231498 - DNA, 2853 bp, Artificial Sequence
  derived and/or modified sequence
atgaacaccgaggccgagcagcagctgctgcaccacgccagaaacggcaacgccgaggaggtgagacagctgctggagaccatggccagaaacgaggtgatcgccgacatcaactgcaagggcagaagcaagagcaacctgggctggacccccctgcacctggcctgctacttcggccacagacaggtggtgcaggacctgctgaaggccggcgccgaggtgaacgtgctgaacgacatgggcgacacccccctgcacagagccgccttcaccggcagaaaggagctggtgatgctgctgctggagtacaacgccgacaccaccatcgtgaacggcagcggccagaccgccaaggaggtgacccacgccgaggagatcagaagcatgctggaggccgtggagagaacccagcagagaaagctggaggagctgctgctggccgccgccagagagggcaagaccaccgagctgaccgccctgctgaacagacccaacccccccgacgtgaactgcagcgaccagctgggcaacacccccctgcactgcgccgcctacagagcccacaagcagtgcgccctgaagctgctgagaagcggcgccgaccccaacctgaagaacaagaacgaccagaagcccctggacctggcccagggcgccgagatgaagcacatcctggtgggcaacaaggtgatctacaaggccctgaagagatacgagggccccctgtggaagagcagcagattcttcggctggagactgttctgggtggtgctggagcacggcgtgctgagctggtacagaaagcagcccgacgccgtgcacaacatctacagacagggctgcaagcacctgacccaggccgtgtgcaccgtgaagagcaccgacagctgcctgttcttcatcaagtgcttcgacgacaccatccacggcttcagagtgcccaagaacagcctgcagcagagcagagaggactggctggaggccatcgaggagcacagcgcctacagcacccactactgcagccaggaccagctgaccgacgaggaggaggaggacaccgtgagcgccgccgacctgaagaagagcctggagaaggcccagagctgccagcagagactggacagagagatcagcaacttcctgaagatgatcaaggagtgcgacatggccaaggagatgctgcccagcttcctgcagaaggtggaggtggtgagcgaggccagcagagagacctgcgtggccctgaccgactgcctgaacctgttcaccaagcaggagggcgtgagaaacttcaagctggagcaggagcaggagaagaacaagatcctgagcgaggccctggagaccctggccaccgagcaccacgagctggagcagagcctggtgaagggcagcccccccgccagcatcctgagcgaggacgagttctacgacgccctgagcgacagcgagagcgagagaagcctgagcagactggaggccgtgaccgccagaagcttcgaggaggagggcgagcacctgggcagcagaaagcacagaatgagcgaggagaaggactgcggcggcggcgacgccctgagcaacggcatcaagaagcacagaaccagcctgcccagccccatgttcagcagaaacgacttcagcatctggagcatcctgagaaagtgcatcggcatggagctgagcaagatcaccatgcccgtgatcttcaacgagcccctgagcttcctgcagagactgaccgagtacatggagcacacctacctgatccacaaggccagcagcctgagcgaccccgtggagagaatgcagtgcgtggccgccttcgccgtgagcgccgtggccagccagtgggagagaaccggcaagcccttcaaccccctgctgggcgagacctacgagctggtgagagacgacctgggcttcagactgatcagcgagcaggtgagccaccacccccccatcagcgccttccacgccgagggcctgaacaacgacttcatcttccacggcagcatctaccccaagctgaagttctggggcaagagcgtggaggccgagcccaagggcaccatcaccctggagctgctggagcacaacgaggcctacacctggaccaaccccacctgctgcgtgcacaacatcatcgtgggcaagctgtggatcgagcagtacggcaacgtggagatcatcaaccacaagaccggcgacaagtgcgtgctgaacttcaagccctgcggcctgttcggcaaggagctgcacaaggtggagggctacatccaggacaagagcaagaagaagctgtgcgccctgtacggcaagtggaccgagtgcctgtacagcgtggaccccgccaccttcgacgcctacaagaagaacgacaagaagaacaccgaggagaagaagaacagcaagcagatgagcaccagcgaggagctggacgagatgcccgtgcccgacagcgagagcgtgttcatcatccccggcagcgtgctgctgtggagaatcgcccccagaccccccaacagcgcccagatgtacaacttcaccagcttcgccatggtgctgaacgaggtggacaaggacatggagagcgtgatccccaagaccgactgcagactgagacccgacatcagagccatggagaacggcgagatcgaccaggccagcgaggagaagaagagactggaggagaagcagagagccgccagaaagaacagaagcaagagcgaggaggactggaagaccagatggttccaccagggccccaacccctacaacggcgcccaggactggatctacagcggcagctactgggacagaaactacttcaacctgcccgacatctactag

SEQ ID NO: 231499 - DNA, 1707 bp, Artificial Sequence
  derived and/or modified sequence
atgatcaaggagtgcgacatggccaaggagatgctgcccagcttcctgcagaaggtggaggtggtgagcgaggccagcagagagacctgcgtggccctgaccgactgcctgaacctgttcaccaagcaggagggcgtgagaaacttcaagctggagcaggagcaggagaagaacaagatcctgagcgaggccctggagaccctggccaccgagcaccacgagctggagcagagcctggtgaagggcagcccccccgccagcatcctgagcgaggacgagttctacgacgccctgagcgacagcgagagcgagagaagcctgagcagactggaggccgtgaccgccagaagcttcgaggaggagggcgagcacctgggcagcagaaagcacagaatgagcgaggagaaggactgcggcggcggcgacgccctgagcaacggcatcaagaagcacagaaccagcctgcccagccccatgttcagcagaaacgacttcagcatctggagcatcctgagaaagtgcatcggcatggagctgagcaagatcaccatgcccgtgatcttcaacgagcccctgagcttcctgcagagactgaccgagtacatggagcacacctacctgatccacaaggccagcagcctgagcgaccccgtggagagaatgcagtgcgtggccgccttcgccgtgagcgccgtggccagccagtgggagagaaccggcaagcccttcaaccccctgctgggcgagacctacgagctggtgagagacgacctgggcttcagactgatcagcgagcaggtgagccaccacccccccatcagcgccttccacgccgagggcctgaacaacgacttcatcttccacggcagcatctaccccaagctgaagttctggggcaagagcgtggaggccgagcccaagggcaccatcaccctggagctgctggagcacaacgaggcctacacctggaccaaccccacctgctgcgtgcacaacatcatcgtgggcaagctgtggatcgagcagtacggcaacgtggagatcatcaaccacaagaccggcgacaagtgcgtgctgaacttcaagccctgcggcctgttcggcaaggagctgcacaaggtggagggctacatccaggacaagagcaagaagaagctgtgcgccctgtacggcaagtggaccgagtgcctgtacagcgtggaccccgccaccttcgacgcctacaagaagaacgacaagaagaacaccgaggagaagaagaacagcaagcagatgagcaccagcgaggagctggacgagatgcccgtgcccgacagcgagagcgtgttcatcatccccggcagcgtgctgctgtggagaatcgcccccagaccccccaacagcgcccagatgtacaacttcaccagcttcgccatggtgctgaacgaggtggacaaggacatggagagcgtgatccccaagaccgactgcagactgagacccgacatcagagccatggagaacggcgagatcgaccaggccagcgaggagaagaagagactggaggagaagcagagagccgccagaaagaacagaagcaagagcgaggaggactggaagaccagatggttccaccagggccccaacccctacaacggcgcccaggactggatctacagcggcagctactgggacagaaactacttcaacctgcccgacatctactag

SEQ ID NO: 231500 - protein, 425 aa, Artificial Sequence
  derived and/or modified sequence
MAENDVDNELLDYEDDEVETAAGGDGAEAPAKKDVKGSYVSIHSSGFRDFLLKPELLRAIVDCGFEHPSEVQHECIPQAILGMDVLCQAKSGMGKTAVFVLATLQQLEPVTGQVSVLVMCHTRELAFQISKEYERFSKYMPNVKVAVFFGGLSIKKDEEVLKKNCPHIVVGTPGRILALARNKSLNLKHIKHFILDECDKMLEQLDMRRDVQEIFRMTPHEKQVMMFSATLSKEIRPVCRKFMQDPMEIFVDDETKLTLHGLQQYYVKLKDNEKNRKLFDLLDVLEFNQVVIFVKSVQRCIALAQLLVEQNFPAIAIHRGMPQEERLSRYQQFKDFQRRILVATNLFGRGMDIERVNIAFNYDMPEDSDTYLHRCYPLSPSRWPEQAGLAPRAWLSHLCPMRMMPRSSMMCRIALRSILVSCLMR

SEQ ID NO: 231501 - protein, 428 aa, Artificial Sequence
  derived and/or modified sequence
MAENDVDNELLDYEDDEVETAAGGDGAEAPAKKDVKGSYVSIHSSGFRDFLLKPELLRAIVDCGFEHPSEVQHECIPQAILGMDVLCQAKSGMGKTAVFVLATLQQLEPVTGQVSVLVMCHTRELAFQISKEYERFSKYMPNVKVAVFFGGLSIKKDEEVLKKNCPHIVVGTPGRILALARNKSLNLKHIKHFILDECDKMLEQLDMRRDVQEIFRMTPHEKQVMMFSATLSKEIRPVCRKFMQDPMEIFVDDETKLTLHGLQQYYVKLKDNEKNRKLFDLLDVLEFNQVVIFVKSVQRCIALAQLLVEQNFPAIAIHRGMPQEERLSRYQQFKDFQRRILVATNLFGRGMDIERVNIAFNYDMPEDSDTYLHRVARAGRFGTKGLAITFVSDENDAKILNDVQDRFEVNISELPDEIDISSYIEQTR

SEQ ID NO: 231502 - protein, 187 aa, Artificial Sequence
  derived and/or modified sequence
MGSSHIGGLSINERRCSASLGLVMAENDVDNELLDYEDDEVETAAGGDGAEAPAKKDVKGSYVSIHSSGFRDFLLKPELLRAIVDCGFEHPSEVQHECIPQAILGMDVLCQAKSGMGKTAVFVLATLQQLEPVTGQVSVLVMCHTRELAFQISKEYERFSKYMPNVKVAVFFGGLSIKKDEEVLKKN

SEQ ID NO: 231503 - protein, 125 aa, Artificial Sequence
  derived and/or modified sequence
MAENDVDNELLDYEDDEVETAAGGDGAEAPAKKDVKGSYVSIHSSGFRDFLLKPELLRAIVDCGFEHPSEVQHECIPQAILGMDVLCQAKSGMGKTAVFVLATLQQLEPVTGQVSVLVMCHTREL

SEQ ID NO: 231504 - protein, 187 aa, Artificial Sequence
  derived and/or modified sequence
  misc_feature (1)..(1): Xaa can be any naturally occurring amino acid
XSEERDIGKPMEIFVDDETKLTLHGLQQYYVKLKDNEKNRKLFDLLDVLEFNQVVIFVKSVQRCIALAQLLVEQNFPAIAIHRGMPQEERLSRYQQFKDFQRRILVATNLFGRGMDIERVNIAFNYDMPEDSDTYLHRVARAGRFGTKGLAITFVSDENDAKILNDVQDRFEVNISELPDEIDISSY

SEQ ID NO: 231505 - protein, 289 aa, Artificial Sequence
  derived and/or modified sequence
MAENDVDNELLDYEDDEVETAAGGDGAEAPAKKDVKGSYVSIHSSGFRDFLLKPELLRAIVDCGFEHPSEVQHECIPQAILGMDVLCQAKSGMGKTAVFVLATLQQLEPVTGQVSVLVMCHTRELAFQISKEYERFSKYMPNVKVAVFFGGLSIKKDEEVLKKNCPHIVVGTPGRILALARNKSLNLKHIKHFILDECDKMLEQLDMRRDVQEIFRMTPHEKQVMMFSATLSKEIRPVCRKFMQDPMEIFVDDETKLTLHGLQQYYVKLKDNEKNRKLFDLLDVLEFNQ

SEQ ID NO: 231506 - protein, 96 aa, Artificial Sequence
  derived and/or modified sequence
MAENDVDNELLDYEDDEVETAAGGDGAEAPAKKDVKGSYVSIHSSGFRDFLLKPELLRAIVDCGFEHPSEVQHECIPQAILGMDVLCQAKSGMGKT

SEQ ID NO: 231507 - protein, 231 aa, Artificial Sequence
  derived and/or modified sequence
MAENDVDNELLDYEDDEVETAAGGDGAEAPAKKDVKGSYVSIHSSGFRDFLLKPELLRAIVDCGFEHPSEVQHECIPQAILGMDVLCQAKSGMGKTAVFVLATLQQLEPVTGQVSVLVMCHTRELAFQISKEYERFSKYMPNVKVAVFFGGLSIKKDEEVLKKNCPHIVVGTPGRILALARNKSLNLKHIKHFILDECDKMLEQLDMRRDVQEIFRMTPHEKQVMMFSATL

SEQ ID NO: 231508 - protein, 132 aa, Artificial Sequence
  derived and/or modified sequence
MAENDVDNELLDYEDDEVETAAGGDGAEAPAKKDVKGSYVSIHSSGFRDFLLKPELLRAIVDCGFEHPSEVQHECIPQAILGMDVLCQAKSGMGKTAVFVLATLQQLEPVTGQVCFCDSHFPRGDNEELHLP

SEQ ID NO: 231509 - protein, 350 aa, Artificial Sequence
  derived and/or modified sequence
MWTMSSWTMKMMRWRQQLGEMGLRPLPRRMSRAPMSPSTALAFVTSCSSQSCSGPLSTVALSIRQKVAVFFGGLSIKKDEEVLKKNCPHIVVGTPGRILALARNKSLNLKHIKHFILDECDKMLEQLDMRRDVQEIFRMTPHEKQVMMFSATLSKEIRPVCRKFMQDPMEIFVDDETKLTLHGLQQYYVKLKDNEKNRKLFDLLDVLEFNQVVIFVKSVQRCIALAQLLVEQNFPAIAIHRGMPQEERLSRYQQFKDFQRRILVATNLFGRGMDIERVNIAFNYDMPEDSDTYLHRVARAGRFGTKGLAITFVSDENDAKILNDVQDRFEVNISELPDEIDISSYIEQTR

SEQ ID NO: 231510 - protein, 245 aa, Artificial Sequence
  derived and/or modified sequence
MWTMSSWTMKMMRWRQQLGEMGLRPLPRRMSRAPMSPSTALAFVTSCSSQSCSGPLSTVALSIRQKVAVFFGGLSIKKDEEVLKKNCPHIVVGTPGRILALARNKSLNLKHIKHFILDECDKMLEQLDMRRDVQEIFRMTPHEKQVMMFSATLSKEIRPVCRKFMQDPMEIFVDDETKLTLHGLQQYYVKLKDNEKNRKLFDLLDVLEFNQVVIFVKSVQRCIALAQLLVEQNFPAIAIHRGMPQ

SEQ ID NO: 231511 - protein, 136 aa, Artificial Sequence
  derived and/or modified sequence
MGGGRRPYDVFFSKVMAENDVDNELLDYEDDEVETAAGGDGAEAPAKKDVKGSYVSIHSSGFRDFLLKPELLRAIVDCGFEHPSEVQHECIPQAILGMDVLCQAKSGMGKTAVFVLATLQQLEPVTGQVSVLVMCH

SEQ ID NO: 231512 - protein, 197 aa, Artificial Sequence
  derived and/or modified sequence
MAENDVDNELLDYEDDEVETAAGGDGAEAPAKKDVKGSYVSIHSSGFRDFLLKPELLRAIVDCGFEHPSEVQHECIPQAILGMDVLCQAKSGMGKTAVFVLATLQQLEPVTGQVCFCDSHFPRGDNEELHLPYVSVYFLPKVSVLVMCHTRELAFQISKEYERFSKYMPNVKVAVFFGGLSIKKDEEVLKKNCPHIV

SEQ ID NO: 231513 - protein, 189 aa, Artificial Sequence
  derived and/or modified sequence
  misc_feature (1)..(1): Xaa can be any naturally occurring amino acid
XATLQQLEPVTGQVSVLVMCHTRELAFQISKEYERFSKYMPNVKVAVFFGGLSIKKDEEVLKKNCPHIVVGTPGRILALARNKSLNLKHIKHFILDECDKMLEQLDMRRDVQEIFRMTPHEKQVMMFSATLSKEIRPVCRKFMQDPMEIFVDDETKLTLHGLQQYYVKLKDNEKNRKLFDLLDVLEFNQ

SEQ ID NO: 231514 - protein, 236 aa, Artificial Sequence
  derived and/or modified sequence
MAENDVDNELLDYEDDEVETAAGGDGAEAPAKKDVKGSYVSIHSSGFRDFLLKPELLRAIVDCGFEHPSEVQHECIPQAILGMDVLCQAKSGMGKTAVFVLATLQQLEPVTGQVSVLVMCHTRELAFQISKEYERFSKYMPNVKVAVFFGGLSIKKDEEVLKKNCPHIVVGTPGRILALARNKSLNLKHIKHFILDECDKMLEQLDMRRDVQEIFRMTPHEKQVMMFSATLSKEIR

SEQ ID NO: 231515 - protein, 187 aa, Artificial Sequence
  derived and/or modified sequence
MGSSHIGGLSINERRRSASLGLVMAENDVDNELLDYEDDEVETAAGGDGAEAPAKKDVKGSYVSIHSSGFRDFLLKPELLRAIVDCGFEHPSEVQHECIPQAILGMDVLCQAKSGMGKTAVFVLATLQQLEPVTGQVSVLVMCHTRELAFQISKEYERFSKYMPNVKVAVFFGGLSIKKDEEVLKKN

SEQ ID NO: 231516 - protein, 443 aa, Artificial Sequence
  derived and/or modified sequence
MAENDVDNELLDYEDDEVETAAGGDGAEAPAKKDVKGSYVSIHSSGFRDFLLKPELLRAIVDCGFEHPSEVQHECIPQAILGMDVLCQAKSGMGKTAVFVLATLQQLEPVTGQVYLGRVLGRGFWCVFVSVLVMCHTRELAFQISKEYERFSKYMPNVKVAVFFGGLSIKKDEEVLKKNCPHIVVGTPGRILALARNKSLNLKHIKHFILDECDKMLEQLDMRRDVQEIFRMTPHEKQVMMFSATLSKEIRPVCRKFMQDPMEIFVDDETKLTLHGLQQYYVKLKDNEKNRKLFDLLDVLEFNQVVIFVKSVQRCIALAQLLVEQNFPAIAIHRGMPQEERLSRYQQFKDFQRRILVATNLFGRGMDIERVNIAFNYDMPEDSDTYLHRVARAGRFGTKGLAITFVSDENDAKILNDVQDRFEVNISELPDEIDISSYIEQTR

SEQ ID NO: 231517 - protein, 328 aa, Artificial Sequence
  derived and/or modified sequence
  misc_feature (1)..(1): Xaa can be any naturally occurring amino acid
XATLQQLEPVTGQVSVLVMCHTRELAFQISKEYERFSKYMPNVKVAVFFGGLSIKKDEEVLKKNCPHIVVGTPGRILALARNKSLNLKHIKHFILDECDKMLEQLDMRRDVQEIFRMTPHEKQVMMFSATLSKEIRPVCRKFMQDPMEIFVDDETKLTLHGLQQYYVKLKDNEKNRKLFDLLDVLEFNQVVIFVKSVQRCIALAQLLVEQNFPAIAIHRGMPQEERLSRYQQFKDFQRRILVATNLFGRGMDIERVNIAFNYDMPEDSDTYLHRVARAGRFGTKGLAITFVSDENDAKILNDVQDRFEVNISELPDEIDISSYIEQTR

SEQ ID NO: 231518 - protein, 131 aa, Artificial Sequence
  derived and/or modified sequence
  misc_feature (1)..(1): Xaa can be any naturally occurring amino acid
XATLQQLEPVTGQVSVLVMCHTRELAFQISKEYERFSKYMPNVKVAVFFGGLSIKKDEEVLKKNCPHIVVGTPGRILALARNKSLNLKHIKHFILDECDKMLEQLDMRRDVQEIFRMTPHEKQVMMFSATL

SEQ ID NO: 231519 - protein, 136 aa, Artificial Sequence
  derived and/or modified sequence
  misc_feature (1)..(1): Xaa can be any naturally occurring amino acid
XATLQQLEPVTGQVSVLVMCHTRELAFQISKEYERFSKYMPNVKVAVFFGGLSIKKDEEVLKKNCPHIVVGTPGRILALARNKSLNLKHIKHFILDECDKMLEQLDMRRDVQEIFRMTPHEKQVMMFSATLSKEIR

SEQ ID NO: 231520 - protein, 238 aa, Artificial Sequence
  derived and/or modified sequence
MAENDVDNELLDYEDDEVETAAGGDGAEAPAKKDVKGSYVSIHSSGFRDFLLKPELLRAIVDCGFEHPSEVQHECIPQAILGMDVLCQAKSGMGKTAVFVLATLQQLEPVTGQVSVLVMCHTRELAFQISKEYERFSKYMPNVKVAVFFGGLSIKKDEEVLKKNCPHIVVGTPGRILALARNKSLNLKHIKHFILDECDKMLEQLDMRRDVQEIFRMTPHEKQVMMFSATLSKEIRPV

SEQ ID NO: 231521 - protein, 179 aa, Artificial Sequence
  derived and/or modified sequence
VAVFFGGLSIKKDEEVLKKNCPHIVVGTPGRILALARNKSLNLKHIKHFILDECDKMLEQLDMRRDVQEIFRMTPHEKQVMMFSATLSKEIRPVCRKFMQDPMEIFVDDETKLTLHGLQQYYVKLKDNEKNRKLFDLLDVLEFNQVVIFVKSVQRCIALAQLLVEQNFPAIAIHRGMPQ

SEQ ID NO: 231522 - protein, 64 aa, Artificial Sequence
  derived and/or modified sequence
  misc_feature (1)..(1): Xaa can be any naturally occurring amino acid
XATLQQLEPVTGQVSVLVMCHTRELAFQISKEYERFSKYMPNVKVAVFFGGLSIKKDEEVLKKN

SEQ ID NO: 231523 - protein, 25 aa, Artificial Sequence
  derived and/or modified sequence
  misc_feature (1)..(1): Xaa can be any naturally occurring amino acid
XATLQQLEPVTGQVSVLVMCHTREL

SEQ ID NO: 231524 - protein, 21 aa, Artificial Sequence
  derived and/or modified sequence
  misc_feature (1)..(1): Xaa can be any naturally occurring amino acid
XATLQQLEPVTGQVSVLVMCH

SEQ ID NO: 231525 - protein, 325 aa, Artificial Sequence
  derived and/or modified sequence
  misc_feature (1)..(1): Xaa can be any naturally occurring amino acid
XATLQQLEPVTGQVSVLVMCHTRELAFQISKEYERFSKYMPNVKVAVFFGGLSIKKDEEVLKKNCPHIVVGTPGRILALARNKSLNLKHIKHFILDECDKMLEQLDMRRDVQEIFRMTPHEKQVMMFSATLSKEIRPVCRKFMQDPMEIFVDDETKLTLHGLQQYYVKLKDNEKNRKLFDLLDVLEFNQVVIFVKSVQRCIALAQLLVEQNFPAIAIHRGMPQEERLSRYQQFKDFQRRILVATNLFGRGMDIERVNIAFNYDMPEDSDTYLHRCYPLSPSRWPEQAGLAPRAWLSHLCPMRMMPRSSMMCRIALRSILVSCLMR

SEQ ID NO: 231526 - protein, 139 aa, Artificial Sequence
  derived and/or modified sequence
MAENDVDNELLDYEDDEVETAAGGDGAEAPAKKDVKGSYVSIHSSGFRDFLLKPELLRAIVDCGFEHPSEVQHECIPQAILGMDVLCQAKSGMGKTAVFVLATLQQLEPVTGQSHEHMTSVTLDNLTAVGDVLSQAWGS

SEQ ID NO: 231527 - protein, 243 aa, Artificial Sequence
  derived and/or modified sequence
MWTMSSWTMKMMRWRQQLGEMGLRPLPRRMSRAPMSPSTALAFVTSCSSQSCSGPLSTVALSIRQKVSVLVMCHTRELAFQISKEYERFSKYMPNVKVAVFFGGLSIKKDEEVLKKNCPHIVVGTPGRILALARNKSLNLKHIKHFILDECDKMLEQLDMRRDVQEIFRMTPHEKQVMMFSATLSKEIRPVCRKFMQDVNTLLPSLPPLPARCLLPFLALFLRLPCHSSAKKAACAQLGVMTP

SEQ ID NO: 231528 - protein, 138 aa, Artificial Sequence
  derived and/or modified sequence
  misc_feature (1)..(1): Xaa can be any naturally occurring amino acid
XATLQQLEPVTGQVSVLVMCHTRELAFQISKEYERFSKYMPNVKVAVFFGGLSIKKDEEVLKKNCPHIVVGTPGRILALARNKSLNLKHIKHFILDECDKMLEQLDMRRDVQEIFRMTPHEKQVMMFSATLSKEIRPV

SEQ ID NO: 231529 - protein, 97 aa, Artificial Sequence
  derived and/or modified sequence
  misc_feature (1)..(1): Xaa can be any naturally occurring amino acid
XATLQQLEPVTGQVCFCDSHFPRGDNEELHLPYVSVYFLPKVSVLVMCHTRELAFQISKEYERFSKYMPNVKVAVFFGGLSIKKDEEVLKKNCPHIV

SEQ ID NO: 231530 - protein, 323 aa, Artificial Sequence
  derived and/or modified sequence
MAENDVDNELLDYEDDEVETAAGGDGAEAPAKKDVKGSYVSIHSSGFRDFLLKPELLRAIVDCGFEHPSEVQHECIPQAILGMDVLCQAKSGMGKTAVFVLATLQQLEPVTGQVSVLVMCHTRELAFQISKEYERFSKYMPNVKVAVFFGGLSIKKDEEVLKKNCPHIVVGTPGRILALARNKSLNLKHIKHFILDECDKMLEQLDMRRDVQEIFRMTPHEKQVMMFSATLSKEIRPVCRKFMQDPMEIFVDDETKLTLHGLQQYYVKLKDNEKNRKLFDLLDVLEFNQEITCKSVQRFSTTNSCGYQPIWPRHGHRAGEHCF

SEQ ID NO: 231531 - protein, 183 aa, Artificial Sequence
  derived and/or modified sequence
MEIFVDDETKLTLHGLQQYYVKLKDNEKNRKLFDLLDVLEFNQVVIFVKSVQRCIALAQLLVEQNFPAIAIHRGMPQEERWLSRYQQFKDFQRRILVATNLFGRGMDIERVNIAFNYDMPEDSDTYLHRVARAGRFGTKGLAITFVSDENDAKILNDVQDRFEVNISELPDEIDISSYIEQTR

SEQ ID NO: 231532 - DNA, 1278 bp, Artificial Sequence
  derived and/or modified sequence
atggccgaaaatgacgttgacaacgagctcttggactatgaagacgacgaagtggaaactgctgctgggggggacggagccgaggctcctgccaaaaaggacgtgaaaggcagttacgtcagtattcactccagcggatttcgcgatttcctcctgaaacctgagttgcttcgtgcaatagttgactgtgggttcgaacatccatccgaagtccagcacgagtgtattcctcaggcaatcctgggcatggatgtgctgtgccaggccaaatcaggaatgggcaaaacagcggttttcgtactggctacgctccagcagcttgaacccgttactggccaggtaagcgttctcgtgatgtgtcacacaagagagctcgcttttcaaatcagcaaagaatatgagaggttcagcaaatacatgcccaatgtgaaggttgcggtcttctttggagggctcagcattaagaaggatgaggaggtcctgaaaaagaactgtcctcacattgtggtgggcacccctggtaggattcttgcacttgccagaaataagagtctcaacctgaagcatatcaaacactttatccttgacgagtgcgacaagatgttagagcagctggatatgagaagagacgttcaggaaatattccgtatgaccccgcatgaaaagcaggtgatgatgttcagcgctaccctctctaaggaaatcagacccgtctgcaggaaattcatgcaagaccctatggaaatttttgtggacgacgagaccaaacttaccctgcatggcctgcaacagtattacgtgaagcttaaggacaacgaaaagaacaggaaactgtttgacctcctggatgtgctggagttcaatcaggtggtgatcttcgtaaagtctgtgcagcgttgtatcgcattggcccagctcctggttgaacaaaattttcctgccatagctatccaccgcggcatgccccaagaggaaagactgtctcggtatcagcaattcaaagactttcagcgcaggatactggtggccactaacttatttggaaggggcatggacatcgagcgagtcaatatagcattcaactatgacatgcccgaggattccgatacctacttacaccgctgttatccactcagcccgtcgcggtggccagaacaggcgggcctcgccccccgagcatggctgtcacacctatgcccaatgcggatgatgccccgatcatctatgatgtgtcgcatcgcactgaggagcatcctggtgtcatgcttaatgcgatag

SEQ ID NO: 231533 - DNA, 1287 bp, Artificial Sequence
  derived and/or modified sequence
atggccgaaaacgacgtcgacaacgagttgcttgattacgaagacgacgaggtggaaacagcagctggcggagatggagctgaagcaccagccaaaaaggatgtgaaaggctcgtatgttagcattcatagtagcgggttccgcgactttcttttaaagcctgagctgctgagggctattgtggactgcggtttcgaacacccttctgaagtgcagcacgagtgtattccacaggctatcctgggtatggacgtgctctgtcaagcaaaatccggcatggggaaaactgccgtgtttgtcctggcaacacttcagcagcttgagccagtgacaggccaggtctccgttctggttatgtgccatacccgggagctagcattccaaatatctaaagagtacgagcgctttagcaagtacatgccaaacgtcaaagttgcggtcttcttcggcggcttgagtatcaagaaggatgaggaagtgctaaagaaaaactgtccacatatagtggtgggcactcccggacggatattggccctggcgagaaataaatctctgaacttgaaacacattaagcacttcatcctggacgaatgcgataagatgctcgaacaattggacatgcgacgggacgtgcaagaaatcttccggatgactccccacgagaagcaggtgatgatgttttctgcaacgctgtctaaagagatccgtcctgtatgcagaaaattcatgcaggatcccatggaaatctttgtggacgatgagaccaagctgactctgcacggccttcagcagtactatgttaagcttaaagataacgagaaaaatcgcaagctgttcgacctcctggacgtcttggaattcaatcaggttgtgatctttgtcaagtccgtccagagatgtatagcactcgcccagttattggtggaacagaactttcctgcaatagctatccatcggggcatgcctcaagaggagaggctatcccggtatcagcagtttaaggacttccagaggcggatcttagtcgctaccaacctgttcggccgcggcatggacattgagagggtcaatatcgcatttaactacgatatgccggaagactcagatacctacctgcacagagtggcacgggcaggacggttcggcacgaaaggactagcgatcacttttgtctccgacgaaaatgatgccaaaatattaaatgatgtgcaggacagatttgaagtgaatatttccgagctgccagatgaaatcgacatcagttcctacattgaacagacacgatag

SEQ ID NO: 231534 - DNA, 1287 bp, Artificial Sequence
  derived and/or modified sequence
atggctgagaacgatgtggacaatgagctcctggattacgaggacgacgaagtggagaccgcagccgggggtgacggggcggaggctcccgcaaagaaggatgtgaagggcagctacgtgagcatacacagctcaggtttcagagacttcctgctgaagcccgaactcctccgtgccatcgtcgattgcggcttcgaacacccctccgaagtccagcacgagtgcattccccaggctatcctgggcatggatgtgctgtgtcaggccaagtctggaatgggtaaaactgcagtgttcgtactggccaccctgcagcaactggagcctgtaactggacaggtgtccgttcttgtcatgtgccacacccgagagctggccttccaaatctctaaagagtacgagcggttcagcaaatacatgcccaatgttaaggtagcagtgttcttcggcgggctgagtattaagaaggacgaggaggttctcaaaaagaattgccctcatatcgtcgtggggacacctggccgaattctggccctcgcgaggaacaaatcactgaacttaaaacatattaaacattttattttggatgagtgtgataagatgttggagcagctcgatatgcgacgtgacgtacaggagatctttcgcatgactcctcacgagaagcaggtcatgatgtttagcgccacactgtccaaagaaattcggcctgtctgccgaaagttcatgcaggacccaatggaaatttttgtagacgacgagacaaagctcaccctgcatggtcttcagcagtactatgtcaaattaaaagataacgaaaagaaccgcaagctgttcgacctgttagatgtgctggagttcaaccaggtcgtgatatttgttaaatccgtgcagcgatgtattgctctggcccagctgctcgtggaacagaattttcccgcaattgcgattcacagagggatgccccaggaagaacggctatcccgatatcagcagtttaaagatttccagcgccggatcctggtcgccacaaacctattcggtagggggatggatattgaaagagtgaacatcgcttttaattatgacatgccagaggacagtgatacatacctccaccgagtcgcaagggccggaagattcggtacaaagggtcttgctatcacctttgtttctgatgagaatgatgctaaaatcctgaacgacgtgcaggaccgcttcgaagtcaacattagtgagctgccagacgaaatagatatctcatcgtatatcgaacaaacccgctag

SEQ ID NO: 231535 - DNA, 1278 bp, Artificial Sequence
  derived and/or modified sequence
atggcggagaacgacgtcgacaatgaactgttagactatgaggacgatgaggtagagactgctgcaggaggggatggggctgaggctccggcaaaaaaggacgttaaggggtcatatgtgtccatccacagcagcggttttagggacttcttgcttaaacctgagcttttgcgcgccattgtcgactgtggattcgagcacccatccgaagtacagcatgaatgtatccctcaggccatactgggcatggatgtgctgtgccaggctaagtccggaatgggaaaaacggcagtgttcgtacttgccactctgcaacagctggaacccgtgacagggcaagtgagtgtactggtcatgtgccatacaagagagcttgcctttcagatctctaaggagtacgagaggttttccaaatacatgcctaacgtgaaggtggccgtattcttcggtggattaagcatcaagaaggacgaggaagttttgaaaaagaattgtcctcacatcgtagtagggactcctggtcgcatcctcgccttggctaggaataagtccctgaatttgaagcatatcaagcacttcattttggacgaatgcgataaaatgttggaacagttagacatgcgcagagacgtgcaagagattttccgcatgaccccccatgagaaacaggtgatgatgttttctgcaaccctgtccaaggaaattcgcccggtgtgtcgcaagttcatgcaggatcctatggaaatttttgtggatgacgagacaaagctgaccctacatggtctgcagcaatattacgtgaagctgaaagataacgagaaaaatagaaagcttttcgatctgcttgacgtactggagtttaaccaggtggtgattttcgtgaaatccgtacagcgttgcattgccctagcccagctactggtagaacagaattttccagctatcgcaatccacagagggatgcctcaagaggagcgcctgtcccgctaccaacaattcaaagactttcagcgcaggattctggttgctaccaacctgttcggccgggggatggatatagaaagagtcaatattgctttcaactatgatatgccagaagatagtgacacctatctgcaccgctgctaccctctgagtccatcacgttggccggagcaggcaggtctggcccctcgcgcgtggctatctcatctctgtcctatgcggatgatgcccaggagttccatgatgtgccgcattgcccttaggtccatcctggtatcctgtctcatgagatag

SEQ ID NO: 231536 - DNA, 1287 bp, Artificial Sequence
  derived and/or modified sequence
atggcagagaacgacgtcgacaatgagctgctggactacgaggacgatgaggtcgagacagccgccggtggagatggagcagaggcaccagcaaagaaagacgtgaagggctcatacgtctccatacattcctcgggctttagagacttcctattaaagcccgaattactgcgggcgatcgtggattgtggctttgaacatcctagcgaggtgcagcatgaatgtatccctcaggcaatacttgggatggatgtgctctgtcaggcgaaatcaggaatgggaaagacagcagtattcgtcctggcaaccctacagcagctcgagcccgtgaccgggcaggtgtccgtcttggtgatgtgtcacacccgtgagctggcgttccagattagcaaagaatatgagcgcttttctaagtacatgcctaatgtaaaagtggctgttttttttggtggcctttcaatcaaaaaagacgaagaagtgctgaaaaagaattgcccacacatcgtagtggggaccccaggacggatcctcgctctggctcggaacaagagtctgaatcttaaacacatcaagcatttcattctagacgagtgtgacaagatgctcgaacaattggacatgcgcagggatgtgcaggaaatctttagaatgacaccacatgagaaacaggtaatgatgttttccgccacactgagcaaagaaataaggccagtctgccgcaagtttatgcaggaccccatggaaatcttcgttgacgatgagaccaaactgactttgcacgggctccagcagtattacgtcaaattgaaggataatgaaaaaaacagaaaactctttgatctcctggacgtcctcgaattcaatcaggtagttatctttgtcaagagcgttcagcggtgcattgcactggcacagttattagttgagcaaaactttcctgccatcgccatccatcgggggatgccacaggaggagagactctctcggtatcaacagtttaaggattttcaacgaagaatactcgtggccaccaatcttttcggccggggaatggatatcgaaagagttaacatagcgtttaactacgacatgcctgaagactctgatacttacttgcatcgtgttgccagggccggaaggttcgggacaaagggcctggctattacattcgtgtccgacgagaacgatgccaaaattttaaacgacgtgcaggacagattcgaggtcaacatcagcgagctgccagatgagatcgacatctcatcctacattgaacagactcgatag

SEQ ID NO: 231537 - DNA, 1287 bp, Artificial Sequence
  derived and/or modified sequence
atggcagagaacgacgtcgataacgagcttctcgactacgaggacgacgaggtggaaaccgccgccggcggtgacggtgctgaagccccagctaagaaagatgtgaagggttcctatgtttccatacattcttccggcttcagagatttcctgcttaagcctgaactgctgagggcaattgtcgattgcgggttcgagcacccatccgaggtccagcacgagtgcatcccacaggccattttaggcatggatgttctttgccaggcaaagtccgggatgggaaagactgcggtgttcgtcctggccactcttcagcagctcgaacccgtgactggtcaggtatctgtgctcgtgatgtgccacacacgggagctggcctttcagatctcaaaagagtatgagcgcttcagtaaatacatgccgaacgttaaggtggccgttttcttcggcggtctgtccattaaaaaggacgaagaagtcttgaagaaaaactgtccccacattgtggttggcacacctggtcgtattctggccctggctaggaacaagagtctcaacctgaaacacatcaagcatttcatcttggatgagtgtgacaaaatgctggaacaactcgatatgcgccgcgacgtgcaggagatatttcgtatgacgcctcacgaaaagcaggtaatgatgttctccgcgacattgtccaaagaaattcgcccagtgtgtaggaagttcatgcaggaccccatggaaattttcgtagacgacgagaccaaactgacccttcatggacttcaacagtactatgtgaaactgaaagataatgagaagaaccggaaactttttgacctgttggatgtcctcgagtttaaccaggtcgtaatcttcgtgaaatcagtgcaaagatgcatcgcactggcccaactgttggtggagcagaacttccctgcgattgctatccatagaggaatgccacaggaggagcgtctgtccaggtatcagcaattcaaagattttcagaggagaatcctcgtagctaccaatctgtttgggcgcggaatggacattgagagagtcaacattgcgtttaattacgacatgcctgaggattccgacacatacttacacagggtggccagggcaggacgtttcgggacaaagggcttggctatcacattcgtctctgatgagaacgatgcaaaaattttgaatgatgtccaggatcgattcgaggtgaacatctcggagctcccggatgagattgacatcagctcctacatagagcagactcggtag

SEQ ID NO: 231538 - DNA, 564 bp, Artificial Sequence
  derived and/or modified sequence
atgggcagctctcatatcggagggctcagtataaatgaacgacgatgctcagcgagcttgggcctggttatggccgaaaacgatgtagacaacgagctgttagattacgaagacgatgaggtcgagaccgcagcaggaggcgatggtgcagaagcacctgccaaaaaagacgttaaggggagctatgtgagtattcactcttcgggctttagggacttccttctcaaacctgagttgttgcgcgcgatcgtggattgcggatttgaacatccttctgaagtccagcacgaatgcatcccgcaagcaatactgggcatggatgtcctatgtcaggcgaaatccggaatgggaaagacagccgtgttcgtcctggccaccttacaacaactggaaccagtgacagggcaggtgtctgtcctagttatgtgtcatactagagagctggcctttcagatctcaaaagaatatgagaggttctctaagtacatgcccaatgtcaaggtcgcagtgttcttcggtggccttagcattaaaaaggatgaagaggttctgaaaaagaattag

SEQ ID NO: 231539 - DNA, 1287 bp, Artificial Sequence
  derived and/or modified sequence
atggcggagaatgatgttgataatgagctgctcgattacgaagacgatgaagtcgagacggcagcaggaggagatggcgcagaagcaccagccaaaaaggacgtgaagggcagctacgtgagtatccattcttcaggattcagagacttcctcctgaagccagaacttttacgagcaatagtggattgcggctttgaacaccccagcgaggttcaacacgagtgcataccccaggccatcttggggatggacgtcctgtgccaagcaaagtctgggatgggaaagactgcagtgtttgtgctcgccacactgcaacaactggagcccgttaccggccaagtctccgtgctggttatgtgtcacaccagggaactcgctttccagatatccaaggaatacgaacggttcagcaaatacatgcctaatgtgaaggttgctgtcttctttggtgggctcagcatcaagaaggacgaagaagtgttaaaaaagaactgtcctcatattgtcgtaggcacgcctgggcgcatccttgccctcgcccgcaataagagcctcaatctgaaacacatcaaacacttcatcctggatgagtgcgacaagatgctagagcaactggacatgaggcgagatgtgcaagagatcttcagaatgacgccccatgaaaaacaggttatgatgttttccgccaccctgtctaaggagattagacccgtctgccggaagttcatgcaagatccaatggagatatttgtggatgatgagacaaagctgaccctgcacgggctacagcaatattacgtgaagctgaaggataacgagaaaaatcgcaagcttttcgatttgctcgacgtgcttgagttcaaccaagtggtgattttcgtgaagagcgtgcagaggtgcattgctctagctcagctgctggtcgaacagaattttcctgcaatcgcaatccatcgggggatgcctcaggaagaaagattgagccgataccagcagtttaaggacttccagcgaaggatcctagttgccaccaacctgttcggacgtgggatggacattgaacgggttaatatagctttcaactatgacatgccagaggatagtgatacctacttgcatcgcgtggctcgggcagggcgcttcggtaccaagggtctggcgataacattcgtgtctgacgaaaacgatgcgaagatcctcaatgacgtacaggacagatttgaggtgaatatttccgaattgcccgatgagatagacatcagcagttacatcgaacaaactcggtag

SEQ ID NO: 231540 - DNA, 378 bp, Artificial Sequence
  derived and/or modified sequence
atggccgaaaacgacgtcgataacgagctgctggactacgaggatgacgaggtcgaaacagccgccggcggtgacggagcggaggcccccgcgaagaaggatgtgaagggtagctacgtcagcattcattcctccggatttagagacttcctactgaagccagaactgctgcgcgctatcgtggattgtggttttgagcacccttctgaggtgcagcatgagtgtatacctcaggcgatactggggatggatgtgctttgccaagccaagtctgggatgggcaagaccgctgtattcgtactggccacgctgcaacagttggagcctgttaccggacaggtgagtgtgcttgtcatgtgtcatacacgggagctgtag

SEQ ID NO: 231541 - DNA, 1287 bp, Artificial Sequence
  derived and/or modified sequence
atggcagaaaacgatgtggataacgagctgctggactatgaagatgatgaagtggagacagccgctggaggcgacggggctgaggctccggccaaaaaagacgtgaaaggctcctacgtgtccatccactccagcgggttcagagatttccttctcaaaccggaactactgcgggcaattgtcgactgtggcttcgaacacccatccgaggtccagcatgagtgcattccgcaagccatcttaggaatggatgtgttgtgccaagccaagagcggaatgggaaaaacggcagtgtttgtgcttgccaccctccagcagctagagcccgtgaccggtcaggttagtgtcctggtcatgtgccacacccgcgagctcgcatttcagatttccaaggagtacgagcgcttttctaagtatatgcccaacgtaaaggttgcagtgttttttggaggcctgagcatcaaaaaagatgaagaagtgctaaaaaagaattgcccgcacatagtagtgggtacccccggacggattctggcattagcccggaacaaaagtctgaatttaaagcatatcaaacacttcatcctggatgaatgcgataaaatgctggagcagcttgatatgcgccgcgacgtgcaggaaattttccgcatgaccccgcatgagaaacaggtgatgatgttttccgccaccctgtctaaggaaatcaggcccgtctgcaggaagttcatgcaagacccgatggagattttcgtggacgacgagaccaaattgaccctgcacggtctccagcagtattacgtcaagctgaaggacaacgagaaaaatcgcaaactctttgatctgctcgacgtactggaattcaatcaggtggtgattttcgtcaagtctgtccaaagatgtatagcactcgcccagctgctcgtggaacaaaacttccctgcaattgctatccatcggggaatgccgcaggaagaaaggctgagtcgctaccagcagttcaaagatttccagcgcaggatcttggtggcaacgaatctgttcggccggggaatggatatagaaagggttaacatcgcgtttaactacgatatgcccgaagattctgacacatatctacaccgagtagccagggctggccgtttcggcactaaagggcttgccattaccttcgtaagcgacgaaaatgacgccaaaatcttgaacgatgttcaagatcggttcgaggtcaacatttcggagctaccagacgagatcgacatcagttcgtacatcgagcaaacacgctag

SEQ ID NO: 231542 - DNA, 564 bp, Artificial Sequence
  derived and/or modified sequence
tgatctgaggagcgggatatcgggaagcccatggaaatcttcgtggatgacgaaactaagttgactctgcatggccttcagcagtactacgtgaagctgaaggataatgaaaaaaaccgtaagctgttcgacctcctcgacgtgcttgagttcaaccaggtagtgatctttgttaagtctgtgcaacgttgcatagcattggctcagctcctcgtggaacaaaatttccccgccatagccatccatcggggtatgccacaggaagaacgactgtcccggtaccagcagttcaaagattttcagcgacgcatcctggttgcgaccaacctttttggtcgaggcatggacatcgaaagagttaacattgcattcaactatgacatgccggaagattctgacacctatctgcaccgggtggccagggccggccgctttggaacaaagggactggcaataacattcgtgtccgacgaaaatgacgccaagatacttaacgacgtacaggatcgcttcgaagtcaacatttcggaattgcccgatgagatcgacatcagcagctattag

SEQ ID NO: 231543 - DNA, 378 bp, Artificial Sequence
  derived and/or modified sequence
atggccgaaaatgacgtggacaatgagttactggactacgaggacgacgaagtggaaacagctgctggcggagacggcgccgaagcgcccgcaaagaaggacgtgaaagggtcatatgtctctattcattccagcgggttccgggattttctgttaaaaccagagctgttgagagccattgtggactgtggcttcgagcatccctccgaagttcaacatgagtgcattccccaggctatccttggaatggatgtcctctgtcaggcgaagagcgggatgggcaaaacggcggtctttgtgctggccaccctgcagcagcttgagccagtgacaggtcaggtctccgtacttgtgatgtgccacacacgggaactttag

SEQ ID NO: 231544 - DNA, 1287 bp, Artificial Sequence
  derived and/or modified sequence
atggcagaaaatgatgtcgacaatgaattgctggactatgaggacgatgaggtcgaaacagccgccggaggcgatggtgccgaagcccccgccaaaaaggatgtcaaagggagttatgtcagtatacactcgtctggcttccgggacttcctgctgaagccagaattattgagggccatcgtggattgtgggttcgagcatccttcagaggtgcagcacgagtgcattcctcaagcaattttgggcatggacgtattatgtcaagccaaaagtgggatgggaaaaacagcagtcttcgtcctcgcaacactccaacaattagagcccgtgaccgggcaagtctcggtgcttgtcatgtgtcacacccgcgagctggccttccagatatcgaaggaatatgagcgtttcagcaagtatatgccaaatgtgaaagtggcagttttctttggcgggctatccataaaaaaggacgaggaggtactcaagaagaattgcccccatatcgtggtgggaaccccagggaggattttggctctggcacggaataagtcactgaacctgaaacatataaagcacttcattctggacgaatgcgataagatgcttgagcaactagatatgcgccgggacgttcaggagatctttcggatgacccctcacgagaaacaggtgatgatgttctcagccaccctttctaaagaaattcgcccggtgtgtagaaagtttatgcaggaccctatggagatcttcgtcgatgatgaaaccaagctgactcttcatgggctgcagcagtattacgttaagctcaaggataatgagaagaaccggaaactcttcgacctcttggatgtgctggagttcaaccaggttgtgatttttgtgaaaagcgtccaaaggtgtatagcgctggcgcagttgctcgtcgagcagaacttcccggctatagccatacatagaggaatgccgcaggaggagaggctctcacggtaccaacagttcaaagacttccagaggcgcatcttggtggcaacaaatctcttcggcaggggcatggacatagaaagagtgaacatagcttttaactacgatatgccagaggacagcgacacttacttgcatcgggtcgcgagagccggccggtttggaacgaaaggcctagcaattaccttcgtgtctgacgagaacgacgctaaaatcctgaacgacgttcaggataggtttgaagtgaacatttccgagctaccggacgaaatcgacatttcaagttatattgaacagactagatag

SEQ ID NO: 231545 - DNA, 870 bp, Artificial Sequence
  derived and/or modified sequence
atggctgagaacgatgtcgacaacgagctattggattacgaagacgacgaagtggaaactgccgctggcggagacggagctgaggccccagctaagaaggatgtgaaggggagctacgtcagcatccatagctcaggctttagagattttctgctgaaacccgaattactgcgcgcaatcgtggattgcggttttgaacacccctctgaggttcagcacgaatgtattcctcaggcaattttaggcatggatgtactgtgccaggccaagtctggtatgggcaagacagccgtgtttgtgctcgccactctgcagcagctggagccggttaccggccaggtgtcggttttagtgatgtgccacacgcgggagttagcttttcagatctctaaggaatatgagagattctctaagtatatgcctaatgtaaaggtagcggtcttttttggtggactttcgattaaaaaggacgaggaagtgctcaagaagaactgtccacatatagttgtggggactcccggtaggatactggccctggctagaaataaatctctgaatctgaagcacattaaacatttcattctggatgagtgtgataagatgcttgaacagctggacatgcgaagagacgtccaggagatattccggatgacgccccacgagaagcaggtcatgatgtttagtgctaccctgtctaaggaaattcggccggtgtgccgcaagtttatgcaggacccaatggagatcttcgtggacgacgagaccaaactgacactccatgggttacagcagtactacgtgaaactgaaagataacgaaaaaaaccgcaaactgttcgatcttcttgacgtgctcgaattcaatcagtag

SEQ ID NO: 231546 - DNA, 1287 bp, Artificial Sequence
  derived and/or modified sequence
atggcagaaaacgatgttgataacgagctgctggactatgaggatgatgaggtggaaacagcggccggtggggacggtgcagaggcacccgccaaaaaagatgtgaaagggagttatgttagcatccatagcagcgggtttagagattttctgctgaagccagagctactgcgtgctatcgtggattgtggctttgaacacccttcagaagtgcagcatgaatgcatccctcaggcgatacttgggatggacgttctttgccaggctaaatcaggaatgggtaaaaccgccgtgtttgtcctggccaccttgcagcagctcgagccagtgactggccaggtgagcgtacttgtcatgtgccacacacgcgagcttgccttccaaatcagcaaagaatatgaacgcttctccaaatatatgccaaacgtcaaggtggccgtgttctttggcggcttaagcataaaaaaagacgaagaagtcctgaaaaaaaactgcccccacatcgtggtggggactccaggccgcattttggctttggcccgcaacaagtctctaaaccttaagcacattaagcacttcattcttgacgagtgcgataaaatgttggaacaactggatatgaggagagacgtgcaggaaatctttagaatgaccccacacgagaaacaggtgatgatgttcagtgcaaccctctccaaagagatccgccccgtgtgtagaaaatttatgcaggatcccatggaaatcttcgtcgatgatgaaaccaagctgacacttcatggcctgcagcagtactatgtgaagttaaaagacaatgagaagaacagaaagctgtttgacctgttggatgtgcttgagttcaaccaggtggttatcttcgtcaagtccgtgcagcggtgtattgctctggcacaactgctggttgaacagaattttcctgcgatagctatacatcgggggatgccgcaggaagaaagattgagtcggtaccagcaattcaaggattttcagcggcgcattctggtggcaaccaacctttttggccgaggcatggacattgagagggtcaatatcgcttttaactatgacatgccagaggactcagatacgtacctccaccgagtggcacgcgctggacggttcggaacaaagggccttgccataacatttgtctcagacgaaaatgatgctaaaatccttaacgatgtgcaagacagattcgaggtgaatatcagtgaacttcccgatgaaatcgacatttctagctatattgaacagacccgatag

SEQ ID NO: 231547 - DNA, 291 bp, Artificial Sequence
  derived and/or modified sequence
atggccgagaacgatgtcgacaacgagctcctggattacgaggacgacgaagttgagacagctgctggcggtgatggcgctgaggcgcctgccaagaaagacgttaaaggctcctatgttagtattcatagctctggattccgcgatttcctgcttaagcctgaacttttgagagctattgttgattgtgggttcgaacatccaagcgaagtgcaacacgaatgcatcccccaggccatcctgggaatggacgtgctgtgtcaggccaagagtggtatggggaagacctag

SEQ ID NO: 231548 - DNA, 378 bp, Artificial Sequence
  derived and/or modified sequence
atggctgaaaatgacgttgacaacgagctgctggattacgaggacgacgaggttgagactgctgccggcggagatggcgccgaggcaccggctaagaaggatgtcaaaggctcttacgtgtctatacactcgtcagggttccgcgatttcctgcttaaacccgagctcctcagagcaatcgtggactgtggatttgagcatcccagtgaggtgcaacacgaatgcataccccaggcaattctgggtatggatgtgctgtgccaggccaaatccggaatgggcaaaaccgcagttttcgtgctcgccacactgcagcagctcgagcctgtgaccggccaggttagcgtgctagtcatgtgtcacacaagggaactgtag

SEQ ID NO: 231549 - DNA, 696 bp, Artificial Sequence
  derived and/or modified sequence
atggctgaaaatgacgtagacaacgagcttctggactatgaggacgacgaggtcgagaccgcagccgggggtgatggggcggaggcaccagccaagaaggatgttaaggggagctatgtgtcaatccactcctcggggtttcgagactttctcttgaaaccggagctgttgcgggctatagtggattgtggcttcgaacatccaagcgaggtgcaacatgagtgcattcctcaagcaatacttgggatggacgtgctgtgtcaggcgaaatctgggatgggtaagacggcagtgttcgttcttgctacactgcagcagcttgaaccagtcaccggccaggtttccgttcttgtgatgtgtcatacgcgcgagcttgccttccagatcagcaaagaatatgagcgcttcagtaagtacatgccaaacgtgaaggttgccgtgttctttggagggctatccatcaaaaaagatgaagaagtactcaagaagaattgcccacacatcgtggtcggcacgcccggaagaatcctggctctggcaaggaataagtcactgaatctgaagcacattaagcactttatcctggatgagtgcgacaaaatgctcgagcagttagatatgcggagggatgtgcaagaaattttccgtatgaccccgcacgaaaaacaagttatgatgttttcagcaacactgtag

SEQ ID NO: 231550 - DNA, 399 bp, Artificial Sequence
  derived and/or modified sequence
atggcggagaacgacgtggataacgagctattagactacgaggacgatgaggtggagactgccgctggcggggacggagctgaggcacccgcaaagaaggacgtcaaagggtcttatgtctctattcactcttccggctttcgagatttcctgctgaagccagagctcctccgcgctatagttgattgtggctttgagcatcctagtgaagtgcaacacgagtgtataccgcaggccatcctgggaatggatgtactgtgccaggcaaagagcgggatgggcaaaactgccgtgtttgtgctggccactctgcagcagctggagccagtcaccgggcaggtttgcttttgtgactcccactttccaaggggcgataacgaggagctgcatttgccctag

SEQ ID NO: 231551 - DNA, 1053 bp, Artificial Sequence
  derived and/or modified sequence
atgtggacaatgtcttcgtggactatgaaaatgatgcgttggcgacagcaacttggggagatgggcctacggcccctcccgcggaggatgtctcgtgcaccaatgtctccctccacagccctggcgttcgtgacctcttgtagctctcaatcatgctccggtcccctctcaaccgttgccctgtctatccgacaaaaggtggccgtgttcttcggtggccttagtattaagaaagacgaggaagtgctcaagaagaattgtcctcacatagtggtggggacaccagggcgcattttggccctggctcgaaacaaatcattgaacttaaaacacataaagcattttatcttggatgagtgtgataaaatgcttgagcaattagacatgaggcgggacgtgcaagagattttccggatgactcctcatgagaagcaggtcatgatgttcagcgcaacactctccaaagagattaggcccgtttgtagaaaattcatgcaagatcctatggagatattcgttgacgatgagacaaagctgactcttcatggcttacagcagtactacgttaagctgaaggacaatgaaaagaaccggaaactatttgaccttcttgatgtactggaattcaatcaggtggtaattttcgtaaagtcagtgcaacgatgtatagccctggcacagctcttggtggaacagaacttccccgcaattgcgatacaccggggcatgccccaggaagagcgtcttagccgctaccagcaattcaaggattttcagaggcgcattcttgtcgctaccaaccttttcggaaggggtatggacattgagcgggtaaacatcgcttttaactacgatatgcccgaggactctgacacttatctgcaccgggtcgcaagagctgggaggttcggtactaagggcctcgctattactttcgtgtctgacgaaaacgatgctaagattctcaacgacgtccaggacagattcgaggttaacatatccgagctcccagacgaaatcgacattagcagctatatcgagcagactcggtag

SEQ ID NO: 231552 - DNA, 738 bp, Artificial Sequence
  derived and/or modified sequence
atgtggactatgagctcgtggaccatgaaaatgatgcgctggcgacagcaactgggagagatgggcctccggcccctcccgcgaaggatgtcccgtgcacctatgagtcccagtaccgccctggcttttgttacaagttgctctagccaatcttgtagcgggcccctgtctaccgttgcattatctatccgacagaaggtggcggtgtttttcggcggcctgtctattaaaaaagacgaagaggtattgaaaaagaactgcccgcatatcgttgtggggaccccagggcggatcctggcgctggccaggaacaagtctcttaatctgaaacatatcaagcatttcatattagacgagtgtgacaagatgctcgagcagctggacatgcgaagggacgtccaagagatcttccgcatgacacctcacgaaaagcaggtgatgatgttttccgcaaccctatccaaagagatccgacctgtctgtcgaaaattcatgcaggacccgatggaaatttttgtcgatgatgagacaaaactcacactacacgggctccaacagtactacgtcaagttgaaggataacgagaagaataggaagttattcgatttgcttgatgttctggaatttaatcaagtggtcatattcgtcaaaagcgttcaacgctgtatcgccctagctcagctgctggttgaacagaactttccggctatcgctattcatcgagggatgcctcaatag

SEQ ID NO: 231553 - DNA, 411 bp, Artificial Sequence
  derived and/or modified sequence
atgggtggtggtagacggccctatgacgttttcttctccaaggtgatggccgaaaatgatgtggataatgagctgttggactacgaggatgatgaagtggagacggcagcaggtggcgatggggctgaagcacctgccaaaaaggatgtgaagggtagttacgtgtcaatccattcctccggctttagagatttcctgcttaagcccgagttattacgcgcgatcgtggactgcggctttgagcatccttctgaggtccagcatgagtgtataccccaggccattctgggaatggacgtcttgtgtcaggccaagtccggaatggggaaaaccgctgtcttcgtcctcgccacgcttcagcagctggagcctgtgactggccaagtatctgtactcgtgatgtgccactag

SEQ ID NO: 231554 - DNA, 1287 bp, Artificial Sequence
  derived and/or modified sequence
atggccgagaacgatgtggataatgagctgctcgattacgaggacgacgaggtcgagaccgctgccggcggagatggggccgaagctcccgccaagaaagacgtgaaaggctcctatgtgagcattcatagtagtggcttccgggatttcctgctgaagcccgaactgctgagagcaattgtcgattgcggctttgagcatcccagcgaagtgcagcacgagtgtataccacaagcaatcctcggaatggacgttctgtgccaggctaagtcggggatgggaaagacagcagtattcgtactcgctacactgcagcagctggagccggtgacgggccaggtcagcgtgctggtgatgtgccatacccgtgaattggcatttcagatctccaaggagtacgagagattttccaagtacatgcctaacgttaaggtggccgtgttttttggaggccttagcattaagaaggatgaggaggtgttaaaaaagaattgccctcacattgtagtcgggacaccaggccgaattcttgcccttgcaagaaataagagtctcaacctgaagcacataaagcacttcatactcgacgaatgcgacaagatgctcgaacagctggatatgcgacgtgacgtccaggagattttccgcatgacaccccatgaaaagcaggtaatgatgttcagcgcaaccctctcaaaggaaattagaccagtttgccgcaaatttatgcaggatcccatggaaatcttcgtggatgacgagacaaaactcaccctgcatggcctgcaacaatactacgtcaagcttaaggacaatgagaaaaatcgaaaactgtttgacctgctggatgtactcgagtttaatcaggtcgtgatctttgtgaaaagcgtgcaaaggtgtattgccctggcccagctgctcgtggaacagaatttccctgcaattgctatccacaggggaatgccccaggaagagaggctgtccagataccagcaattcaaggatttccagaggaggatcctcgtggcgacgaacctcttcggcaggggtatggacatagagcgggtgaacatagcttttaactacgacatgcctgaagatagcgatacatacctccaccgcgtggccagagcagggagattcgggacaaaggggttagccatcacatttgtgtcagacgagaatgatgctaagatcctcaacgatgtgcaagatagatttgaggtcaacatttctgagctgcctgatgaaatcgatatctcttcctacatagagcaaacaaggtag

SEQ ID NO: 231555 - DNA, 594 bp, Artificial Sequence
  derived and/or modified sequence
atggcggagaatgacgtggacaatgaattgctggattatgaggatgatgaggtcgagactgcggccggtggggacggcgctgaagcccccgctaaaaaggatgtgaaagggtcctatgtgtccatccatagcagtgggttccgggactttttactcaagccagagttgctgcgcgcaattgtagattgtggttttgagcatcctagcgaagtgcagcacgagtgtataccccaagccattttgggaatggatgtgctgtgtcaggcaaaatctggaatgggaaagacggctgtgttcgtattggccactttgcaacagcttgagccggtgacaggccaagtttgcttttgcgactctcatttccccaggggcgataatgaggagctgcatctaccctatgtgagcgtgtactttctacccaaggtgagcgtactagtcatgtgtcacacccgcgagctcgcgtttcagatcagcaaagagtatgaacggttttcaaaatacatgcccaatgtgaaggtggccgttttcttcggcggcctgtctatcaaaaaggacgaagaagtcctgaaaaagaattgtccacacatcgtgtag

SEQ ID NO: 231556 - DNA, 570 bp, Artificial Sequence
  derived and/or modified sequence
taagccactcttcagcagctggagccagtcacgggtcaggtttctgtcctggtcatgtgtcatactagagaacttgcatttcagataagcaaagaatatgaacggtttagcaaatacatgccaaacgttaaggtcgccgtgttctttggtggtctgagcataaagaaagacgaagaggttctgaaaaaaaattgccctcacatcgttgtaggtacgccaggcaggattctggcgctggcacgcaacaaaagcctgaatctgaaacacatcaaacacttcatcctggacgaatgcgacaagatgctggagcagctggacatgcggagggacgtgcaggaaatatttcgcatgaccccacacgaaaagcaggtaatgatgttttcagccacactgagcaaggaaatccgccctgtgtgccgcaaattcatgcaagatccaatggaaatttttgtcgacgatgagaccaaactgaccctccacggcctgcagcagtactatgtgaagcttaaggataatgaaaagaataggaagctcttcgacctcttagatgtgctagagtttaaccagtag

SEQ ID NO: 231557 - DNA, 1287 bp, Artificial Sequence
  derived and/or modified sequence
atggctgaaaatgacgtggacaacgaactgcttgactacgaagacgacgaagtggagaccgccgcaggtggcgatggcgccgaggcgccagccaagaaagatgtaaaggggagctacgtgtcaatccattccagcggcttccgggatttcctcctgaaacctgagctgcttcgcgccatcgtggactgcggctttgagcacccttccgaagtacaacatgaatgcataccacaagctatcctggggatggacgtcctgtgccaggctaaatctggtatggggaagacagccgtgttcgtgctagcaaccctccaacagcttgaaccggtgaccggacaagtctctgttctcgttatgtgccatacgcgtgagctcgcctttcagatttccaaggagtacgaacgtttttctaaatatatgcccaatgtgaaagtggccgtgttcttcggcggcttgagtattaagaaggatgaagaggtactcaagaagaactgcccacatatcgtggtcggaaccccaggccggatcctcgccttagctcgcaacaaatcactcaatctcaagcacatcaaacattttatactggacgagtgtgacaagatgctcgagcagcttgatatgcgtagagacgttcaggagatcttccgcatgactccccatgagaagcaggtgatgatgtttagtgccacactgagtaaggaaatcaggcctgtgtgtcgtaagtttatgcaggaccctatggagatatttgtggacgatgagacaaagctgacactccacgggctccagcaatattacgtgaagctgaaggacaacgagaagaacaggaagctgtttgatctcctagacgtgctagaattcaaccaggtggtcatcttcgtaaagtcagtgcaaaggtgcatcgcactggcgcagttactagtggaacagaacttcccagccattgcaatccatcgcgggatgcctcaagaggaacgtctttcacgatatcaacagttcaaagattttcagcgccggatcttagtggctaccaacttattcggaagggggatggacatcgaaagagtgaacattgcattcaattacgatatgcccgaagactcggacacctacctgcatcgggtggcacgagctggcaggttcggcacgaagggcctggctatcacatttgtgtctgatgaaaacgacgccaagattttaaacgacgtgcaggacagattcgaagttaatatcagcgagctgcccgatgagatcgatatcagctcttacatagaacagacacgatag

SEQ ID NO: 231558 - DNA, 711 bp, Artificial Sequence
  derived and/or modified sequence
atggcagaaaatgacgtggataatgagctgttggattatgaggacgatgaagtggagacagccgcgggaggtgatggcgccgaagccccggccaaaaaagatgttaaggggtcttacgtctctatccactcttctggatttagagatttcctgcttaaaccggagttactgcgcgctattgtagattgtggatttgaacacccaagcgaggtccaacatgaatgtattccacaggccatccttggcatggatgtgttgtgccaggcgaagtccggtatggggaaaactgccgtcttcgtactggcgacattacagcaacttgagcctgttaccggacaggtatcagttttggttatgtgccacacccgcgaacttgcctttcagatcagtaaagaatatgagcgattctctaaatacatgcccaacgtcaaggttgccgtgttcttcgggggactcagcatcaaaaaagacgaagaggttttaaagaagaactgcccacacattgtcgtgggcaccccaggtcggatccttgccctggctaggaataagtccctcaacctgaaacacataaagcactttatccttgatgaatgtgataagatgctggagcagctggacatgagaagggacgtgcaggagatcttcagaatgaccccgcacgagaagcaggtaatgatgttttcagcgacactaagtaaggaaattagatag

SEQ ID NO: 231559 - DNA, 564 bp, Artificial Sequence
  derived and/or modified sequence
atgggatcctcacacatcgggggcctgtccataaatgagaggcgaaggtccgcatcactcggtctggtcatggccgagaacgatgtagacaatgaactgctcgactacgaagatgatgaggtggaaactgctgccggtggggacggcgcggaagcccccgccaagaaggatgttaaagggagttacgtttctatccactctagtggcttcagagattttctgctcaagcccgagctgctgcgcgccatcgtggactgtggtttcgaacacccatccgaggtgcagcatgagtgcatcccccaggctatcttgggtatggatgtgttgtgtcaggctaagtctggaatgggaaagacagctgtttttgtgctggctacccttcagcagctggagcccgtcacaggccaggtcagtgtgctcgttatgtgccacactagagagcttgctttccagattagtaaggaatacgaaagattctcaaagtacatgcctaacgtcaaggtggcggtgttctttggtggtctgtctattaaaaaggatgaagaggtcctcaagaagaactag

SEQ ID NO: 231560 - DNA, 399 bp, Artificial Sequence
  derived and/or modified sequence
atggctgagaacgacgttgacaacgaactgctcgattacgaagatgacgaagtcgaaacggccgctgggggagatggtgctgaggctcctgccaaaaaggatgttaaagggagttatgtttccatccattcctctggtttccgggacttcttactgaagccggagctgctgcgggcgatcgtggattgcggattcgaacacccatccgaagtgcagcacgagtgcattcctcaggcaatcctcgggatggacgtcctatgccaggctaagtccgggatgggcaaaactgccgtctttgtccttgcaacactccagcaacttgagccagttacaggtcaagtgtgcttttgcgacagccatttcccccgaggcgacaacgaagaattgcatttgccgtag

SEQ ID NO: 231561 - DNA, 1332 bp, Artificial Sequence
  derived and/or modified sequence
atggctgagaatgatgtagacaatgagctgctggattacgaggacgatgaggtagagaccgccgccggaggtgatggggcagaagccccagcgaagaaggacgtgaaaggatcttatgtgagcatccactcatctggcttcagagacttcctgctcaaacctgagctgctgcgggccattgtcgactgtggattcgagcaccctagcgaagtccagcacgaatgtatccctcaagctatcttaggtatggacgtgctgtgccaagcgaagtccggcatgggcaaaaccgctgtgtttgtcttggcaactctacagcaactcgagcctgtgactggtcaggtctacctcggacgggtgttaggcaggggcttttggtgcgtatttgtcagcgttctcgtgatgtgtcacacgagggaactggctttccagattagtaaagagtatgaaagattttccaaatacatgcccaatgtgaaggtcgccgtcttttttggcggccttagtattaaaaaggatgaggaagttctgaagaagaattgtccacacattgtggttggaaccccaggccgcatcctggccctggcccgcaataagtcgctgaacttgaagcacattaagcacttcattctggacgaatgcgacaaaatgctcgagcagttggacatgcgtcgggacgtacaggagatctttcgcatgacccctcacgaaaagcaggtgatgatgttcagcgcaacgctaagcaaggagatacggccagtatgccgaaagtttatgcaagacccaatggagattttcgtcgatgacgaaacaaaattaactctgcatgggctgcaacaatactacgtcaagctcaaggacaacgaaaaaaacagaaagctctttgatctgctcgacgtgctggagttcaaccaggtggtgattttcgttaaatccgtgcagcggtgtatcgctttggcacagctactagtggaacagaacttccccgccattgctatccatagaggcatgccacaagaggagaggctttcacgctaccagcagttcaaggactttcagaggcggattctggtggccacaaacttgttcggccgcgggatggatatagaacgagttaatatcgcttttaattacgacatgccagaagactccgatacttaccttcaccgagtagcacgagccggacgctttggaaccaaggggctcgccattacgttcgtgagcgacgagaatgacgccaagatacttaacgacgtgcaggatcgtttcgaggtgaatataagcgagctccccgatgagattgacatctcgtcatacatcgagcagaccaggtag

SEQ ID NO: 231562 - DNA, 870 bp, Artificial Sequence
  derived and/or modified sequence
atggccgagaatgacgtagacaatgagctattggactacgaagacgacgaggtggagaccgccgccggaggggacggagcggaggctccagcaaagaaggacgtcaaggggtcttatgtctctatacattcatccggttttagagatttcctcttaaagccagaattgctaagggccattgtcgactgcgggttcgagcatccatctgaagtgcagcacgagtgcattcctcaggcaattctcgggatggacgtgttatgccaagctaagagcggcatggggaaaaccgcggtgtttgtcctggctaccttgcagcaattggagccggtgaccggtcaagttagcgtgttggtgatgtgtcatacaagagaactggcatttcaaatttcaaaagagtacgagcgcttctcgaaatacatgcctaacgtgaaagtggctgtgttcttcggaggactgtccattaagaaagacgaagaagtactgaaaaagaactgccctcacatcgttgtggggacaccgggcaggatcctagcccttgccaggaataagtctctgaacttgaagcacatcaagcacttcatcctggacgaatgcgataaaatgctcgagcagctagatatgcggcgagatgtccaggagatttttcgaatgacgccccacgaaaaacaagtgatgatgttcagcgcaaccttatctaaggagattcggcctgtgtgcaggaagttcatgcaggacccgatggagatttttgtggatgatgagactaagctgactctgcacggcttgcagcagtattacgtgaagttgaaagataacgagaaaaaccggaaactgttcgatctgctcgatgtgctcgaattcaaccagtag

SEQ ID NO: 231563 - DNA, 564 bp, Artificial Sequence
  derived and/or modified sequence
taatctgaggaacgggacattggcaaaccaatggagatctttgtggacgacgagacaaaactgaccctccacgggctacaacaatattacgtaaagctgaaggacaatgagaaaaaccgtaagctgttcgacctgcttgacgtgcttgagttcaatcaagtcgtgatcttcgtaaagtcggtgcagaggtgtatcgcattagcccagctcctcgttgaacagaactttcccgccatagcaattcataggggaatgcctcaggaggaacgccttagccgctatcagcagttcaaagactttcagagacggatcttagtcgcgactaatctatttggccggggcatggacatagagcgggttaatatcgccttcaactacgacatgcccgaagatagtgacacatacttgcatcgcgtggcgagggccggtagatttggaaccaaaggactagccatcacctttgtgagtgacgaaaatgacgctaagattctcaacgacgtgcaggatagattcgaagtgaacatctcagagctgccggatgaaattgacatcagctcctactag

SEQ ID NO: 231564 - DNA, 411 bp, Artificial Sequence
  derived and/or modified sequence
atgggcggcggtaggcgaccttacgacgtctttttttctaaggtgatggccgagaacgacgtggataacgagctactggattatgaggatgatgaggtggagacggccgctggcggggatggggccgaggctcctgctaagaaggatgtcaaggggtcatacgtaagcatacattcttccggttttcgggatttcctgttaaaacctgagctgctgcgtgcaattgtggactgtggctttgaacatccatctgaggtgcaacatgaatgcattccgcaagcaatcctgggcatggacgtgctttgtcaggctaaatccggcatgggaaaaacagccgtgttcgttttggctactcttcaacagctggagccggtgaccggtcaggtgagcgtcttagtaatgtgccattag

SEQ ID NO: 231565 - DNA, 411 bp, Artificial Sequence
  derived and/or modified sequence
atgggagggggacggaggccttatgacgtgttttttagtaaggtgatggctgaaaatgatgtcgacaatgagttgctggactatgaggacgacgaagtggagacagccgcgggtggagatggcgccgaggcacctgccaaaaaagatgtcaagggttcctatgtgagtatacactcctccggattccgcgattttcttcttaaacccgagctactccgcgcaatagtggactgcggattcgagcacccaagcgaggtgcagcatgaatgcattccacaggctatcctgggcatggatgtattgtgccaggctaagtctggtatggggaaaaccgctgtgtttgttctggccacactgcaacagctcgagccggtgactgggcaagttagcgtgctggttatgtgtcactag

SEQ ID NO: 231566 - DNA, 399 bp, Artificial Sequence
  derived and/or modified sequence
atggctgagaacgatgtggacaatgagctgttagattatgaggacgatgaggtggaaaccgccgccggcggcgatggtgccgaggcgcctgcgaaaaaagacgttaaggggagctatgtgtcaatccattctagcgggttccgtgatttcttgttaaaacccgagctcctgcgcgccatcgtggactgcgggtttgagcacccaagtgaggtgcagcacgagtgcataccccaggcaattctaggaatggacgtgttatgccaggcaaagtccggtatggggaaaacagcagtcttcgtgctcgctacactgcaacagctggaacctgttaccgggcaggtgtgcttttgcgactcgcatttccctcgcggggataatgaagaactgcatctgccctag

SEQ ID NO: 231567 - DNA, 711 bp, Artificial Sequence
  derived and/or modified sequence
atggcggaaaacgacgtggacaatgaacttctcgactacgaggacgacgaggtggagacagctgctgggggcgatggggccgaagcgcctgcaaaaaaggatgtgaaggggtcctatgtatccattcattcaagcggtttcagggacttcctgctcaagccagaactgctgagagctatagtcgattgtggatttgagcacccatcagaggtccagcacgagtgcataccgcaggcaatcttgggtatggacgttctctgccaggcaaaaagcgggatggggaagactgccgtatttgttcttgccacgctccaacaattagagccagttaccggacaggttagtgtcctggtaatgtgccacactcgtgaactcgcgtttcagatttccaaagaatatgaacggttcagtaagtacatgcccaatgtgaaggtggcggtgttttttggcgggctgtccattaaaaaggacgaggaggtgctcaagaaaaactgcccacatatagtcgtaggcacgcccggacggatcttagcccttgcgaggaacaagtcacttaacctgaagcacatcaagcacttcattctcgatgagtgcgacaagatgctcgaacaattagacatgcgccgggatgtccaggaaatcttccgaatgactccacacgaaaagcaggtgatgatgttcagcgcaaccctttcaaaggaaatccgatag

SEQ ID NO: 231568 - DNA, 378 bp, Artificial Sequence
  derived and/or modified sequence
atggctgagaacgacgtagataacgaactattggactatgaagatgacgaggtggaaacggcggccgggggcgatggcgccgaagcaccagcaaagaaggacgtaaagggtagttacgtgagcatccacagcagtggattccgagactttctgctgaagcccgagctgctacgggccattgtcgattgcggcttcgagcaccctagcgaagtgcaacatgaatgcatccctcaggccatcctcggcatggatgtgctgtgccaggccaagtcaggtatgggaaagaccgctgtctttgtgctggccaccttgcagcagttggagcctgtgacaggacaagtctccgtcctggtgatgtgccacaccagggagctctag

SEQ ID NO: 231569 - DNA, 987 bp, Artificial Sequence
  derived and/or modified sequence
taagccaccctccagcaattggagcccgtgacaggacaagtgagcgtgctggttatgtgccacaccagagagctggcatttcagatttccaaagagtatgagcgatttagcaagtatatgccaaacgtcaaggtcgcggttttcttcggaggattgagcatcaagaaagacgaagaggtgttaaaaaagaattgtccccacatcgtcgtgggaacccctgggcggattctggctctagcccgcaacaaatccctgaatctgaaacatattaaacactttatccttgatgagtgtgacaaaatgcttgagcaactggatatgcggagagacgttcaggagattttcagaatgacgcctcacgagaagcaggtgatgatgttttcagccacactcagcaaggagattaggcccgtgtgcagaaagtttatgcaggatccaatggagattttcgtggatgacgaaaccaaattgacacttcacggattacagcagtattatgtgaaactgaaggataatgagaagaacaggaagttattcgatcttttggacgtgcttgagttcaaccaagtggtgatatttgtgaagtccgtgcagcgatgtatcgccttggctcagctgctcgtcgaacagaacttccctgccatagctatccaccgtgggatgccccaagaggagagactgagtcgttaccagcagttcaaagactttcagaggcgcatcctggtggcaactaatctgtttgggcggggaatggatatcgagcgagtcaacattgctttcaattacgacatgcctgaagattctgacacctacctgcatcgggtcgcaagagccggccgattcggaactaagggactcgctatcacgttcgtatccgatgagaatgacgccaagattctcaacgatgttcaggatcgattcgaagtcaacatctctgaactccccgatgagatagacatcagtagctatattgagcagacacggtag

SEQ ID NO: 231570 - DNA, 711 bp, Artificial Sequence
  derived and/or modified sequence
atggctgagaatgatgtcgacaacgagctcctagattatgaagacgacgaggtggagaccgcagctggcggggacggcgccgaggcccctgcgaaaaaggatgtcaaaggctcatatgtgtcgatacattcatcgggcttccgtgactttctgctgaagccagagctgctccgcgccatagtggactgcgggtttgaacaccctagtgaagtgcaacacgagtgtatcccacaagcaatattagggatggacgtactctgccaggccaaatctggcatgggaaagactgcagtcttcgttcttgccacgctccagcagctggaacccgttaccgggcaggtttcggttttagtcatgtgtcatacaagagagctggcgtttcagatatctaaagagtacgagcgtttttctaaatatatgcccaatgtaaaggtggccgtattcttcggaggcctctccatcaagaaggacgaggaggtgctcaaaaagaactgtccccacattgttgtgggtacccccggccgaatcctggcactggcccggaataagtctctgaaccttaagcacataaaacattttatacttgacgagtgtgacaaaatgctggaacaactggacatgagacgcgacgtgcaggaaatctttcgaatgaccccgcacgagaagcaggtgatgatgttcagtgctactctcagtaaggagatcaggtag

SEQ ID NO: 231571 - DNA, 564 bp, Artificial Sequence
  derived and/or modified sequence
tgatcggaggaacgcgatattgggaaacccatggaaatcttcgtcgatgatgagaccaaacttactctgcatggtctgcaacagtactatgtgaagttgaaggataacgagaagaacagaaagctcttcgacctgctcgacgtcttagagttcaaccaggttgtgatatttgtgaagtccgttcagcggtgcattgccctcgcccagctgcttgtggagcagaactttccagccatcgcgatccatcgtggcatgccccaagaagagagactctcccgatatcagcaatttaaggacttccagcgtcgaattctggtcgcaaccaacctgtttgggaggggcatggacatagagagagtaaatatcgcctttaactatgatatgcctgaggattcagatacctatctgcacagagtcgctagagctgggaggtttggcacaaagggactggcgatcacttttgtaagtgatgagaatgatgccaaaatcctgaacgatgtccaggacagattcgaagtgaacatttccgagctgcctgacgagatcgacatatcttcatattag

SEQ ID NO: 231572 - DNA, 378 bp, Artificial Sequence
  derived and/or modified sequence
atggctgagaatgacgttgacaacgaactgttggattatgaggatgatgaagtggaaactgcagccggtggagatggcgcagaggcccccgcaaaaaaggacgtcaagggatcctacgtgagcatccactcgtcgggctttcgcgacttccttctcaaacccgagctgcttcgggccatcgtggattgtgggtttgaacacccctcggaggtgcagcacgaatgtattcctcaggctatactgggcatggatgtactttgccaggcaaaaagcggaatggggaaaacggcagtctttgtgctggccactctgcagcagctggaacccgttacgggccaggtgtcagtgctcgtgatgtgccacacacgcgagctttag

SEQ ID NO: 231573 - DNA, 291 bp, Artificial Sequence
  derived and/or modified sequence
atggcagagaacgacgtggataatgaactgctggattacgaggatgatgaggtggaaaccgcagctgggggagatggcgccgaggccccagctaaaaaggatgtgaagggttcatacgtatcgatccattcatcaggtttccgcgacttcctcttaaagccggagcttctgcgagccatagtagactgtggatttgaacatccctcagaagttcagcatgaatgcatcccccaggccatactcggcatggatgtgctgtgtcaggctaagtcagggatgggcaaaacctag

SEQ ID NO: 231574 - DNA, 378 bp, Artificial Sequence
  derived and/or modified sequence
atggctgaaaacgacgtggataatgagttactcgactacgaagatgacgaagtcgagactgctgcgggtggggatggggctgaggccccagcaaaaaaggatgtcaaaggatcctacgtctctatccacagttccggcttccgggatttccttctcaaacccgagctcttgcgggcaatcgttgattgtggatttgaacacccttctgaagtgcagcatgagtgcatacctcaagctatcttgggcatggatgtcctttgtcaggccaaatccgggatgggcaagactgccgtctttgttctggccactctgcagcagctggagccggtgacaggccaagtgtctgtccttgtaatgtgccataccagagagctctag

SEQ ID NO: 231575 - DNA, 987 bp, Artificial Sequence
  derived and/or modified sequence
taagctactcttcagcagctggagcccgtgacaggtcaggtgtccgtcttggtgatgtgccatacccgcgaacttgcatttcaaatctctaaagagtacgagaggttctccaaatacatgccgaacgttaaggttgccgtttttttcgggggactctccataaagaaagacgaagaggttctgaaaaagaactgcccacacatagtcgtgggtactccaggccggatcttagccctcgctagaaacaagagtttaaacctcaagcatatcaaacacttcatcctggatgaatgtgacaaaatgctggaacaactggacatgcgccgcgacgtgcaggagatctttcgaatgacacctcacgaaaaacaagtgatgatgttcagcgccacattgtcaaaagaaatccggccggtgtgtaggaaattcatgcaggatcccatggagatctttgtggacgatgagaccaaactgaccctccacggattgcagcaatattatgtgaagctgaaggataatgagaagaaccgaaagctttttgaccttctggacgttcttgagtttaatcaggtagtaatctttgttaagtcggttcaacgttgtattgccttagctcagctgctggtagaacagaatttcccagccatagcgattcacaggggcatgcctcaggaggagagactaagtcgatatcaacagtttaaggacttccagcgcagaatcctcgtcgctaccaatcttttcggccgggggatggacattgaacgcgtgaacatagccttcaattatgacatgccagaagacagcgatacatatcttcaccgggtggcaagggctggccgctttggtacaaagggcctggcaatcactttcgtctcggacgaaaacgatgccaagatcttaaacgacgtgcaagaccgctttgaagtcaatatctccgaacttcccgatgaaatcgatatcagcagctatatagaacaaactcgctag

SEQ ID NO: 231576 - DNA, 870 bp, Artificial Sequence
  derived and/or modified sequence
atggccgaaaacgacgtggacaatgaattattagattacgaagatgacgaagtggaaactgccgcagggggggacggcgccgaagctcctgctaaaaaagatgttaagggctcatatgtctctatccattctagcggcttcagggacttcctgctgaaaccagagctcctcagggcgatcgtggattgtggattcgagcacccaagtgaagtccaacatgaatgcatccctcaggcaatcctcgggatggatgtgctttgccaagctaaaagcggaatgggtaagacggctgttttcgtgttggcgaccttgcagcaacttgagcctgtgaccggccaggtctctgtattggtgatgtgtcacacaagggagctggcttttcagatttccaaggagtatgagcgattctctaagtacatgcccaacgtcaaggttgcagtgttcttcgggggcctaagtatcaagaaggacgaagaggtgttgaaaaagaattgcccgcacatcgtggtggggacacctggccgcatcctggcattggctcgtaataagtctcttaacctcaagcacatcaagcactttatactggatgagtgtgacaagatgctcgaacagctggatatgaggcgtgacgtgcaggagatctttagaatgacaccccatgagaagcaggttatgatgttctcggcgacgctgagcaaagaaatcaggcccgtgtgtagaaagtttatgcaagatccaatggaaatttttgtcgatgacgagaccaaactgaccctgcatggactgcagcagtattatgtcaaactcaaggataacgaaaaaaacagaaagctttttgaccttctcgacgtgcttgagttcaaccaatag

SEQ ID NO: 231577 - DNA, 738 bp, Artificial Sequence
  derived and/or modified sequence
atgtggactatgagctcttggaccatgaagatgatgaggtggcgccaacaactgggggaaatgggtcttcgcccgttaccacgacggatgtctcgggcgcccatgagcccctcgacagcactggcatttgtcacttcctgctcttcccaaagttgttcgggccccctgagcacagtggcactatcaatacgacagaaagtggccgtgttctttgggggcttgagcataaagaaggatgaggaggttctgaaaaagaattgcccacatattgtggtcggcactcccggccgcattctagcccttgcgcgtaataagtctctgaacttgaagcatattaaacatttcatcctggacgagtgcgacaagatgttagagcagctggatatgaggcgcgatgttcaggagatttttcgcatgactccccatgaaaagcaggttatgatgttttcagccactctcagtaaagagattcgccctgtgtgtcgtaagttcatgcaggatccgatggaaattttcgtggatgacgagacaaagttgacactccacggcctccagcagtattacgtgaagttgaaggacaacgagaaaaacagaaaactgttcgacttgctggacgtgctggagttcaaccaggtcgtgatttttgtcaaaagcgtccagcgttgcatcgcacttgctcaattgttagtggaacagaactttcctgcgatagcaattcaccgcggcatgccacagtag

SEQ ID NO: 231578 - DNA, 738 bp, Artificial Sequence
  derived and/or modified sequence
atgtggacaatgtccagctggaccatgaaaatgatgcgttggagacagcagctgggagagatggggctccgccctttgccacgtagaatgtcacgagctcctatgtcacctagtactgcgttagcttttgtaacatcatgtagctctcaaagctgttcaggccccctcagcaccgttgcacttagtatccgccaaaaggttgcagtgttcttcggaggcctgagtattaaaaaagacgaggaggtgcttaagaagaactgtccccatattgttgtgggtacccctgggcggatcctggcattagcccggaataaaagtttaaacctgaagcacataaagcattttatcctggatgagtgtgacaagatgctcgaacagctggacatgcgcagagatgtacaagagattttcagaatgacaccccatgagaagcaggttatgatgttcagtgccacccttagcaaagaaattagaccagtgtgtcgcaagttcatgcaagaccctatggagatcttcgtggatgatgaaaccaaactgacactccacggtttacaacagtattacgtaaaactcaaggacaatgaaaagaacaggaagctctttgacctgctggatgtgctcgagttcaaccaggtggtaatatttgtcaaatcggtgcagagatgtattgctttggctcagcttctcgttgagcagaatttcccagccatcgcgattcaccggggtatgcctcaatag

SEQ ID NO: 231579 - DNA, 396 bp, Artificial Sequence
  derived and/or modified sequence
taagctacactgcagcagttagagcctgtgacaggccaggtgagcgtactggtgatgtgccatacacgagagctcgctttccagattagcaaggagtatgagcgtttcagtaagtatatgccaaatgttaaagtggcagtgttctttggtggattaagcatcaagaaggatgaagaagtcctgaaaaaaaattgtcctcacattgttgtggggacgcctggcaggatcctggcgctggccagaaacaagtcattgaatctcaagcatataaaacacttcatcttagacgagtgcgataagatgctggaacaacttgatatgagacgagacgtacaggaaatcttccggatgacaccacacgagaaacaggtgatgatgttctcagccactctctag

SEQ ID NO: 231580 - DNA, 411 bp, Artificial Sequence
  derived and/or modified sequence
taagcgactttgcaacagcttgaaccagtgactgggcaagtctctgtccttgtgatgtgccacactcgcgagctcgcattccagataagcaaggagtatgagaggttctccaagtacatgccgaatgtcaaggtcgcagttttcttcggtgggctgagcatcaagaaggacgaggaggtgctcaaaaagaactgcccccatattgtcgtagggacacccgggagaatcctggctctggctcgcaataagtctttgaatctcaaacacatcaagcattttattctggacgaatgcgataagatgctggaacagctcgatatgcggagagatgtgcaggagatcttcaggatgactccccacgagaagcaggtgatgatgttctccgctactctgtccaaagaaataaggtag

SEQ ID NO: 231581 - DNA, 717 bp, Artificial Sequence
  derived and/or modified sequence
atggcagaaaacgacgttgacaacgaattactcgattatgaggatgacgaggtcgaaactgcggccgggggcgacggggcagaggcccctgcaaaaaaggatgtgaaaggctcttacgtgtccatacactcgagtggcttccgcgactttttactgaagcctgaactgcttagggccattgtggactgtggtttcgagcatccttccgaagtccagcacgagtgtataccgcaggcgattctcggcatggatgtgctctgtcaggctaaatctgggatgggaaagacagcggtgtttgttctggccacgctacagcagctggaacccgtaacggggcaggtctcagtgttagttatgtgtcacacacgcgagctggcttttcagatcagtaaggaatacgagcgcttctcgaagtatatgccaaatgtgaaggtggccgtgtttttcggtggactgagcattaaaaaggacgaggaggtcctcaaaaaaaactgcccacacattgtcgtgggcactcctgggagaatcctggccttggctagaaataagtccctgaacttgaagcatattaagcactttatactcgatgagtgtgacaagatgttggaacaactagacatgagacgtgacgtgcaagagattttccggatgacaccacacgagaagcaggtcatgatgttctccgccaccctcagcaaagaaataagacccgtgtag

SEQ ID NO: 231582 - DNA, 564 bp, Artificial Sequence
  derived and/or modified sequence
tgaagcgaagagcgggacatcggcaagcctatggaaatttttgtcgacgacgagacaaaactaactctgcatggacttcagcagtactacgtgaagctgaaggacaatgaaaagaatcggaaactgttcgatttgttagacgtgttggaattcaaccaggtggtgatattcgtaaaatctgtgcaaaggtgcatagctctagcccagctgctggtcgaacaaaatttccctgcaatcgcgatccaccggggaatgccccaggaggaacggctctctcgatatcaacaattcaaagatttccagcgccgaatcctggtggccacgaacctcttcggccgtggcatggatattgaacgcgtgaatatcgccttcaattatgatatgccggaagactccgatacttatttacatcgtgtggcccgtgcaggccggtttggcaccaaggggctcgctataacctttgtctccgatgagaacgatgctaagattttgaatgatgtgcaggatcgcttcgaggtcaatatcagtgagctccccgacgaaatcgatatcagctcatactag

SEQ ID NO: 231583 - DNA, 594 bp, Artificial Sequence
  derived and/or modified sequence
atggccgaaaatgatgtagataacgagttgttggactacgaggacgatgaagttgaaactgctgccgggggagatggggccgaggcgcccgccaagaaagacgtcaaaggatcgtacgtgagcatccatagcagtgggtttagagatttcctgctgaagcctgaactcctccgggctatcgtggactgtggatttgaacaccctagtgaggtgcagcacgagtgcattccacaagcgatcttaggaatggacgtgctctgccaggccaagagcggcatgggtaagaccgcagttttcgttctggctaccctacaacaactggaacctgtgactggccaggtctgtttttgtgactcccattttcctcgtggcgataacgaggagctccaccttccgtatgtgtctgtgtacttcttgccgaaagtgtcagtactggtgatgtgccatacccgggaactcgccttccagatctccaaagaatatgaacggttttctaaatacatgcctaacgtgaaagtcgctgtcttctttgggggcttaagcataaaaaaggacgaggaagttttgaaaaagaattgtccacatatcgtgtag

SEQ ID NO: 231584 - DNA, 594 bp, Artificial Sequence
  derived and/or modified sequence
atggcagaaaatgatgttgataacgagctcctcgactacgaagatgacgaagtcgagaccgccgctggcggcgatggcgccgaagcgccagctaaaaaagacgtcaagggctcctatgtcagcattcactcatccgggttccgggatttcctgttgaagcctgaactgttgcgtgctatcgtcgattgcgggtttgagcatccatccgaggtgcagcatgagtgtatcccccaagctattttaggaatggacgtcctatgccaagcgaaaagcggcatggggaagactgcagtgtttgttctggctactctgcaacagctggaacctgttaccggacaagtctgtttctgcgactcccactttcccagaggcgataacgaagagctgcatctcccctatgttagtgtttactttcttcctaaagtcagcgtgctcgtcatgtgccacactcgggaactggccttccaaatttctaaagaatacgagagattcagcaagtacatgcctaacgtgaaagtcgcagtcttcttcggaggcctgtccataaagaaagacgaagaagtcttgaagaagaattgtccacatatagtctag

SEQ ID NO: 231585 - DNA, 411 bp, Artificial Sequence
  derived and/or modified sequence
atgggagggggtcgccgaccttacgacgtgtttttctctaaggtcatggccgagaacgatgtggacaacgaactgctagattatgaggatgatgaagtggaaaccgccgcaggtggagacggcgcggaagccccagcaaaaaaggacgtgaaaggaagttacgtgagtatccattcttcaggtttccgagattttctgctcaaaccagagctgcttcgggcaatcgttgattgcggctttgagcacccctccgaagtccagcacgagtgtatcccccaggcaatccttgggatggacgttctttgccaggctaaaagcggcatgggcaagactgcagtcttcgtgctcgcgaccctgcagcagctcgagcctgtgacgggtcaggttagtgtgctggtgatgtgccactag

SEQ ID NO: 231586 - DNA, 1278 bp, Artificial Sequence
  derived and/or modified sequence
atggcagagaacgatgtggataacgagctgctggactacgaggacgatgaagtagagacagccgcaggcggcgatggggcggaggctcctgctaaaaaggatgttaaaggctcctacgtgagtatacattctagcgggtttagagatttcctcctgaaacccgaattattgcgcgccattgttgattgcgggttcgagcacccgtccgaggttcagcatgaatgcataccacaggccattcttggcatggacgtgctgtgtcaggctaagtctggaatggggaagacagcggtgttcgtgttagccacactacaacaattagagccagtgacaggccaagttagcgtccttgtgatgtgtcacactcgggaactggccttccagatcagcaaggagtacgagcggtttagcaagtacatgcccaatgttaaggttgccgtgttctttggaggcctaagcatcaagaaggacgaagaagtgctcaagaaaaactgcccccatattgtggtggggaccccaggcagaatcctcgccctggcacggaataagtctctgaacctgaaacacataaaacacttcatactcgatgaatgcgataagatgcttgaacagcttgatatgcggagggatgtgcaggagattttcagaatgaccccacatgaaaaacaggtgatgatgttctccgccacgctgtcgaaggagattagacctgtctgcaggaagttcatgcaagatcccatggaaatcttcgtcgacgatgaaacgaaacttaccctgcatggcctgcagcaatattacgtcaaactgaaagataatgagaagaatagaaagctgttcgatttactcgacgtcctcgaatttaatcaggtggtgatcttcgtcaaaagcgtgcagcggtgcatcgcgttggctcagcttcttgttgagcaaaattttcccgccatcgcaatacatcggggaatgccccaggaagaacgcctgtcccgctatcagcagttcaaggatttccagaggaggatcctggtggccaccaatctgtttggcagggggatggatattgagagggtcaacattgcatttaactatgatatgcccgaggattctgacacgtatcttcatcgatgctatccactcagcccatccagatggcccgaacaggcagggctcgcgcctcgcgcatggctctcccacctctgtccgatgcggatgatgccgcgaagcagcatgatgtgtcgcattgccctgcggtccatcctagtgtcttgcctgatgaggtag

SEQ ID NO: 231587 - DNA, 1287 bp, Artificial Sequence
  derived and/or modified sequence
atggctgagaatgacgtggacaacgagctgcttgactacgaagacgatgaagtggagactgccgcaggaggagatggggccgaggctccagctaaaaaagacgtgaaaggcagctatgtctcaatccactccagcgggtttagagacttcctcctgaaacccgagctgcttcgtgcaatcgtggattgtgggtttgaacatcccagcgaagtgcagcacgagtgtataccacaagcgattctcgggatggacgtgctgtgccaggccaagtcaggaatggggaagactgccgtgttcgtgctggctaccttacagcaactggagccagttaccggtcaggtcagcgtcctagtgatgtgtcacaccagggagttggccttccagattagcaaagagtatgaacgattcagcaaatacatgccaaacgtcaaggtcgcagtttttttcggagggctgtccatcaagaaagatgaggaggtacttaaaaaaaattgcccacacatagtcgtcggcaccccaggacgtattcttgccctggccaggaacaaatctttgaatttaaagcacatcaagcactttattttagatgaatgtgacaaaatgcttgaacaactcgatatgaggagagacgttcaggagatctttcggatgacaccccatgagaaacaggtaatgatgttctctgcgacgttatccaaagagattcgcccggtgtgtagaaaatttatgcaggaccctatggagattttcgtcgacgacgaaacaaagctgactctacacggtttgcagcagtactatgtgaagcttaaggacaacgagaagaatcgcaagctgttcgatctcttagacgttctcgaatttaatcaagtggtcatctttgtgaagtcagtgcagcgttgcatcgcccttgcacagctcctagtggagcagaattttcccgctatagccattcaccgaggcatgccacaggaggaaagactgtcacgatatcagcagttcaaggattttcaacgaagaatacttgtcgccactaatctctttggcagggggatggacatcgagcgagtgaacattgccttcaactacgacatgccagaagacagtgatacatacctgcatagagtggcccgagctggtcgcttcggcacaaagggtttggccataacttttgtttctgatgaaaatgacgcgaagatcctaaatgatgtgcaagaccgctttgaggtcaacatttcagaactgcctgatgaaatcgacatctcttcctatatagagcagacccggtag

SEQ ID NO: 231588 - DNA, 1287 bp, Artificial Sequence
  derived and/or modified sequence
atggctgagaacgacgtggataacgaactgcttgattatgaagatgacgaggtggagaccgccgcagggggtgatggagctgaggcccccgctaagaaagacgtcaaagggagctatgtgtctatccacagctctggctttcgtgacttcctgctgaaaccagagcttctgcgggctatcgtcgactgcggcttcgagcatcccagcgaggtccaacacgagtgtatcccccaggcaatcctggggatggacgtgctgtgtcaggctaaaagtggcatgggtaagacagcagtgttcgtgctggccacactccagcagctggaaccagtgaccggtcaggtatccgtcttggtcatgtgccatacgcgcgagttggcattccagatctccaaagaatatgaacgctttagtaagtatatgcccaatgtaaaagtagctgttttctttgggggactttctattaagaaagatgaggaagtcttgaagaaaaactgtcctcacattgtggtgggtacacccggccgcattttagcccttgcacgaaataaatctctgaacttgaagcacataaaacactttatcctagacgagtgcgataagatgctggagcagcttgacatgaggagggacgtccaggagatattcaggatgactccccatgagaagcaggtaatgatgttctctgctaccctttcaaaagagattagaccggtttgcagaaaattcatgcaggaccctatggagatcttcgtagatgatgagaccaagttgacactgcacggattgcagcagtattatgtgaagctcaaagataacgaaaaaaatcggaagctgtttgatctgctggacgtgctagagttcaaccaggtggtgatcttcgtgaagtccgtgcaaaggtgcattgccctagcccaacttttggttgaacagaatttcccagcaatagcaatccatagaggtatgccccaagaggagagattgtcacgctatcagcagtttaaggactttcagcgccggattttggtcgccaccaacttgtttggaagagggatggacatagagcgggttaacatcgcctttaactatgacatgccagaagactccgatacctacctgcaccgcgtggctcgcgccggaagattcgggaccaagggacttgctattaccttcgtgtccgacgagaacgatgccaagatccttaatgacgtgcaggataggtttgaagtgaacattagcgagctgccagacgagatcgatatcagctcctatatcgaacagactcggtag

SEQ ID NO: 231589 - DNA, 738 bp, Artificial Sequence
  derived and/or modified sequence
atgtggaccatgagcagttggaccatgaagatgatgaggtggagacagcagctaggggagatggggcttcgccccttacccagacgaatgtcacgggctcccatgtcgccctccactgctctggcctttgttacatcctgctctagtcagagctgttctggcccattatcaacagtcgctctgagtataaggcagaaagtggctgtgttcttcggcgggctctcgataaagaaagacgaggaggtcctcaagaaaaactgcccccatatcgtcgttgggacccctgggagaattctggcactcgcccggaacaagtccctgaatcttaagcacatcaaacacttcattctggatgaatgcgacaagatgttagagcagctggacatgcgccgtgacgtgcaggaaattttcagaatgacaccccatgagaaacaagtaatgatgttcagcgccacgctgtcaaaagagatccgccctgtatgccgtaaattcatgcaagaccctatggagatcttcgtggatgacgaaacaaagctaacactgcatggtctccagcagtattatgtgaaacttaaggacaacgagaaaaaccgcaagctgttcgaccttcttgacgtgttggaatttaaccaagtggtcatattcgtgaagagcgtacagcggtgtatagccctggcccaacttctcgtggaacaaaatttcccagcaattgccatccacaggggaatgccccaatag

SEQ ID NO: 231590 - DNA, 696 bp, Artificial Sequence
  derived and/or modified sequence
atggccgagaacgatgttgataatgagttactggactacgaagatgatgaggtggagacagcagcaggcggggacggcgcggaggccccagccaagaaggacgtcaagggtagctatgtgagcattcattcttctgggttccgggacttcctgctgaagcccgagttgctgcgcgccatagtggactgcgggtttgaacacccatcagaagtccagcatgagtgcattccccaagcaatcttgggcatggacgtgctgtgtcaggcaaaatcaggaatgggcaaaacagccgtttttgtactggctactctccaacaactcgagcccgtgaccgggcaagtttctgtcttagtgatgtgtcacacacgggagctggctttccaaatcagtaaggagtacgagaggttcagcaagtacatgccaaacgttaaggttgccgtattcttcggtgggctgtctatcaagaaagacgaggaagtcctaaaaaagaattgccctcacatcgtagttggcaccccgggaagaatcctggcgctggcccggaacaagtctttaaacttaaaacatatcaagcattttatattggacgaatgtgataaaatgctggaacagttagacatgaggagggacgtgcaggaaatcttccgaatgacaccacacgaaaaacaagtcatgatgttctcggccacactctag

SEQ ID NO: 231591 - DNA, 594 bp, Artificial Sequence
  derived and/or modified sequence
atggccgagaacgacgtggataatgaactactggactacgaagatgacgaggtggagacagcagcaggcggtgacggggccgaggcgccagcgaagaaagatgtaaaggggtcttacgtgtccatccattccagtggatttagagattttctcctgaagcccgaattgctcagagcgattgtagattgcggattcgagcacccctccgaagtgcagcacgagtgcatcccacaggccatccttggaatggatgttctgtgccaggctaaatcagggatgggaaaaactgcggtcttcgtgctcgccacccttcaacagctagagcccgtcacaggccaggtgtgtttctgcgattctcacttcccacggggcgataatgaagaactccacctgccttacgttagtgtgtacttcctgcccaaggtgtcggtgctggtgatgtgccacactagagagctggccttccagatctctaaggaatacgagagatttagtaaatacatgccaaacgtaaaggtggctgtgtttttcggtggcctgtccatcaagaaggatgaggaagtgctgaagaaaaactgtccacatatcgtctag

SEQ ID NO: 231592 - DNA, 594 bp, Artificial Sequence
  derived and/or modified sequence
atggctgaaaacgatgtagataacgaactgttggactatgaggacgacgaagtggagacagccgctggcggggacggggccgaggccccggcgaaaaaagacgttaaaggctcctatgtgtctatccactcatctggatttcgagactttctgttaaagccagagttgctgcgagcaattgtggactgtggctttgagcacccctctgaagtgcaacacgagtgcatacctcaggcaattctgggcatggatgtactctgccaggctaagagcgggatgggcaagaccgctgtttttgtgctcgccacccttcaacagctggaacctgtgaccggtcaagtctgtttttgtgactcgcattttcccagaggcgacaatgaggagctccacctaccgtacgtgagtgtgtatttcctgcccaaggtttcagtcctagtgatgtgtcatactcgggagttagcctttcagatatctaaagaatacgaacgattctcaaagtacatgcccaacgtgaaagtcgctgttttcttcgggggtctctccattaaaaaggacgaggaagtccttaagaagaattgccctcatatcgtgtag

SEQ ID NO: 231593 - DNA, 540 bp, Artificial Sequence
  derived and/or modified sequence
gtggcggtgtttttcggtggtctgtctataaagaaggatgaggaggtactgaagaagaactgcccacatatcgtagtcggcacccccggccggatactggctctcgcacgcaacaagtccttaaatcttaagcatataaaacattttatcctcgacgagtgtgacaagatgctagagcaattggatatgagacgtgatgtgcaagaaatctttagaatgactccacacgagaagcaggtgatgatgttctccgctacactcagcaaggagatccgccctgtgtgtagaaaattcatgcaagatcctatggagattttcgttgacgatgaaacgaaacttacactccacggcctacagcagtactacgtcaagctgaaggacaatgaaaagaatagaaagttgtttgacctcttggatgtcttggaattcaaccaagtggtgatctttgtgaagagcgtacaacggtgcatagccctggcacaactactggtagagcagaacttccccgcaatcgccatccatcggggcatgccccagtag

SEQ ID NO: 231594 - DNA, 594 bp, Artificial Sequence
  derived and/or modified sequence
atggccgagaacgatgtcgacaacgagctcttggattatgaagacgatgaggtggaaactgctgcggggggagatggggctgaggccccggcaaaaaaagacgtgaaagggagctacgtttctattcactcatctggtttcagagactttctcctgaagcctgagctgctccgcgccattgtagattgtggtttcgagcatccttctgaggttcaacacgaatgcatcccccaggcaattctgggcatggatgtattatgccaggccaagtcagggatggggaaaactgccgtctttgtcctggccacactgcagcagctggagccggtgacgggtcaagtctgtttttgtgatagccatttcccaaggggcgataacgaagaactacatctaccttacgtgtctgtatatttcctccctaaggtgtctgtgctggtgatgtgccacacccgggagttggccttccagattagcaaagagtatgaacgatttagcaaatatatgccaaacgtcaaggtggccgtttttttcgggggactgtctataaaaaaagacgaggaggtgctaaagaaaaactgcccccatatagtttag

SEQ ID NO: 231595 - DNA, 564 bp, Artificial Sequence
  derived and/or modified sequence
tgatctgaggagagagacataggaaaacccatggagatcttcgtggacgatgaaacaaaactaacactacacggtctgcagcagtactacgtcaagctgaaggataacgaaaagaaccgaaagttgtttgacctgttggacgtgctggaattcaatcaagtcgtgatattcgtgaagtcagttcagaggtgcattgcgttagcccaactccttgttgagcaaaattttcctgctatagccatccatcgcgggatgccccaggaggagagactgtccagataccagcagttcaaagattttcaacgccgaatcctcgtggccacgaatctgtttggacgcgggatggatattgagcgagtgaatattgcttttaactacgacatgcccgaagactccgatacttacttacacagagtcgcacgggccggacgttttgggaccaaaggattagccatcacctttgtgtccgatgaaaatgatgcgaagattcttaacgacgtgcaagatcgatttgaagtgaatatttctgagttgccagatgagatcgatatcagcagctattag

SEQ ID NO: 231596 - DNA, 195 bp, Artificial Sequence
  derived and/or modified sequence
taggccacccttcagcagcttgaacctgtcacaggacaggtgagcgtcctcgtgatgtgccacacacgtgagcttgctttccagatatccaaggagtacgaaagattctcgaaatacatgcccaatgtgaaggttgccgtgttttttggtggtctgagtatcaagaaagatgaggaggtgttgaagaaaaactag

SEQ ID NO: 231597 - DNA, 78 bp, Artificial Sequence
  derived and/or modified sequence
tgagcaactcttcaacaactggaacctgtgaccggccaggtttcagtattggtgatgtgtcacaccagggagctatag

SEQ ID NO: 231598 - DNA, 66 bp, Artificial Sequence
  derived and/or modified sequence
tgagctactctgcaacagctggagccggttacaggccaggttagtgtgttagtcatgtgtcactag

SEQ ID NO: 231599 - DNA, 870 bp, Artificial Sequence
  derived and/or modified sequence
atggccgagaacgatgtggataacgaactgctagattatgaggacgacgaggtcgagaccgccgccggcggggatggcgctgaggcccctgccaagaaggacgtcaagggaagctatgtgagtatccacagtagcgggttccgcgacttcttgctgaaacctgaactcctgagggcaatcgttgactgcgggtttgaacacccctctgaggtgcagcatgaatgcatccctcaagcaatattgggaatggacgtcttatgccaggcaaaatctggaatggggaaaactgctgtatttgtgcttgctaccctgcagcagcttgaacccgtgacagggcaagtctctgtgctcgtgatgtgccacacacgcgagttggcctttcagatatccaaagaatacgagcggtttagtaagtacatgcccaatgtcaaggtcgcagtcttcttcgggggactgtctatcaagaaggatgaggaggttctgaaaaagaactgtcctcacatagtggttgggacccctggacgcatactggcacttgctcgcaacaagtccttgaacctcaaacacattaagcatttcatattagatgaatgcgacaaaatgctggagcagctggacatgaggagagatgttcaggagattttccgaatgacaccgcatgaaaagcaagtcatgatgttcagcgcgactctaagtaaggagattagacccgtctgccggaaatttatgcaagacccgatggaaatcttcgtagacgacgaaactaagcttactcttcacgggctgcagcagtactatgtcaagctcaaagataatgagaaaaaccggaagttattcgacctgcttgatgtcctcgaatttaatcagtag

SEQ ID NO: 231600 - DNA, 711 bp, Artificial Sequence
  derived and/or modified sequence
atggctgagaacgacgttgacaatgagttgctggactacgaggacgacgaggtagaaaccgctgccgggggagacggagccgaggcgcctgctaaaaaagacgtcaaaggcagctacgtatccatccactccagcggattccgcgatttcttgctcaagcccgaactgctccgagccattgttgattgcggttttgaacacccgagcgaagtacaacacgagtgcattccacaggcaatattagggatggatgtgctgtgccaggctaaaagcggtatgggcaagactgcagttttcgtgctggcaacactgcagcagttggaacccgtgaccggacaagtctcagtgctagtaatgtgccatacaagggagttagccttccagattagtaaagaatacgaacgcttctctaagtacatgccaaatgtcaaggtggccgttttttttggggggctatccattaaaaaagatgaagaggtgcttaagaagaactgcccacacatcgtcgtcggtacccccggccgaatcctggccctggccaggaacaaatccttgaatctgaaacatatcaaacattttatattggacgagtgcgacaagatgttggagcagctagacatgcgaagggacgtgcaggagattttcaggatgacaccacatgagaagcaggtcatgatgttctcagccacattatcaaaagagatccggtag

SEQ ID NO: 231601 - DNA, 711 bp, Artificial Sequence
  derived and/or modified sequence
atggctgaaaacgacgtggacaatgaactcctcgactatgaggacgacgaggtcgagacagcagccgggggagatggggcagaagcaccagccaagaaggacgtcaagggatcatatgtatcgatccactcctccggcttcagagacttcttgctgaagccggagttactgagagccatcgtggattgtggtttcgagcatccaagtgaggtgcagcacgagtgtattccacaagcgatcttgggcatggatgtactctgccaagccaagagcggtatgggcaagaccgccgtctttgtgctcgccactttgcagcaactggagccggtcacaggtcaggtgtccgtcctggtgatgtgtcacaccagggagctggcgttccaaattagcaaagagtacgagaggttcagtaaatatatgcccaatgtgaaagtagcggtattttttggtgggctctcaatcaaaaaagatgaagaggtgctgaagaagaattgcccccatattgtggtaggcacccccggtcggatactcgcactggcgcggaacaagtcgcttaacctcaagcatattaagcattttatcctggatgagtgtgataagatgttggaacagcttgacatgaggcgggacgttcaggagatctttcggatgaccccgcacgagaagcaggtgatgatgtttagcgctacgctctccaaggagatccggtag

SEQ ID NO: 231602 - DNA, 978 bp, Artificial Sequence
  derived and/or modified sequence
taggctaccctgcagcagctggagccagtcacaggtcaggtgtcagtcctggtcatgtgtcatactcgcgagcttgcatttcagatctccaaggagtacgagcggttctctaaatatatgccaaacgtcaaggtggctgtctttttcggaggcctgtctataaagaaggatgaggaagtcctaaagaagaattgcccccatatagttgtgggcacaccaggacgtatattggccctggctcgaaacaaaagtttaaacttgaagcacattaaacacttcatcttagatgaatgcgataaaatgctggagcagctggatatgcgaagggacgtgcaggaaatcttcaggatgaccccacacgagaagcaagtgatgatgtttagcgctacactctcgaaagagatcaggccggtgtgcagaaagtttatgcaggatcccatggagatttttgtagatgatgagacaaaactgacgctacacgggctccagcagtactatgtgaagctgaaggacaacgagaaaaacagaaaattatttgacttgctcgatgtcctggaatttaaccaggttgtgatctttgttaaatctgtccagcggtgtattgcattggcgcaattgctggtggaacagaatttcccggcaatcgcaattcacagaggaatgccccaggaggagcggctgtcccgatatcagcagtttaaggacttccagcgccgcatactggtggcaacaaacttgttcgggcggggaatggacatcgaacgcgttaatattgcttttaattacgatatgcctgaggacagtgacacatacctacatagatgttaccccctctcacccagcaggtggccggagcaggccgggctggccccccgcgcttggctgtctcacctctgtccgatgcgaatgatgcctcgtagctccatgatgtgtcgcatcgctttacgatctatactggtttcatgtctgatgcggtag

SEQ ID NO: 231603 - DNA, 717 bp, Artificial Sequence
  derived and/or modified sequence
atggcagagaatgacgttgacaacgagctcttagactatgaggatgacgaggtcgaaacagccgctggcggggacggcgccgaggccccagcaaaaaaggacgtgaagggcagttacgtgtcaatacattcgagcgggtttcgtgactttctcctgaaacccgagcttcttcgggccatcgtagattgcgggttcgaacaccctagtgaagttcaacacgaatgcattccacaggccattctgggcatggatgtcctgtgccaggccaagagcggaatggggaagacggccgtgtttgtactggctacactacagcagcttgagcccgtcactggccaggtgtcggtcctggtgatgtgtcacactcgagagctcgcgttccagatatctaaggagtatgagcgattttcaaagtacatgccaaatgtcaaggtggccgtattctttgggggactgagtataaagaaggatgaagaggttctgaaaaagaattgcccacacatcgtcgtaggcacaccgggccggattttggctcttgccagaaacaaaagtctgaacctgaaacatatcaaacattttattctggacgagtgcgacaaaatgctggagcagttggacatgagaagggacgttcaggagattttccggatgacgcctcatgaaaagcaagtcatgatgttttctgccacgctcagcaaagagatccggcccgtgtag

SEQ ID NO: 231604 - DNA, 717 bp, Artificial Sequence
  derived and/or modified sequence
atggccgaaaacgatgtcgacaatgaactgttagattatgaagatgatgaagttgagactgctgcaggtggcgatggtgcagaggcacccgcaaagaaagacgtaaagggatcctacgtatccatccactccagtggatttcgagacttcctcctcaagccagaactgttacgcgcaatcgtcgattgcggtttcgagcacccttcggaggttcagcatgaatgcatcccacaggcaatactggggatggacgtgctgtgccaagctaaaagcgggatgggcaagacagctgtttttgtcctggcaactctgcaacagctcgaacccgtgacaggacaggtgagcgtcctggtcatgtgccatacccgagagttggccttccaaatcagtaaagaatacgaacggttttcaaagtacatgcctaacgtgaaggtggccgtgtttttcggtggattgtcaattaagaaggacgaggaggtcctgaaaaaaaactgtccacatattgtcgtaggtaccccaggacgtatactcgctctggctaggaacaaatctctgaacctaaaacacattaagcatttcattctagacgaatgtgacaaaatgctcgagcaactcgacatgcgacgcgatgtccaggaaatcttccggatgacaccccacgagaaacaggtgatgatgttctcagccacgttgtcaaaggagatcaggccagtgtag

SEQ ID NO: 231605 - DNA, 870 bp, Artificial Sequence
  derived and/or modified sequence
atggccgagaatgatgtcgataacgagctcctagactatgaagatgatgaagtcgagaccgccgctggaggagatggcgctgaagctcctgctaagaaggatgtcaagggctcatacgtcagcatccatagcagtgggtttagggattttcttctgaagcctgagctcctgcgcgctatcgtggattgtggattcgagcatccgtccgaagtacaacacgaatgcattcctcaagctatactgggcatggatgtcctgtgtcaagcaaagagtggaatgggtaaaactgcggttttcgtgcttgctactcttcagcaattagagccagtgaccggacaggtgtccgtcctggtgatgtgccatacacgagagttggcctttcagatatctaaggagtatgagcggttttccaaatatatgcccaacgtcaaggtggctgtatttttcggcggcttgagcatcaagaaggacgaagaagtgctcaaaaaaaactgcccacatatcgttgtcggcacccctggccggattctggccttggcaagaaacaagagcttaaacctgaagcacatcaaacactttatacttgacgagtgcgacaagatgttggagcagttggacatgcgtcgggatgttcaggagattttccggatgacaccacatgaaaagcaagtcatgatgttctcagcgaccctctcaaaggaaatacggccagtctgccgcaagtttatgcaggacccaatggaaatattcgtggatgacgagacaaaactgacattgcacggtcttcagcagtactacgtgaagttgaaagacaatgagaaaaaccgaaagctgttcgacctgcttgacgtcctggaatttaatcagtag

SEQ ID NO: 231606 - DNA, 1278 bp, Artificial Sequence
  derived and/or modified sequence
atggccgagaatgacgtagataacgagctcctggattatgaagacgacgaagtggaaaccgccgccggcggggacggcgccgaggcgccagctaagaaggacgtgaagggttcctacgtcagtatccattccagtggattccgcgactttctcttgaaacccgaactcctgagagcaatcgtcgactgcgggtttgagcatcctagtgaagtgcagcacgaatgcatcccccaagctattctcgggatggatgtgctttgtcaagcgaagtctggaatgggcaagactgcagtgtttgtgctggcgactctccagcagctggagcctgtgaccggccaggtttccgttctggtcatgtgtcacacacgggagctagcctttcagatcagtaaggagtatgaaaggtttagtaagtatatgcccaacgtaaaggtagccgtgttttttggcggcctgtccattaaaaaggatgaggaagtgcttaagaaaaattgcccacacatcgtggtgggtaccccggggcgtattcttgcattggccagaaacaaaagcctcaatttgaaacacattaagcactttatcctcgatgagtgtgataaaatgctagagcagctggacatgagacgagatgtgcaagaaattttcagaatgactccacacgagaaacaggttatgatgttctccgccactctgtccaaagagataagacccgtttgtagaaagttcatgcaggatcctatggaaattttcgtggacgacgagaccaagcttaccctccacggattgcagcagtactacgtgaagctgaaggataatgagaagaacagaaaactgtttgatctgctcgatgtgctagagttcaaccaggtagtcatctttgtcaagtcagttcagcgctgcattgccctggcgcagttgctggttgagcagaattttcctgctattgcaatacatcggggaatgccccaagaagaacgactttctcgctaccagcaattcaaggacttccagcgacggatccttgtggccaccaacctcttcggacgtggtatggacatcgagcgagtgaacatcgcgtttaattatgacatgcctgaggatagtgacacctatctgcataggtgttacccactgtctccatccaggtggccggaacaagcaggcctggcccctagggcctggctctctcacctgtgtccaatgaggatgatgccccggtcctcgatgatgtgcagaattgcattaaggagcatcctggtgtcatgcctcatgcgttag

SEQ ID NO: 231607 - DNA, 411 bp, Artificial Sequence
  derived and/or modified sequence
atgggggggggcaggaggccgtacgatgtgttctttagcaaagtaatggcggaaaatgacgtggataacgaattgcttgattacgaggacgacgaggtcgagaccgccgccggcggcgatggggcggaagcacccgcaaaaaaagacgtgaaaggaagctatgtgagcatacactctagtggtttccgggactttttgctgaagcctgaactgcttcgggccatcgtcgactgtggattcgaacatcccagcgaggttcagcacgagtgtatcccccaagccatcctcggcatggacgtactgtgccaggcaaagtcaggaatgggtaagaccgcagtctttgtgctggcaaccctacagcaactggaacctgtgaccggacaagtcagcgtgcttgtcatgtgtcattag

SEQ ID NO: 231608 - DNA, 564 bp, Artificial Sequence
  derived and/or modified sequence
atgggatcatctcatattggcggactgtcgattaatgagcgtcggtgctccgctagtctgggactggtgatggccgagaatgacgtggacaacgaattgctggactatgaggacgacgaagtggaaacagcagccgggggggatggcgcagaggcaccagctaagaaagacgtcaaaggcagttacgtgtccattcactcttccgggttcagagacttcttgctaaaaccggaattgctgcgagctattgttgattgcggcttcgaacacccatccgaagtacagcatgaatgcatcccacaggcaatcctgggaatggatgttctttgtcaagctaaatcaggcatgggcaagaccgcagtgttcgtgctggccacacttcagcagctcgagcctgtcacaggacaggtgagtgtgctggtgatgtgtcacacaagagaattagccttccagatcagcaaggagtatgagagattctcaaagtacatgcccaacgtgaaagtcgcagtctttttcgggggactatcaataaaaaaggacgaggaggtgttaaaaaaaaactag

SEQ ID NO: 231609 - DNA, 399 bp, Artificial Sequence
  derived and/or modified sequence
atggcggagaatgacgttgataatgagcttctggattacgaagacgacgaagtggaaacagctgctggcggcgacggagcagaggctcctgccaagaaagatgtcaagggctcatacgtctctattcactcctcaggatttcgcgatttcctactgaaacccgaactcttgagagccatcgttgattgcggattcgaacatccatctgaggtgcagcacgaatgtattccacaggcgatattggggatggatgtgctctgtcaagccaaaagcgggatgggaaagacagctgtgtttgtccttgccacactgcaacaacttgagccagtcaccggccaggtatgtttttgtgatagccactttcctcgcggggataatgaggagctacaccttccttag

SEQ ID NO: 231610 - DNA, 870 bp, Artificial Sequence
  derived and/or modified sequence
atggccgagaacgacgtggacaatgagctgttagattatgaagatgatgaggtagagacggctgccgggggcgatggggcagaggcgcccgcaaagaaggacgtgaaaggcagttatgtgagcatccactcttcggggtttagggattttcttctgaagccggagctgctgcgtgctatcgtcgattgtggctttgagcatccctctgaagtgcaacacgaatgtatcccacaagcaatactggggatggatgtgctctgtcaagctaaatcagggatggggaagactgccgtgtttgtcctcgccactctgcagcagttagagcctgtcacaggccaagtgtcagtccttgttatgtgtcatacaagagaactggcatttcagatcagcaaggaatatgagaggttctccaagtatatgcccaacgtgaaggtggccgttttcttcggcggcctcagcataaaaaaagatgaagaagtcttgaagaagaactgtccacacatcgttgtgggaacaccagggcgcatcctggcgctggctcggaataagtctctgaatctgaaacacatcaaacattttatcctggatgaatgtgacaaaatgctcgagcagctggacatgagaagagacgttcaggaaatattcaggatgactccgcatgagaagcaggtgatgatgttttccgccaccctgtctaaagagatccggccagtctgtcgcaagtttatgcaggatcccatggagatctttgttgacgacgagaccaagcttactctccacggtctccagcagtactatgttaaactgaaggacaatgaaaaaaacagaaaactgttcgatctattagatgtgcttgaattcaaccagtag

SEQ ID NO: 231611 - DNA, 1287 bp, Artificial Sequence
  derived and/or modified sequence
atggcagagaacgacgtcgataacgagctgctcgactacgaggatgacgaggtcgaaactgcagctgggggcgatggtgctgaggccccagccaagaaggatgtgaaagggagctatgtatcaattcattctagcggtttcagagacttccttctgaaacccgagcttctccgggcaattgtggactgtggatttgagcacccctccgaagttcagcacgagtgtataccacaggccatattaggtatggatgtcctttgtcaggctaaatccgggatgggaaagacagctgtgttcgtgctggccacgctgcagcagctcgagcccgtgacaggacaggtcagtgttcttgtaatgtgtcacactcgggaactagcgtttcagattagtaaagaatatgagcgcttctcaaagtacatgcctaacgtcaaagttgcagtgtttttcggcggactctcaattaaaaaagacgaagaggtgttgaagaagaattgtccacatatagtcgtgggtactccagggagaattctggcccttgctcggaataagtccctcaatcttaaacatatcaaacatttcatcttggacgagtgtgacaagatgctcgagcagcttgatatgcggcgagacgtacaggagatcttcaggatgacgccacacgagaaacaggtaatgatgttctccgctactttaagtaaggagatacgacctgtttgcagaaagtttatgcaggatcctatggagatttttgtcgacgatgaaaccaaacttacactgcacggactacagcaatactacgtaaaattgaaagataatgaaaagaaccggaaacttttcgacttgctcgatgttctggagttcaaccaggtggttattttcgtgaaatcggtgcagcgctgcatcgccctggcccagctgttggtggagcagaattttccggccattgccatacaccgtgggatgccccaagaggaacggttaagccggtaccagcagttcaaggattttcagaggcggattctggtagccaccaacctgtttggtcgcggaatggacatcgagcgggtaaatatcgcctttaactatgatatgccagaggactccgacacctacttacatagagtggcccgagctggcagatttggcaccaaagggctcgctattaccttcgtaagtgatgaaaacgacgctaaaatcctcaacgacgttcaggatcggtttgaggtcaatatcagcgaactgccagacgaaattgacatatctagttacattgaacagacaaggtag

SEQ ID NO: 231612 - DNA, 564 bp, Artificial Sequence
  derived and/or modified sequence
atgggcagctcccacataggcggcctaagtatcaacgagcgtaggtgtagcgcctcgctgggtctggtgatggcggaaaacgacgtggacaacgaattgctggactacgaggacgatgaggttgagactgctgccggcggggacggggcagaggcacctgcaaagaaagacgttaagggctcttacgtctcaatccactcatccggtttcagagacttcttgttaaagcccgagctcttaagagccatagtggattgcggctttgagcaccccagcgaagtgcaacatgaatgcatccctcaagccattctagggatggatgtcttatgccaagccaagtcgggaatgggtaaaacagccgtctttgttctggcaaccctccagcagctggaacccgttaccggacaggtatccgtgttggtcatgtgtcacactagggagctggccttccaaatctcaaaggagtatgaacggtttagcaagtatatgccaaatgtgaaggttgccgtattttttggcggactgtcgattaagaaagatgaagaggtgcttaaaaagaactag

SEQ ID NO: 231613 - DNA, 291 bp, Artificial Sequence
  derived and/or modified sequence
atggctgaaaatgacgtcgataatgaactgttggattacgaagacgacgaagtggaaacagcagccgggggcgacggtgcagaggcacctgcaaagaaagacgttaaaggatcttatgtcagtattcacagcagcgggtttcgcgatttcctgctcaaaccagaactactacgcgccatcgtcgactgcggcttcgagcacccttcagaagtacagcatgagtgtattccgcaagcaatcctggggatggacgtgctgtgccaggcaaagagcggcatgggcaagacatag

SEQ ID NO: 231614 - DNA, 564 bp, Artificial Sequence
  derived and/or modified sequence
atgggctcatcccatatcgggggcctgtcaataaatgagaggcgctgttctgcctccttggggcttgtcatggccgagaatgatgtggacaatgagttgcttgattacgaagacgatgaggtggaaacggcagctggtggtgacggcgcggaggcgcctgccaagaaggatgtaaaaggctcttacgtctccatacattcaagcggattccgggacttcctcttgaagcccgaactactccgggccatcgtcgactgtggctttgaacatccaagcgaagtgcagcacgagtgcatccctcaggccatcctcggaatggacgtcctgtgccaggcgaagagtggcatggggaaaaccgccgtgtttgtgctagcaaccttgcaacaacttgaaccagtaacaggccaggtgtcagtgctggtgatgtgccatacacgtgagttggcatttcaaattagtaaagagtacgagcggttcagtaaatacatgcccaacgtcaaggttgcagtcttttttggcgggctgagcattaagaaagacgaggaggtactaaagaaaaattag

SEQ ID NO: 231615 - DNA, 594 bp, Artificial Sequence
  derived and/or modified sequence
atggccgagaatgacgtggataatgagctgctagactatgaggacgacgaggttgagactgccgccggaggtgacggcgctgaggcgcctgccaaaaaggacgtgaaagggtcatatgtgtccattcactcctctgggtttagagacttcctgttgaagccagagctgctccgcgcaatagttgattgtggctttgagcatccttcggaagtccaacacgagtgcatcccacaagccatcttagggatggatgtgctgtgtcaagctaaatccggtatgggtaagaccgccgtttttgtccttgccaccctgcagcagctggagccagtcactggccaggtgtgtttctgtgattcccatttccctagaggggacaacgaggagctgcatttgccgtacgtatcggtttatttcctccctaaagtgagcgttctcgtcatgtgtcatacacgcgaattagcatttcagatcagtaaggagtatgagcgcttctccaaatatatgcccaatgttaaggtagcagttttcttcggcgggctcagcatcaaaaaagatgaagaggtcctgaaaaaaaactgtcctcatatcgtgtag

SEQ ID NO: 231616 - DNA, 291 bp, Artificial Sequence
  derived and/or modified sequence
atggctgaaaatgacgtcgacaacgaactgctggattatgaagacgatgaggtcgagaccgcagctggcggcgatggggcagaggcccctgcaaaaaaggacgttaagggcagctatgtcagcatccactcgagcggcttcagggacttcctgctgaagccggaactgctgagggctatcgtcgactgcggtttcgaacatccgagtgaggttcagcatgagtgcatccctcaggctattctcgggatggacgtactgtgtcaagccaaatctggtatggggaaaacctag

SEQ ID NO: 231617 - DNA, 696 bp, Artificial Sequence
  derived and/or modified sequence
atggctgagaatgatgtggataatgagctccttgactatgaggacgacgaagtggagaccgcggcaggcggggacggggctgaggcccccgctaaaaaagacgtcaaaggatcttacgtaagtattcatagttcaggcttccgcgattttctgctaaagcctgaactactgagggctatcgtggactgcgggtttgagcatcccagcgaagtgcaacatgagtgcataccccaggcgattctgggcatggacgtcctgtgtcaagccaaatccggcatgggcaagaccgctgtgttcgtgctcgccaccctccaacagttagagcctgtaactggtcaagtgagcgtcctggtcatgtgccatacacgggagctcgcatttcagatctctaaggagtacgaacgatttagcaagtatatgcctaacgtgaaagtcgccgtttttttcggaggtctgtccattaagaaggacgaggaagtgctcaagaaaaattgcccgcacatcgtagtggggacgccgggacgcatcctggcactcgctcgtaacaaatcactgaacttaaaacatattaagcactttatactggatgaatgtgacaagatgctggaacagctggacatgaggagagacgtgcaggaaattttcagaatgacaccccacgagaaacaggttatgatgttctcagcaacactatag

SEQ ID NO: 231618 - DNA, 696 bp, Artificial Sequence
  derived and/or modified sequence
atggcagaaaacgacgtggacaacgagctcctggactatgaagatgacgaagtcgaaactgccgccggtggggatggcgcagaggcacctgctaagaaggacgtaaagggtagctacgtgtctatccattcatccggctttcgggacttcctactgaagccagaattactgcgggcgattgttgattgtggcttcgaacatccaagtgaagtgcaacacgaatgcatcccacaagccattcttgggatggatgtgctgtgtcaagctaaaagcggaatgggtaagactgcagtcttcgttctggctacactgcaacagctagaacccgtgacagggcaggttagcgtgctcgttatgtgccacacgagggagttggcatttcagattagcaaagagtacgagaggttcagcaaatacatgcctaatgtgaaggttgcagttttcttcggagggctgagtattaaaaaggacgaggaggtactgaagaagaactgcccccacatcgtggtgggcactcctggccggattctcgctcttgcaaggaataaatcactcaatctgaagcacatcaagcacttcatccttgacgaatgtgacaagatgctcgaacagcttgacatgcgcagagatgttcaggagatctttcgcatgaccccccacgaaaaacaggtaatgatgtttagcgcaacactctag

SEQ ID NO: 231619 - DNA, 717 bp, Artificial Sequence
  derived and/or modified sequence
atggctgagaatgacgttgacaatgagttgttggactacgaggacgacgaggtagaaaccgcagctggcggggatggagccgaagccccggctaaaaaagacgttaaaggttcttacgtgtccatccattcatcgggttttcgagacttcctgctgaaaccggagctattgcgtgcgattgtcgattgcggattcgaacacccgtccgaagttcagcacgaatgtatccctcaggcgatactgggtatggacgtgttgtgtcaggctaagtctgggatgggcaagaccgccgtattcgtgcttgccaccttacagcagctggaaccggtaaccggacaagtgtcagtgctggtcatgtgccacacacgggaattggccttccaaatttccaaggagtatgaaaggttttcaaaatacatgcctaacgtgaaagttgccgtcttttttggcgggctgtctattaaaaaagatgaggaagtgctgaagaagaactgcccgcatattgtggtgggtactccaggacgaatcctggccctggccaggaataaaagcctgaatttgaagcacatcaagcacttcatactggatgagtgtgacaagatgttagaacagctggatatgcggagagacgtacaggagatattcagaatgactcctcacgagaagcaggtgatgatgttttctgccaccctgtcaaaggagatcaggcctgtgtag

SEQ ID NO: 231620 - DNA, 1287 bp, Artificial Sequence
  derived and/or modified sequence
atggccgaaaacgatgtcgataacgaactcctggactacgaagatgacgaggtggagactgccgcgggcggggacggagccgaggctccggccaaaaaagacgtgaaggggtcttacgtttcaatccatagcagtggttttagggactttctgcttaagcccgagttgctaagagccatcgtggactgcggtttcgaacacccatctgaagtccaacacgaatgcatcccgcaggcgatcctgggaatggacgtcttatgtcaggctaaaagcggcatggggaagaccgctgtgttcgtgctcgcgactctgcagcaactggaacccgtaaccgggcaggtgtccgtgctggtcatgtgtcacactagggaattggcctttcagatttccaaagagtacgagaggttcagcaaatacatgccgaacgttaaagtggcagtttttttcggcgggttaagtatcaagaaggatgaagaggtgctaaagaagaactgtcctcatatcgtcgtcggaactcccggccggattctcgctctggcgaggaataagagcctgaacttgaagcatatcaaacacttcatcctggacgagtgcgataagatgctggaacaactagacatgaggagggatgtacaggagatcttcagaatgactcctcatgagaaacaggtcatgatgttcagtgccacgcttagtaaggagattcgcccagtctgcagaaagttcatgcaagatcccatggagatatttgtggatgatgagacgaagcttacactgcacggactacagcagtattatgtgaagctaaaggacaacgagaagaacagaaagctgttcgacctgttggatgtgctcgaattcaaccaggtcgtgatcttcgtcaagtcagtgcaacgctgtatcgccctggctcagcttctggtggaacagaacttcccagctattgcaatccaccgtggcatgccacaagaagagcgccttagtcgctaccagcagtttaaagacttccagagaagaatcctagtagcgaccaatctgttcggtcggggaatggacattgagcgagttaatatcgcgtttaactatgatatgcccgaggacagcgacacttatctgcaccgggtcgcccgagccgggcgatttggaaccaagggtctggcaatcactttcgtaagtgacgaaaacgatgccaagattttgaatgacgtgcaagatcggtttgaagtaaatattagcgaactgcccgacgagatagacattagcagctatatagagcaaacacgctag

SEQ ID NO: 231621 - DNA, 564 bp, Artificial Sequence
  derived and/or modified sequence
tgaagtgaagaacgggacattgggaagcccatggagatcttcgtcgacgacgagacaaaactgacgttacacgggctgcagcagtattatgtcaaattaaaagacaacgaaaaaaataggaagcttttcgaccttctggatgttctcgagttcaaccaagtcgtgattttcgtgaagagcgtacagagatgcatagctctagcccagctcctggtcgagcagaattttcccgcgatcgccatccaccgggggatgccccaggaggagcggctgagccggtaccagcagtttaaagacttccagcgcagaatcctggtagctacgaacctgtttggaagaggaatggacattgagagggttaatatcgctttcaactacgacatgccggaagattcagacacttacctgcatagagtcgcacgcgccggacggtttggcactaagggattagccattacctttgtgtcagatgagaatgatgccaagatcctgaatgatgtgcaagatcggttcgaggtcaatatttccgagttgccggatgaaattgacatttcttcgtattag

SEQ ID NO: 231622 - DNA, 564 bp, Artificial Sequence
  derived and/or modified sequence
atgggcagtagccacatcggaggcctatcgatcaacgagcgccgatgttctgcctcgcttggtctcgtcatggctgaaaatgacgtcgacaatgaactcctagactacgaggacgacgaggtggagaccgccgccgggggtgacggcgcagaggccccggccaagaaggatgtgaaaggctcctacgtctcaattcattcttcgggctttcgggacttcctgttgaagccagagctgctgcgcgctatcgtggattgcgggtttgagcacccttccgaggttcagcacgaatgcattcctcaggcgattctgggtatggacgtgctttgccaagcaaaatccgggatgggtaaaaccgccgtgttcgtgctggcaacactgcaacagctcgagcctgttaccggacaagtgagcgtattagttatgtgccacacacgggaattagcattccagattagcaaggagtatgagcgttttagcaaatacatgcctaacgtaaaagtggccgtgtttttcggaggcctgagtattaagaaggacgaagaggttctgaaaaagaactag

SEQ ID NO: 231623 - DNA, 717 bp, Artificial Sequence
  derived and/or modified sequence
atggcagaaaacgacgttgataatgagctgcttgattatgaagatgacgaagtggaaacagctgccggcggcgatggcgccgaggcaccggccaaaaaggacgtgaaggggtcatacgtgtcaatacattcaagcgggtttcgcgatttcctgctgaaacccgaattgttacgcgcgattgttgactgtggattcgagcatccctccgaggttcaacatgagtgcattcctcaagctatcctgggtatggatgtcctgtgccaggctaagtccggcatgggcaaaacagccgtttttgtgttggcaaccctccagcagctcgagcctgtcacaggtcaggtctccgttctggtgatgtgccataccagggagctggcttttcagatctccaaggagtatgaacgattttccaaatacatgcccaacgtaaaagtcgcagtattcttcggtggacttagcatcaaaaaagatgaagaagtcttaaaaaagaattgtccacacattgttgtggggacccctggcagaatcctggctctagctaggaataagagcctgaatctcaaacatattaagcacttcatcttggacgagtgtgataagatgctggaacagttggatatgcggcgcgacgtgcaggagatcttcaggatgacaccacacgagaagcaagtcatgatgttctctgcaactttgtcgaaggaaatccgccccgtgtag

SEQ ID NO: 231624 - DNA, 738 bp, Artificial Sequence
  derived and/or modified sequence
atgtggaccatgagctcctggaccatgaaaatgatgcgctggcggcagcaactaggtgagatgggcctcaggcccttaccgagacgtatgtctagggcacccatgagcccctctacagcacttgcatttgtcacatcctgcagcagccagtcatgttcagggcccctgagcacagttgctctgagtatcaggcagaaggtcgcagttttctttggggggttaagcataaagaaagacgaggaagttctcaagaagaactgtccccacattgtcgttggaacccctgggagaattctcgccctggcgagaaacaagagcctgaatctgaagcacatcaaacacttcattctagacgaatgtgacaaaatgttggaacagttagacatgaggcgcgatgttcaggagatcttccgcatgacgccacatgagaagcaggtgatgatgttctccgcaacattgagcaaagagattagaccagtgtgccgcaaatttatgcaggacccaatggagatttttgtggacgacgaaacaaagcttaccctgcacggcctgcagcagtattacgtgaagctgaaagataacgagaaaaataggaaactcttcgacctcttggacgtgctggagttcaaccaggtggttatcttcgttaagtccgtgcagaggtgtattgccttagcccagctcctggttgagcagaattttcctgcaatcgctatacaccgcggcatgccccagtag

SEQ ID NO: 231625 - DNA, 1278 bp, Artificial Sequence
  derived and/or modified sequence
atggccgaaaacgatgttgataacgagctgttggactatgaggacgatgaggtcgaaacggccgctggaggtgatggcgcggaggcccctgcaaagaaagacgtaaaaggtagttatgtatccatacactctagcgggtttagagactttctgcttaaaccagagctcctaagagctattgtggactgtgggtttgaacaccccagcgaggtgcagcacgaatgtattccccaggcaatcttgggcatggacgtgctctgtcaggctaagagtggaatgggtaagactgccgtcttcgtcctcgctaccctacagcagttggagcctgtcactggtcaggtatccgtcctagtgatgtgccacacccgagaattagcatttcagatatcaaaagaatatgagcggtttagcaagtacatgcctaatgtgaaagtcgccgtgttcttcggcggactgagcatcaagaaggatgaggaagttctgaagaaaaattgcccccatatcgtggtgggtacacctgggagaatactagcgcttgcgaggaataagtctctcaacctgaaacatataaaacattttatcctagacgaatgtgacaaaatgcttgaacagctggacatgagaagagacgtccaggagatttttcgcatgactccgcatgagaagcaggtgatgatgttttcggcaaccttaagcaaggagatcaggccagtctgtcggaagttcatgcaggaccctatggaaatctttgttgatgatgagaccaaactgaccttacatggcctacaacagtattatgttaaactgaaggacaatgagaagaaccggaaactgttcgacctgctcgatgtgcttgaatttaaccaggtggtgatcttcgtcaagtctgtgcagaggtgcattgccttggcccagctccttgtggaacagaactttcccgccatagctatccaccggggtatgcctcaggaagagcgcctgtcccggtatcaacagttcaaagactttcagcgccgtattctagtagcaaccaatctgttcggcagggggatggacattgagcgggtgaacatagccttcaactatgatatgccggaggatagcgatacttacctccatagatgttatccccttagtccttcaagatggcccgagcaggccggtctggctccccgggcctggctcagtcatctgtgtcctatgagaatgatgccccgcagcagcatgatgtgcagaatcgctcttcggagtatcttagtgagctgcctcatgcgttag

SEQ ID NO: 231626 - DNA, 711 bp, Artificial Sequence
  derived and/or modified sequence
atggcggaaaatgacgtagataacgaactgctggactatgaagacgacgaagtcgagacagccgccggcggagacggagccgaagctccggccaagaaggacgtgaagggctcttatgtgagcattcattccagcggtttcagggatttcctgctcaagccagagctgctgagagccatagttgactgtgggttcgagcatcccagcgaggtgcagcatgagtgcatcccacaggctatcctggggatggatgttctctgtcaggctaaatctggaatgggaaaaacagctgtatttgttctggcgaccctgcaacagctggagccggttacggggcaggtgagcgttttggttatgtgccacacccgcgagctggcctttcagatcagtaaagaatatgagcggttttcaaaatatatgccaaatgtgaaggttgccgtcttctttgggggcctgagcataaagaaggacgaggaggtgttaaaaaaaaattgtcctcatatcgtggtgggaaccccaggccgcatactggcacttgcacgcaacaagagcttgaatttaaaacatattaagcattttatactggatgagtgcgataagatgctggaacagcttgatatgcgcagggatgtccaagagatattccgaatgaccccacacgaaaagcaggtgatgatgtttagtgccacattgtctaaagagatccggtag

SEQ ID NO: 231627 - DNA, 738 bp, Artificial Sequence
  derived and/or modified sequence
atgtggactatgtcttcctggacaatgaagatgatgagatggcgacagcagcttggagaaatgggactgcggcctctgccaagacgcatgagccgcgccccaatgagtccttcaacagctctggccttcgtgacctcatgctcctcacagagctgcagcggtcccctgagcacggtcgctctttccattaggcagaaggtggccgtctttttcggagggctgagcatcaagaaggatgaagaggtgttgaagaagaattgtccccacattgtggtgggcacaccaggtagaatccttgccctcgcaaggaacaagtccctgaatttaaagcatatcaaacatttcatcctcgatgagtgcgataagatgttagagcagctggacatgagacgcgatgtgcaggagatattcaggatgaccccgcacgagaaacaggttatgatgttcagtgcaaccctctcaaaagagattagacctgtatgtcgtaaattcatgcaagatccaatggaaattttcgtggatgatgaaacgaagctgacactccatggcctgcaacaatactatgtgaaactaaaggacaacgagaaaaacaggaaactgttcgacctattagatgtgctggagtttaaccaggtggtgatcttcgtcaagtcagtgcagagatgtattgctcttgcccagctactcgtagaacagaactttcccgccattgctatccatcgtggcatgcctcagtag

SEQ ID NO: 231628 - DNA, 1287 bp, Artificial Sequence
  derived and/or modified sequence
atggccgaaaatgacgtagacaacgaactcttggattacgaggatgatgaggtggaaactgccgccggtggtgacggagcagaagccccagccaaaaaagatgttaaaggaagctatgtgagcatacattcttccggttttagggatttcttattgaagccagagctgctccgggctattgtagactgcggcttcgagcacccttcggaggtgcagcatgaatgtatccctcaggccatactcggaatggatgtcctgtgccaggccaagagcggtatgggcaagactgctgtcttcgtgcttgccactctgcagcagctggagcccgtgaccggccaagtgagcgtgctcgtgatgtgtcatacgagggaactggccttccagatctccaaagagtacgagcgctttagcaaatatatgcccaatgttaaggtcgctgtgttctttggcggcctgtcaatcaagaaggacgaagaagtgcttaaaaaaaattgcccccacattgtggtgggaacccctggtcgcatcctcgcgctggctcggaataagagtctgaacttaaaacatattaagcattttatcttggacgagtgcgataaaatgctcgaacagctggacatgcgtcgagacgtgcaagaaatctttaggatgactccccacgagaaacaggtgatgatgttcagcgcgacacttagtaaggaaattcggcccgtatgcagaaaattcatgcaagacccaatggaaatttttgtggacgacgagacaaaactcaccttgcacggactccagcagtactacgtgaaactgaaagataatgagaaaaatcgaaagctgttcgatctgttagatgttctggaatttaaccaggtcgtcatcttcgtcaagagtgtacagaggtgcattgcgctggcacagcttctggtcgagcagaactttcccgccattgccattcatagggggatgccacaggaagaacggcttagccgctatcagcagtttaaggactttcagagacgaattcttgtcgccacaaatctgtttggacgcggtatggacattgaacgcgtgaacatcgcttttaactacgatatgccagaagattccgacacttatttacaccgggttgcccgggccgggcgattcggaacaaaaggcttggcaattacattcgtgagcgacgaaaacgacgccaagattttgaacgacgttcaggacaggtttgaagtgaatatttcagaacttccagacgaaattgacattagcagctacatcgaacagactaggtag

SEQ ID NO: 231629 - DNA, 411 bp, Artificial Sequence
  derived and/or modified sequence
atggggggaggccggaggccttacgacgtttttttcagcaaagtcatggccgaaaacgacgtcgataacgagttactcgactacgaagacgacgaggtggagacggcagccggaggtgacggcgctgaggctcctgccaaaaaggatgtcaaaggttcctatgtgagcattcatagctccgggtttcgggatttcctgctgaagcccgaactcttacgcgccatcgtggactgcgggttcgagcatccatccgaagttcagcacgagtgtataccccaggctatcctcggaatggatgtgctctgtcaggccaaatccgggatggggaagacggccgtctttgtgcttgccactctgcagcagctggagccggttacaggacaggtgtccgtgctggtgatgtgccactag

SEQ ID NO: 231630 - DNA, 987 bp, Artificial Sequence
  derived and/or modified sequence
tgagccacgttgcagcagctcgagccagtgaccggtcaggtgtcagtacttgtgatgtgtcatacacgcgaactcgcctttcagatatccaaagaatatgaacgtttcagtaagtatatgcccaacgtgaaagtcgccgtgtttttcggcggattaagcatcaagaaggatgaggaagtgctcaagaagaactgtccacacatagtagttggcactccaggccggattctcgccctggcaagaaacaaatctttaaacctgaagcatatcaaacactttatcctagatgagtgcgacaagatgctggaacagctggatatgaggagagatgttcaggagatattcagaatgaccccccacgaaaagcaagtgatgatgttttccgctaccctgtctaaagagatccgcccagtgtgtaggaagtttatgcaggatccaatggagattttcgttgacgacgaaacaaagctaacactccacggcctgcagcagtattatgtcaaactgaaagacaatgaaaaaaatcgtaagctcttcgacctgctggacgttcttgagtttaaccaagtggtgatatttgtcaagtcagtgcaacggtgcatcgctttggcccaactcctcgtcgaacagaacttcccagcaattgcaatccacagaggaatgccacaggaagagcgtctatctagatatcagcagttcaaggattttcagcgaaggatcctggtggcaactaacctttttggcaggggaatggacattgaacgagttaatatcgccttcaattatgatatgccagaggatagtgacacctacttacaccgcgtggctagagcagggcgcttcggtaccaaaggtctggccatcacttttgttagtgatgaaaacgacgccaaaattttgaatgatgtccaggacagattcgaggtgaatatcagcgaactgcctgacgaaattgatattagttcatatattgagcagacccggtag

SEQ ID NO: 231631 - DNA, 399 bp, Artificial Sequence
  derived and/or modified sequence
atggctgagaacgacgtggataacgaactgcttgactacgaagatgacgaggtcgagacagcagcaggcggagacggcgccgaagcccctgccaagaaggacgttaagggctcctatgtgtccatacatagctctggcttcagagatttcttattaaaacccgaacttctcagggcaattgtcgactgcggctttgaacatcctagcgaggtacagcatgagtgcatcccccaggccatacttgggatggatgtgctctgtcaagcaaagtccggtatgggcaagacggccgtcttcgtgttggcaaccctgcagcagttggagcccgtgactggccaggtgtgtttttgcgacagtcactttccgcgaggtgacaacgaagagctgcacctcccttag

SEQ ID NO: 231632 - DNA, 420 bp, Artificial Sequence
  derived and/or modified sequence
atggcagaaaacgacgtcgataacgagctgctcgactacgaggacgacgaagtcgagaccgctgctggaggtgatggtgccgaggcacctgccaaaaaggatgtaaaaggctcgtatgtgagcattcatagctcaggcttcagagacttcttactgaagcctgaactgctaagggcgattgtggactgtggattcgagcacccctccgaggtgcaacacgaatgtatccctcaagccatcttaggaatggacgtcctgtgtcaggctaagagtggaatgggtaagacagcggtgttcgtgctcgccaccctgcaacagttggagcccgtaacaggtcagtcacatgagcacatgaccagtgtgacactcgataacctcaccgctgtgggagacgtgctgagccaagcctggggctcttag

SEQ ID NO: 231633 - DNA, 717 bp, Artificial Sequence
  derived and/or modified sequence
atggctgagaacgacgtggataacgagctcctagattacgaggatgatgaggtggagacagccgccggcggggacggggccgaggcacccgccaagaaagacgtgaaaggatcctacgtatcgatacattcctctgggtttcgcgacttcctcctgaagccagagctcctcagagccattgtggattgcggctttgagcatccgtccgaggtccagcatgagtgcattccccaagccatcttgggcatggacgtactttgccaggccaagtctggtatgggaaaaacagcagtgtttgtccttgccacactgcagcagttagagcccgtgaccggtcaggttagcgtgctcgttatgtgccacactagggagctggcatttcagatttccaaggagtatgagcgattcagcaagtacatgcccaatgtgaaggtcgctgtgttcttcggaggactgagtattaaaaaggatgaggaggtgttgaagaaaaactgcccacacattgttgtgggcacccctggaagaatcctcgctctggcccggaacaagtctttaaatttgaaacacattaaacatttcatccttgacgaatgcgataagatgctggaacagctggacatgcgcagggacgtccaagagattttccggatgactcctcacgagaaacaggtcatgatgttctccgcaaccctgagtaaggaaatcagacctgtgtag

SEQ ID NO: 231634 - DNA, 564 bp, Artificial Sequence
  derived and/or modified sequence
atgggatcctcgcacattggaggattaagcatcaacgagaggcgacgctccgccagcttaggcctagtgatggctgaaaatgatgtcgataacgaactgctggactatgaggacgacgaggtcgaaaccgcggctggcggggatggggcagaggctccagccaaaaaagatgttaaaggcagttatgtgtcaatccattcaagcgggttccgggactttttgctcaagccagagctgttacgggcaattgtggattgcgggtttgaacacccaagcgaagttcaacatgagtgcatcccacaagccatattgggaatggacgtgctgtgccaggcaaagtccggtatgggcaaaactgccgttttcgtgctagccactctgcagcagttggaaccggtgactggccaggtgagtgtcttggtgatgtgccacacacgggagctcgccttccaaattagcaaggagtatgaacgatttagtaaatatatgcctaacgtgaaggttgccgtcttttttggcgggctctcaattaagaaagacgaagaggtgctcaagaaaaactag

SEQ ID NO: 231635 - DNA, 711 bp, Artificial Sequence
  derived and/or modified sequence
atggcagagaacgatgtggataacgagctgctggactacgaggacgatgaagttgagacagccgcaggcggggacggagccgaagccccagctaaaaaggatgttaaagggtcctacgtttctatccatagttctggattcagggatttcctgctcaaacccgagctcctacgtgccatcgtcgactgtgggtttgagcacccctctgaagtgcagcacgagtgcatcccccaagcgatcctcggaatggatgtcttatgtcaggctaagtcaggaatggggaaaacggccgtgtttgtcctggcaactctccagcagttagagcctgtcacaggacaagttagcgtcttggtcatgtgccatacaagggagctcgcatttcagatctcaaaagagtatgaacggttctctaagtacatgcccaacgtgaaagtcgctgtcttcttcggcggattgtccataaaaaaagacgaagaggtcttaaagaagaactgtcctcacattgttgtgggaacccccgggaggatactggcactggcgcgaaataagtccttgaacctcaagcatattaaacactttatcctagacgaatgtgataagatgcttgaacaacttgacatgcgcagggacgtacaggaaatcttccgaatgacgccccacgagaaacaggtcatgatgttctctgccacgctttcgaaggagattcgttag

SEQ ID NO: 231636 - DNA, 1278 bp, Artificial Sequence
  derived and/or modified sequence
atggccgagaacgacgtggataacgaactgctggactacgaggacgacgaggtcgaaaccgctgccggcggggacggagcagaagcacccgctaagaaagacgtgaaaggaagctatgtgagcatacacagctccggctttcgcgattttctgttgaaacccgaactgttacgggcaattgtggattgtggcttcgagcacccctcggaagttcagcacgagtgtatccctcaggccatcttgggaatggacgtcctgtgccaagctaagtcgggcatgggaaagactgccgtatttgtattggccaccttacagcagctagaacccgtgaccggacaagtctcggttctggtgatgtgccatacaagagagcttgcatttcagattagcaaagaatatgagaggttcagcaagtatatgccaaacgttaaggtggccgtgttctttgggggcttgtcgatcaaaaaagatgaggaggtgctcaaaaaaaattgcccacatatagtggttggtacccctggaaggattctcgcattagctagaaacaagagcctcaatcttaagcatatcaaacacttcattctggacgaatgtgacaaaatgttggaacagctcgacatgcgccgagacgtccaagagatttttcggatgacaccacacgaaaagcaggtcatgatgttcagtgctacactctctaaggaaatcagacctgtgtgtaggaaattcatgcaggaccccatggagattttcgttgacgacgaaacaaaactaacactgcatgggttacagcagtactacgtgaaattaaaagacaatgaaaagaataggaagcttttcgatctcctagacgtccttgagttcaaccaggtagtgatctttgtgaagagcgtgcagcggtgcattgcacttgctcagctcctagtcgagcaaaatttcccagcgattgccattcatcgaggcatgccacaagaagagagactgagccgttatcagcagtttaaagactttcagcgccgcatcctggtcgccacaaacctgttcggccgaggaatggatatagaaagagtgaacattgcattcaactatgatatgccagaagactcggatacttaccttcaccggtgctatccactatctcctagtcggtggcctgaacaagcgggactggcgcccagggcatggctgagtcacctttgcccaatgcggatgatgccccgatccagcatgatgtgcagaatcgctctgcggagtatacttgtctcctgtctcatgcggtag

SEQ ID NO: 231637 - DNA, 696 bp, Artificial Sequence
  derived and/or modified sequence
atggcggaaaacgatgttgataatgagctcctggactacgaggacgacgaagtggagaccgcagcagggggcgacggcgctgaagccccggcaaaaaaggacgtgaagggatcctacgtcagcattcatagttccggctttcgcgacttcctcctgaaaccagagcttctccgcgcaatcgttgactgcggtttcgaacaccccagcgaggtgcagcacgagtgtatccctcaggccatcctgggaatggacgtgctctgtcaagctaaatccggcatgggcaagacggccgtatttgtattagccactctccagcagctcgagcccgtcaccggacaagtgtcggtcctggtaatgtgtcatacacgcgaactcgcatttcagataagcaaggaatatgaacggtttagcaaatatatgcccaacgtaaaagtggctgtcttcttcggcggcttgtctatcaaaaaggacgaagaggtgctgaaaaagaactgccctcacatagtggtcggcacacccggaagaatactggccctggcgagaaataaatctttaaacctgaaacatatcaagcattttattttggatgaatgtgacaagatgctggagcagttggacatgcgcagggatgtacaggagatatttcggatgacccctcacgagaagcaggttatgatgttctcagccacactctag

SEQ ID NO: 231638 - DNA, 99 bp, Artificial Sequence
  derived and/or modified sequence
taagcgaccctccagcagctggagccagttactgggcaggtttgtttctgtgattcccattttcctcggggtgataatgaggagctgcacttgccctag

SEQ ID NO: 231639 - DNA, 399 bp, Artificial Sequence
  derived and/or modified sequence
atggcggagaacgacgtagataacgaattactcgactatgaagatgacgaggtcgagaccgctgccggcggcgacggagccgaggcacccgctaaaaaggatgtgaaagggagttacgtgagtatccactcatccgggttcagagatttcctgctgaagcccgaacttttgagggccatcgtggactgtggattcgagcacccaagcgaggtgcagcacgagtgtatcccccaggcaattctggggatggacgtcttatgccaggccaaaagcggaatggggaaaacggccgtcttcgtgctggccaccctgcagcaactagaaccagtgaccgggcaggtgtgcttttgcgactctcacttcccccggggggacaacgaagagcttcacctgccatag

SEQ ID NO: 231640 - DNA, 399 bp, Artificial Sequence
  derived and/or modified sequence
atggcagaaaacgacgtagacaatgagttgctcgactacgaggatgatgaggtcgaaacagctgcaggaggcgatggagcggaagcacctgccaagaaggacgttaaaggctcatacgtgagcatccactccagcgggttcagggactttctgctaaaacctgagctgctgcgtgctattgtggattgtggctttgaacacccttctgaggtccagcacgagtgcatcccccaagccatcctgggtatggatgtcctctgtcaagcgaagtccggcatgggaaaaactgccgtgtttgtgctggccaccctgcagcagctggagcctgttaccgggcaagtatgtttttgcgattcacatttcccgcgaggcgataatgaggagctgcacttgccatag

SEQ ID NO: 231641 - DNA, 738 bp, Artificial Sequence
  derived and/or modified sequence
atgtggaccatgtcctcgtggactatgaagatgatgaggtggaggcagcagttaggcgaaatgggcctccgacctctgcccagaagaatgagcagggctccaatgtcgcctagtaccgccttggcattcgtgacaagctgctcctcacagtcatgctctggacctctgtccactgtggctctgtctattcgccaaaaagtcgcggtcttcttcggggggttgtccattaagaaggacgaggaggtcctgaagaaaaactgccctcacattgtcgttggcaccccaggtagaattctggctctggcaagaaacaaaagtctgaacctgaagcatataaagcactttatcctggatgaatgcgacaagatgctcgagcaactggacatgcggagagatgttcaggaaattttcagaatgactcctcacgagaagcaggttatgatgttctccgcaaccctgagcaaagaaatccggcccgtatgccgcaaatttatgcaagatcccatggagatattcgtggatgatgagacgaagctgactctacacgggctccagcagtattacgtaaagctgaaggataatgagaaaaacaggaagctgttcgacctgcttgacgtgttggagttcaaccaggtggttatattcgtgaagtctgtgcaaaggtgtatcgcactcgcacagctgctggtggagcaaaacttccctgctatagccatccatcgggggatgccccaatag

SEQ ID NO: 231642 - DNA, 696 bp, Artificial Sequence
  derived and/or modified sequence
atggcagagaatgacgtagataatgaacttctggattatgaagatgacgaggtggagaccgccgccgggggcgacggcgctgaggcccctgctaagaaagatgttaagggaagctacgtctctatccattcaagcggcttcagagactttcttctgaagcccgagctgttacgagccatagtggattgtgggttcgagcacccgtcagaggtgcaacatgagtgtatcccacaagcaattctgggcatggatgttctctgtcaagctaagtccggaatgggcaagaccgctgtgttcgtattggcgaccctgcaacagctcgagcctgtaaccggccaggtctccgtgttggtgatgtgccacacacgcgagctggcctttcaaataagcaaagagtatgaacggttcagtaagtacatgcctaacgttaaagtggccgtgttttttggaggactaagtatcaagaaggacgaagaggtcctgaagaagaactgcccacacattgtcgtgggtacccccggaaggatccttgcactggcgaggaataagtcattgaatctgaaacatataaagcactttatcctggacgaatgtgacaaaatgttggagcagctcgatatgcggagagacgtccaagaaatctttagaatgactcctcacgaaaaacaggtgatgatgttcagtgccaccctctag

SEQ ID NO: 231643 - DNA, 732 bp, Artificial Sequence
  derived and/or modified sequence
atgtggaccatgagcagctggactatgaaaatgatgaggtggcgacagcagttgggagagatgggccttaggcctcttcccaggcgcatgagcagagccccaatgagcccgagcacagcactggccttcgtcacttcatgctctagccagagctgttccggccccctgagtaccgtggcattatcaattcggcaaaaagtctcagtcctggtaatgtgtcacacccgtgagctggcttttcagatctccaaagagtacgaaagattcagcaagtatatgcctaatgtaaaagtagccgtcttcttcgggggcttatccatcaagaaagacgaggaggtgttgaagaagaactgcccgcacattgtggtggggacccctggaagaattctggcactggctagaaacaagagcctcaacctgaaacacataaaacacttcattttggacgagtgcgacaaaatgttggaacagctagacatgagacgggacgtgcaggagatttttcggatgactcctcatgaaaaacaggtaatgatgttctcagccaccctgtctaaggaaattcgtccggtgtgtcgaaagttcatgcaggacgtcaacacactgctcccgagtctgccgccgctccccgcaaggtgcctgctgccattcctggcacttttccttagactgccatgtcattcatcagccaaaaaggctgcctgcgcccagctgggcgtgatgaccccttag

SEQ ID NO: 231644 - DNA, 1287 bp, Artificial Sequence
  derived and/or modified sequence
atggcagagaatgacgtggataacgaactgctggactacgaggacgacgaggtagaaactgccgccggcggcgatggcgccgaggctccagcgaaaaaagacgttaaaggtagttatgtgagcattcattcctctggattccgcgattttctgctgaagcctgaactgctgagagcaatagttgattgcggattcgagcacccttcagaggtgcaacacgagtgtattcctcaggccatcctgggcatggatgtcctttgccaggcaaaatctggcatgggcaagaccgcagtgttcgtgctagcaacactgcagcagctggagcctgtgacagggcaggtgagtgtcctcgtcatgtgccacacaagggagctggccttccagatttccaaagagtatgaacggtttagtaaatatatgcccaacgtgaaggtggccgtgttcttcggggggctgtccattaagaaagacgaggaggtgctgaagaagaactgtcctcacatcgtagtgggaaccccaggacgcatcctggctctcgctcgaaataaaagtcttaatctaaagcatatcaagcatttcatcttggatgagtgcgacaaaatgcttgagcagttggatatgcgaagggatgtgcaagaaatcttccgtatgactccccacgagaagcaagtcatgatgttctccgccaccctgtccaaagagatacggcctgtgtgccgaaagttcatgcaggatccaatggaaatatttgttgatgatgagactaaactcaccctccatggtttgcagcagtactacgtaaaactgaaggataacgaaaaaaatcgcaaacttttcgacctgctggatgtgttagagtttaatcaagtggtgattttcgtgaagtctgtccagagatgtatagcacttgcccaactgcttgtagagcagaatttccccgctattgccattcatagaggaatgccccaggaggagcgcctatcccgttatcagcaatttaaagactttcagagaagaattctcgtagcgaccaatctgttcggacgcggtatggacattgagcgtgttaacatcgcctttaattacgatatgcctgaggactccgatacctatctgcaccgcgtcgcacgagccgggcggttcggcaccaaaggcttagccatcacgttcgtgtccgacgagaacgacgccaagatcctgaatgatgtacaggaccggtttgaggtaaatatcagcgaactgccggacgaaatcgatatcagcagctatatagagcaaacaaggtag

SEQ ID NO: 231645 - DNA, 1278 bp, Artificial Sequence
  derived and/or modified sequence
atggctgagaacgacgtcgacaacgagctactggactatgaggacgacgaggttgaaacagccgcaggcggtgacggagccgaagctcccgctaagaaagatgtcaagggaagttacgtctctatacatagttctggatttcgcgacttcttgctcaaaccagagctactgagggccatcgtagactgcggattcgagcacccctcggaggtgcaacacgagtgcattccacaggccatactggggatggatgtgctgtgccaggccaagtctggaatgggcaaaacagcggtgtttgtgctggccaccttacagcagctagaaccggtgacaggccaggtatctgtgctcgtgatgtgccacacgagggaactcgcgtttcaaatttccaaggagtacgagagatttagcaaatacatgcctaacgttaaggtggccgtctttttcgggggactgtctatcaagaaagatgaggaagtactgaaaaaaaactgccctcacattgtggtcggcacgccaggtcgaatattggccctcgcccgtaataaaagtcttaatctcaaacacataaagcatttcattcttgacgaatgcgacaagatgctagagcaactggacatgagacgcgatgtgcaagaaatcttccggatgacccctcacgaaaaacaggttatgatgttttccgctacactctctaaggaaattcgaccagtgtgtagaaagtttatgcaagaccctatggagatcttcgtggacgacgaaactaagctgacactgcacggcttacagcagtactacgtaaagctgaaagacaatgagaagaatagaaagctgttcgacttactggacgttctggaattcaatcaggtcgtcatcttcgtgaagtcggtccagcgatgtatagcactggcccagctactggtggagcaaaattttccagccattgctatccatcgaggcatgcctcaggaagaacggctatcccgatatcagcaattcaaggacttccaaagaaggatcctcgtcgcaactaacctgttcgggcgggggatggatatcgagcgggtgaatattgcattcaactatgatatgccagaggatagtgatacttatttgcaccgctgttatcccctaagcccaagccgctggccagagcaggctggactggcccctagggcctggctgtcccacttatgccccatgcggatgatgccgaggtcctctatgatgtgccgcatcgccctacggtctatactggtgtcctgcttgatgcgctag

SEQ ID NO: 231646 - DNA, 291 bp, Artificial Sequence
  derived and/or modified sequence
atggcagagaacgatgtggacaacgagctgctggattatgaggacgatgaggtggaaacagccgctggaggcgatggcgcagaagctcccgcgaaaaaagatgtgaaaggctcctacgtgtcgattcactctagtggatttcgcgactttctgctgaagcccgagttactgcgagccatcgtggattgcgggttcgaacaccccagtgaagtgcagcacgagtgtattccccaggcaatcttggggatggacgtgttatgtcaggctaagagcggtatggggaagacatag

SEQ ID NO: 231647 - DNA, 411 bp, Artificial Sequence
  derived and/or modified sequence
atgggcggtggacgcagaccatacgatgtgttcttttccaaagttatggccgaaaatgacgttgataatgaactattggactacgaggatgacgaagttgagaccgcggcaggcggagacggggctgaggccccggctaaaaaggatgtgaagggatcctacgtgtctattcattcttcaggatttcgagactttcttctgaaaccagagctccttagggcaatcgtcgactgcgggttcgaacacccgtcagaagtccagcatgaatgcattcctcaggccattttggggatggacgttctgtgccaggccaaatctgggatgggtaaaacagcagtgtttgtcctggctactctgcaacagctggaaccagtgactggacaggtctcagtactggtgatgtgtcactag

SEQ ID NO: 231648 - DNA, 564 bp, Artificial Sequence
  derived and/or modified sequence
tagtcagaagaaagggatatagggaagccaatggagatcttcgtggacgatgagacaaagttgacactgcatggactgcagcagtactatgtcaaactgaaggataacgagaaaaaccgtaaattatttgatctcctggatgtcctggagtttaatcaggttgtcattttcgttaaatccgtgcagagatgcattgctctggcccagcttctggttgagcagaactttccagctatagcaattcacagaggcatgccccaggaggaacgacttagcaggtatcaacagtttaaggactttcagagacggatcctggtggccaccaatctgttcggcagaggtatggacatcgagagagtcaatatcgcatttaactatgatatgcccgaggattctgacacatatctgcaccgggtcgcgcgggcaggccgctttggaaccaaagggctcgctatcacattcgtatctgatgagaatgacgcaaagattctgaacgatgtccaggaccgattcgaggtcaatatctctgagctccccgacgagatagacatttcctcttactag

SEQ ID NO: 231649 - DNA, 717 bp, Artificial Sequence
  derived and/or modified sequence
atggcagagaacgacgtcgacaacgaactgttggactatgaggacgacgaagtagaaaccgccgccgggggggatggagctgaggctcctgctaagaaagacgtcaaggggagctacgtgtctatccactcttccgggtttagagatttccttctgaaacctgaactattgcgggctatcgtcgactgcggcttcgagcatccatctgaggtgcaacacgagtgcataccccaagccatcctgggaatggacgtgctctgtcaagccaaatcaggcatgggaaagaccgctgtttttgtccttgccactctgcagcaactggaaccagtcactggccaggtcagtgtccttgtgatgtgccatacaagagagctcgcgttccagatcagtaaggagtacgagcgattctcgaagtacatgcccaacgtgaaagtcgctgtgttcttcggcggcctgtccatcaaaaaagatgaagaggtactgaagaaaaactgcccgcacatcgtggtaggaacgccaggaaggattctggcgcttgcccgcaacaaaagcctgaatctcaaacatatcaagcatttcattcttgacgaatgtgataaaatgctcgaacagctcgacatgagacgcgatgtccaagaaatttttcgcatgactccacacgaaaaacaggttatgatgttcagtgccaccctttccaaggagatcagacccgtctag

SEQ ID NO: 231650 - DNA, 417 bp, Artificial Sequence
  derived and/or modified sequence
tgagccaccttacaacagctcgagccagtgacaggacaggtgtccgtgctggtcatgtgtcacactcgagaactcgccttccagatctcgaaggagtatgaaaggttttctaaatacatgcccaacgtcaaagttgcagttttctttggcggcctgagcatcaaaaaagacgaggaggttctcaaaaagaactgccctcacatagtggtcggaacccctggccgcattctcgctctcgcaagaaacaagtccttgaacctgaagcatataaagcactttatcctggacgagtgcgataagatgctggagcagcttgacatgagaagggatgtccaggagatctttcgtatgactccacacgaaaagcaggtcatgatgttcagtgccacactgtccaaagagatccgacctgtttag

SEQ ID NO: 231651 - DNA, 870 bp, Artificial Sequence
  derived and/or modified sequence
atggctgaaaatgacgtggataatgagttgttggattatgaggacgacgaagtcgagactgcagcaggcggagacggagcagaggctcctgctaaaaaagatgttaagggctcatacgtcagtatccactctagcggcttccgagacttcttactgaagcctgagctactcagggctatcgtggattgtgggtttgagcaccccagtgaagtccagcatgaatgcatacctcaggccatcctagggatggatgttctgtgccaggctaagagcggaatgggcaagactgctgtctttgtcttggctacattgcagcaactggaaccagtgactggacaggtttcggtgctggtaatgtgccacacacgagaactggctttccagatctcaaaggagtacgagaggttcagtaaatatatgccgaacgtgaaggtggctgtcttctttggcggactctctatcaaaaaagacgaagaagtactcaagaagaactgtcctcacatcgttgtgggcaccccgggtcgcatccttgcactggcccgaaataaatctctgaatctaaaacatattaaacatttcatcctggacgaatgcgataagatgctcgaacagctcgacatgagaagagacgtccaggaaatcttcagaatgacgccacacgagaaacaggtcatgatgttcagcgctacactgtcgaaagagatcaggcccgtgtgtagaaagtttatgcaggacccaatggagatcttcgtcgacgatgagacaaaactgacactccacggcctgcagcagtactatgtgaagcttaaagacaatgagaaaaaccgcaaattatttgatctgttggacgtccttgaatttaatcaatag

SEQ ID NO: 231652 - DNA, 1287 bp, Artificial Sequence
  derived and/or modified sequence
atggcggaaaatgacgtagacaacgagctccttgattacgaagatgacgaggtggaaaccgcggccgggggtgacggcgcagaggcccccgccaagaaagacgtaaaaggtagttatgtcagcattcatagctctgggttcagggattttctgctgaaacccgagcttctgagggccatcgttgactgtggcttcgaacacccctcggaagtccagcacgagtgtatccctcaggctatcctgggcatggacgttctgtgccaagctaaatctggaatgggaaagaccgccgtgttcgtgctcgccaccctacagcagctggagcccgttacagggcaggtgagcgtgctggtcatgtgccacaccagagagctggccttccaaattagcaaagaatacgaaaggttttcaaagtacatgcccaacgtgaaggtagccgttttttttggagggctcagcataaagaaagatgaggaagtactcaagaaaaactgccctcatatcgtcgttggaacgccagggcgcatcctggccttggccagaaacaaatctcttaacttgaaacatatcaagcatttcatcctggacgagtgcgacaagatgctagagcaactggacatgcgaagagacgtgcaggagatttttaggatgaccccacacgagaagcaggtgatgatgttttcagccactttgagcaaagagattagacccgtgtgccggaaatttatgcaggacccaatggaaatcttcgttgacgatgagacaaagcttaccctccacggactgcagcaatattacgttaaattgaaagacaacgaaaaaaataggaaactctttgacctactcgatgttctggaatttaatcaggtggtgatcttcgtcaagagcgtccaacgctgcatcgcactcgcacaacttctcgttgagcagaactttcctgccatagccatccatcgcggaatgccacaggaagaaaggctcagcagataccagcagttcaaggacttccaacgacgcattctggtggcaacgaatctctttggacgcggaatggatattgagcgggttaatattgcttttaattacgacatgcccgaagacagcgacacctatttacatagagtggcccgtgccggtagattcggaaccaaaggtctggcgataacatttgtctccgatgaaaatgatgccaagatcttgaacgacgttcaagacagattcgaggtgaacataagtgagcttcctgacgaaattgatatctcctcctacatcgaacagacgcgttag

SEQ ID NO: 231653 - DNA, 696 bp, Artificial Sequence
  derived and/or modified sequence
atggcagagaacgacgttgataatgaattgctggactacgaagatgacgaggttgaaaccgccgctggtggtgacggtgcagaggcacccgcaaagaaagatgtgaaaggctcctatgtctcaatccacagctccggcttccgagatttcctcctgaaacccgaacttctcagggccatcgtggattgcgggtttgaacatccatcagaagtgcaacacgagtgtattccacaggctatactcggtatggatgttttgtgtcaggctaagtctgggatgggaaaaactgcggtgttcgtactcgctaccctccagcaactcgagcctgtcacaggacaagtaagtgtcctcgtgatgtgtcacacgagagagctggcctttcagatctccaaagagtacgaaaggttcagtaaatacatgcccaacgttaaggtggccgtgtttttcggaggcctaagtatcaagaaggacgaagaagtcctgaagaagaactgtcctcatattgtagtagggacccctgggcgcattctggccctggcccgcaacaagtctcttaatctgaaacacataaagcacttcatcctggatgaatgtgataagatgttggaacaattggacatgcgaagagatgtacaggaaattttcaggatgactccacatgagaaacaagtcatgatgttcagtgccaccttgtag

SEQ ID NO: 231654 - DNA, 1287 bp, Artificial Sequence
  derived and/or modified sequence
atggcggaaaatgacgttgacaatgagttgcttgattatgaggacgatgaagtggagactgccgccgggggggacggcgccgaagctcctgctaagaaggacgtcaaaggatcctatgtctccatacatagcagcggattccgcgatttcctgttgaagcctgaacttctacgcgcgatcgtggactgcggcttcgagcatccctctgaggtccagcacgaatgcataccgcaagctatccttggaatggacgttttatgccaggccaagtccggcatggggaaaaccgctgtctttgttctcgccactctacaacagctggaacctgtgactggccaagtgtctgtacttgtcatgtgtcatacacgggagctcgcttttcaaatctcaaaggaatacgagcgcttctcaaagtacatgcccaatgtaaaggtcgctgtttttttcgggggccttagcatcaagaaggacgaggaggtgttgaagaaaaactgccctcatatcgtagtcggcactccaggacgcatcttggctctggctaggaataaatctttgaatttgaagcacattaagcacttcattctggacgagtgcgacaaaatgctcgaacagttggacatgagacgggatgtgcaggaaattttccggatgaccccccacgaaaaacaggtgatgatgttcagtgctaccctgtccaaggagataaggcccgtgtgtcgaaaattcatgcaggatcccatggaaatcttcgtagatgacgagaccaaactgactttgcatggcttgcaacagtactacgttaagcttaaggataacgagaagaaccggaagctgttcgatttactggatgtgctcgagttcaatcaggttgtgatcttcgtgaagtccgtacagaggtgcatcgcactggcccagctgttagtcgagcagaactttcccgccatagccatacatcgggggatgccccaggaagagcggctttccaggtaccaacagtttaaggactttcaacgtaggatactggtggccacaaacttgttcggtagaggaatggacatcgagagggtgaatatcgcctttaattatgacatgcctgaggatagcgacacttacttgcacagagtggcgcgggccgggaggtttggaaccaaaggtctcgccattaccttcgtttccgatgagaacgatgctaagattttgaacgatgtgcaggataggtttgaggttaacatctcagagctgcctgatgaaatcgacatttcctcttacatagaacagactcggtag

SEQ ID NO: 231655 - DNA, 378 bp, Artificial Sequence
  derived and/or modified sequence
atggctgaaaatgacgtcgataatgaactactggactatgaggatgacgaggtagagacggccgctggcggggacggggctgaagcccccgccaagaaggacgtgaagggcagttacgtgagcatccatagtagcggtttccgcgactttttactgaaaccggagttactgcgggctatcgttgactgtgggtttgaacacccctcagaagttcagcacgagtgtattccacaggcaattctggggatggacgtcttatgtcaggcgaaaagtggcatggggaagaccgctgtgtttgtcctagcaaccctccagcaactcgagcctgttaccgggcaagtatctgttctagtgatgtgccacacccgagaattatag

SEQ ID NO: 231656 - DNA, 294 bp, Artificial Sequence
  derived and/or modified sequence
taggctaccctccagcagctggagccagttacgggacaggtgtgcttctgtgatagtcactttccccgcggcgataatgaagaactccatctcccatatgtgagtgtgtacttccttcccaaggtgagcgtgctggtcatgtgtcacacccgggagttggcatttcaaatatctaaagaatacgagcgttttagtaagtatatgcccaacgttaaggtggctgtgttctttggcggtttaagtataaagaaggacgaggaagtgttaaagaaaaattgccctcatatcgtctag

SEQ ID NO: 231657 - DNA, 291 bp, Artificial Sequence
  derived and/or modified sequence
atggccgagaacgacgtagacaacgaactactggactacgaggacgatgaagtggagacggctgccggaggtgatggagctgaagccccagcaaagaaggacgtgaaagggtcttatgtatcaattcactcttctggtttccgcgattttctcctgaaaccagagctgctgagagccattgtggactgcggcttcgagcacccctccgaagtccaacatgagtgcatccctcaggcaatcttaggaatggatgtgctgtgccaggccaaaagtggaatggggaaaacctag

SEQ ID NO: 231658 - DNA, 291 bp, Artificial Sequence
  derived and/or modified sequence
atggccgaaaacgacgtggacaatgaacttcttgattacgaggacgatgaggtggagacggcagccggcggagacggcgcagaggcccccgcaaagaaagacgtgaagggaagttatgtgtccatccactctagtggtttcagagattttctgctgaaaccagagctgttgcgtgccattgtcgattgcggcttcgagcaccccagcgaggtgcagcatgagtgcatccctcaggctatcctgggcatggatgttctatgccaggccaaatctgggatgggcaaaacctag

SEQ ID NO: 231659 - DNA, 1287 bp, Artificial Sequence
  derived and/or modified sequence
atggccgaaaatgacgtcgacaatgaactcctcgactatgaagacgatgaggtagagaccgctgccggaggagacggcgccgaggctcctgcaaagaaggatgtcaagggcagctacgtttccatccattcaagcgggtttcgcgacttcttgctgaagccggagctgctgagggccattgtggactgtggttttgagcaccctagtgaagttcagcacgagtgcatcccccaagccattctgggcatggatgtgttgtgccaggctaaatcgggaatgggaaagactgcagtcttcgtgctggccacgctgcaacaacttgagcccgtcacaggccaggtatctgtcctggtgatgtgccacactagggagttagctttccagatctcaaaggagtacgaaaggtttagcaagtacatgccgaacgtgaaagtcgcagtgttcttcggcggactcagcattaagaaggacgaagaggtgctgaagaaaaattgcccccatatagtggtaggtacaccgggacggattcttgctctggcccggaacaagtcactcaacctgaagcatataaagcactttatcctcgacgaatgtgataagatgctggaacaactcgacatgcggcgggatgtgcaggagatcttccgcatgactccacatgagaagcaggtcatgatgtttagcgcgaccttgtctaaggagatccggccggtctgtagaaagttcatgcaggatcctatggagatttttgtggatgacgaaaccaaactaacactgcacgggctgcagcagtattacgtcaagctgaaagataacgagaagaatcggaagctgtttgatcttcttgatgtgctggagtttaatcaggtggtgatctttgtcaagagtgtgcaacgatgtattgcactggcccaacttttggtagagcaaaacttccctgccatagccatccatcggggtatgccacaggaagaacgactcagcagataccaacaattcaaagacttccagcgccgcatcctagtggcaaccaaccttttcggccgcggaatggatattgagcgggttaatatcgcatttaattacgacatgccagaggatagtgatacttatctccaccgagtggctcgagccggtcgatttggtaccaaaggcctcgccattacgtttgtatctgacgagaacgatgcaaagatcttaaacgatgttcaggacagattcgaggtcaatattagtgagctgcccgatgagatagacatttcctcctacatcgagcagacacgctag

SEQ ID NO: 231660 - DNA, 732 bp, Artificial Sequence
  derived and/or modified sequence
atgtggactatgtccagctggaccatgaagatgatgagatggcgacagcaactgggagaaatgggtctgcgacctctgccgcgccggatgagcagagcacctatgtccccttccacagctctggccttcgtcacatcttgctccagtcagagctgttctgggccgctatcaaccgtggccctctcaatcagacagaaagtgagcgttctggttatgtgtcacactcgggaactggcttttcaaatatccaaggagtacgagaggtttagcaagtatatgccaaacgtcaaagtcgcggtgtttttcgggggcctatccatcaaaaaggacgaggaggttctgaagaaaaactgtccgcacatagtggtcggtactcctggaaggatccttgcacttgctagaaataaaagtctcaatctgaaacacattaagcatttcatcttggatgagtgcgataagatgcttgaacagcttgacatgaggcgcgacgtccaggagatattccggatgactccacacgagaaacaagtgatgatgttcagcgcaacactctccaaggagatcaggcctgtgtgccgtaagttcatgcaggacgtcaacacactcctgccgtccctcccaccactccccgcaaggtgtttactgccattcttggccctcttcctgcgcctcccctgccacagttctgccaagaaagccgcctgtgcccagctgggagtaatgaccccgtag

SEQ ID NO: 231661 - DNA, 972 bp, Artificial Sequence
  derived and/or modified sequence
atggctgagaatgatgtggacaacgagcttctagactatgaggatgatgaagttgaaactgcagccgggggggacggggccgaggcgcctgctaagaaggatgtgaaaggaagctacgttagcattcactcaagcggttttcgggacttcctgctgaaacccgagctgctgagagctattgtagactgcggatttgaacatcccagtgaagtgcagcacgaatgtatcccccaggcaatcctcgggatggacgtactctgtcaagccaaatccgggatgggcaagaccgcagtattcgtactggccactttacagcaacttgagcctgttaccggacaagtcagcgtactggtcatgtgtcacacgcgcgagcttgctttccaaatttcaaaagagtatgagcggttctccaagtacatgcccaatgtgaaagtcgcagtctttttcggtgggctgagcataaagaaagatgaagaggtactgaaaaagaattgcccccacatagtcgtcggaacgcccgggcgcatattagcgctcgcaaggaataagagcctcaacctcaaacatatcaaacatttcatcctcgatgagtgcgacaaaatgctggaacagttagacatgagaagagatgtgcaagaaatctttagaatgactccacacgagaagcaagtcatgatgttttccgcgactctttccaaggaaataaggcccgtgtgtcgcaagtttatgcaggacccaatggaaatctttgtggatgacgagactaaacttacccttcatggcctgcagcaatattatgtcaagctgaaggacaacgagaaaaataggaagctctttgatttacttgacgtgctcgagttcaatcaagagatcacatgcaaatccgtccaacgtttttcaaccacaaattcctgcggatatcaacccatttggccacgtcacgggcaccgggctggggagcactgcttctag

SEQ ID NO: 231662 - DNA, 972 bp, Artificial Sequence
  derived and/or modified sequence
atggcagagaacgacgtggataatgaactgctggactatgaggacgacgaggtggagacagctgcaggcggggatggagcagaagcccccgctaagaaggatgtcaagggcagctatgtgagtattcatagcagcggattccgtgattttctccttaaaccagagctgttgcgtgccatcgtagactgtgggtttgagcatccaagtgaggtccagcacgagtgcattccccaggccatcctcggcatggacgtgctctgtcaggctaagtccggcatgggcaagactgcagtgtttgttttggccacactccagcagcttgaacctgtgacaggtcaagtttccgtgttagtgatgtgccacacgcgcgaactggcgttccaaatcagcaaagagtacgaacgcttctcaaaatacatgcccaacgtgaaagtcgctgtctttttcggcggactgtcaataaagaaggacgaggaggtgctgaaaaagaattgtccccatatcgtggtcggcacgcccgggcgaatattggcactcgctcgaaacaaatctctcaacctcaagcatatcaagcacttcatcctcgacgagtgtgacaaaatgctcgagcagttggacatgagacgcgatgtgcaggaaatttttagaatgacaccacatgagaagcaggtgatgatgttctccgccaccctttccaaggagattcgcccagtgtgtcgtaagttcatgcaggaccctatggagattttcgttgatgatgagaccaagctgacgctccatggtctgcagcagtactacgtaaagctcaaggataacgaaaaaaaccgcaaacttttcgaccttctggacgtgctcgagtttaatcaggagatcacctgcaagtccgttcagaggttttcaaccaccaactcttgcggctatcaacccatctggcctcggcacggtcacagagcgggagagcactgtttttag

SEQ ID NO: 231663 - DNA, 1332 bp, Artificial Sequence
  derived and/or modified sequence
atggcagagaatgacgtcgacaacgagttactcgactacgaagatgatgaagtagagaccgccgccggaggtgacggggcagaagcccctgccaaaaaagatgtgaaaggttcctacgtgagcatacacagttccgggttccgtgactttttactgaaaccagaattgctgcgggccatagtggattgtggatttgagcacccctctgaagtgcaacacgaatgtatccctcaggcaatattagggatggacgtgctttgtcaggcgaagtctggaatgggaaagacagccgtattcgtgctggcaaccctgcagcagttagaaccggttactggacaggtttatttaggtagagttctcggccgtggattttggtgcgtgtttgtgagtgttctcgttatgtgccacacacgcgaattggcttttcagattagtaaggaatatgaaaggttcagcaagtacatgccaaatgtcaaagtcgcggtgtttttcggggggttgtccattaagaaagacgaagaagtccttaagaagaactgcccacacatcgtggtgggcactccaggcagaatcctggccttggcccgtaacaagtccctgaacctgaagcacatcaaacatttcatactggatgaatgcgacaagatgctcgaacaactggatatgcgccgcgatgtccaggagatcttccgaatgacccctcatgaaaaacaggtgatgatgtttagcgccactctctctaaggaaattcggcccgtgtgtcggaagttcatgcaggacccgatggagattttcgtggacgacgagacaaaattgactctgcatggacttcagcagtactatgtgaaattgaaggacaacgagaaaaacaggaagctattcgacctcttagacgtcttggaatttaaccaggtcgttatttttgttaagtcagttcagagatgcatcgcattagctcagcttctcgtcgaacagaactttcctgccattgccatccaccgagggatgcctcaggaggagaggctctccagatatcaacaattcaaagacttccagcgccggattctggtggccacaaacctcttcggtcggggcatggacatagaacgggttaacatagctttcaactatgatatgccagaagatagcgacacctacttgcaccgcgtggcacgcgccggcaggttcggaaccaaagggctggctattaccttcgtgagtgacgaaaacgacgcaaagatcttgaatgacgtgcaggataggtttgaggtcaatatctcagaactccccgatgagattgatatttcctcatatatcgaacagaccaggtag

SEQ ID NO: 231664 - DNA, 732 bp, Artificial Sequence
  derived and/or modified sequence
atgtggacaatgtcctcatggactatgaagatgatgcgttggcgccagcaactgggcgagatgggcctgagacccttgccaagaagaatgtctcgagctcctatgtctcctagcactgcgctggccttcgtgacgtcctgctcgtcgcagtcctgttccggtcctttgagtaccgtcgccctgagcattcgccaaaaagtctctgtcctcgtcatgtgccacaccagagaacttgcctttcagatttctaaggaatacgagcgattttccaaatacatgcccaatgtcaaggtcgcggttttcttcggcggcctctctatcaagaaggacgaggaggttttaaagaagaattgcccccatatcgttgttggcacccccgggagaattctagccctggctagaaacaagagcctgaatcttaagcatataaagcactttattcttgatgaatgcgacaagatgcttgagcaactggacatgcggcgcgacgtccaagagatctttagaatgaccccccatgagaaacaggttatgatgttctccgctacattgtcaaaagagataaggcccgtttgccgcaaattcatgcaggatgtgaacacactgctgccatccctgccacctctgcctgccaggtgtctcctgccctttctggccctattcctccgcctcccctgccacagtagtgctaagaaggcagcgtgtgcgcagctcggcgtgatgacaccgtag

SEQ ID NO: 231665 - DNA, 1332 bp, Artificial Sequence
  derived and/or modified sequence
atggctgagaacgatgtcgacaacgagcttttagactacgaggatgacgaagtcgaaacagcagcgggtggggatggagcggaggcgccggcaaaaaaggatgtgaagggctcatatgtgagcatccacagctctgggttccgagactttctcctgaaacctgaactcttgcgggccatcgtggactgtggctttgaacatccttctgaagtccagcacgaatgtattccccaggccattctcgggatggacgtgctctgtcaggcaaaaagcgggatgggaaagactgctgtgttcgtgcttgccaccctccagcaactggaaccagtcaccggccaggtttacctgggaagggtgctcggcaggggcttctggtgcgtgtttgtgtccgtgctggttatgtgtcatacccgtgagttggccttccagatttccaaggagtacgagcgattttccaaatatatgccaaatgtgaaggtggccgtcttctttggagggctcagtatcaagaaggacgaagaagtcttgaaaaaaaactgccctcatatagttgtggggactccaggacggattctggcattggcccgcaataaatctctcaacctgaaacacatcaagcattttattttggacgagtgcgacaagatgctcgagcagttggacatgcggcgggacgtccaagaaatatttaggatgaccccccacgaaaaacaggtgatgatgttttctgccaccctgtctaaggaaatcagacccgtttgccgcaagttcatgcaggatcccatggaaattttcgtggatgacgagaccaagctgacccttcatggactgcagcaatattacgtaaaactgaaagacaacgaaaagaatcgcaagctttttgacttgcttgatgtgctggaatttaaccaagtagtcattttcgtgaagtctgtgcagagatgcattgcgctggcacagctactggtggagcagaactttcctgccattgccattcatcgaggaatgccacaagaagagaggctaagcaggtatcagcaattcaaagacttccaacggcgtatcctagtcgctactaacctgtttggccgcggcatggatattgagagagtgaacatcgccttcaattatgacatgcctgaagactccgatacatatcttcatcgtgttgctagagccggaaggttcggcacaaaaggtctggctatcacattcgtctccgacgagaatgacgcaaaaatcctgaacgatgttcaggacagatttgaggtaaatattagtgaattgcccgacgagatcgatattagctcttacatcgagcagaccaggtag

SEQ ID NO: 231666 - DNA, 420 bp, Artificial Sequence
  derived and/or modified sequence
atggcagaaaatgatgtagataatgagctgctcgattatgaagatgacgaagtggagactgctgccggcggcgacggagcagaagcaccagccaagaaagatgtgaaaggctcctatgtgtctatccatagctccggattccgcgatttcctgttgaaacctgaactcctacgcgcgatagtggactgcgggttcgagcacccatccgaggtgcagcatgagtgcatcccccaagctatcctcgggatggatgtactgtgccaggccaagtccggcatgggcaagacagccgtgtttgtactcgcaaccctccagcagctagaacctgtgaccggccagtcccacgaacacatgacgagcgtaacacttgataacttgactgcggtgggagatgtgctttcacaggcttggggatcttag

SEQ ID NO: 231667 - DNA, 732 bp, Artificial Sequence
  derived and/or modified sequence
atgtggacgatgagctcatggacaatgaaaatgatgcgctggagacagcaactgggggagatggggttacgacccttgcctagacgaatgtctagagctccaatgtccccatcaaccgcgctggccttcgtgacgtcttgcagtagccagagctgctccggtcccctgtctaccgtggccctctcaatccggcaaaaggtctccgtgcttgtcatgtgccatacccgcgaacttgcattccaaataagtaaggagtacgagcgcttttccaagtatatgcccaatgtcaaggtagccgtgttttttggggggttatccattaagaaggacgaagaggtcctcaaaaagaattgtcctcacatcgtggtcgggaccccagggcgaattctggccctcgcccggaacaaaagcctgaacttgaagcacattaagcactttattctggatgaatgcgacaagatgttggaacagctcgacatgagacgggatgtgcaggagattttccgaatgactcctcacgagaaacaggtgatgatgttctcagctacccttagcaaagaaatccggccggtgtgcagaaaattcatgcaggacgtgaacacgctcttgccatcacttcccccactgccagcccggtgcctgctgcctttccttgccctgtttttgcgactgccttgtcatagcagtgcaaaaaaagctgcctgcgcacaattgggcgtgatgactccatag

SEQ ID NO: 231668 - DNA, 732 bp, Artificial Sequence
  derived and/or modified sequence
atgtggactatgtctagctggactatgaagatgatgagatggcgccagcagctgggagagatgggactccgccctctgccgagacgtatgtccagagccccaatgagccccagcacagcactcgctttcgtgacttcatgtagcagccagtcctgttccgggcccctatctactgtggctctgtccatccggcagaaggtgagcgtgcttgtgatgtgccacactcgcgaattagctttccagatatccaaggaatatgagcgctttagcaagtatatgcctaacgttaaggtggccgtcttctttggcggactttctataaagaaggacgaggaagtcttaaaaaagaactgcccacacattgtcgtcgggaccccagggcgcatccttgcactcgcgcggaacaaatccttgaaccttaaacatatcaagcatttcatcctggacgaatgtgacaaaatgctggaacagctcgatatgcgcagggacgttcaggaaatttttcggatgacccctcatgagaaacaggtgatgatgttctccgcaacccttagtaaggagattagaccagtttgccgaaagtttatgcaggacgtgaacaccctcctgccatcactgccacccctgcccgcccgttgcctcctgccattccttgccctgttcctcaggctgccatgccattcatcagccaagaaggccgcctgcgctcagctgggggtcatgacgccttag

SEQ ID NO: 231669 - DNA, 420 bp, Artificial Sequence
  derived and/or modified sequence
atggcggagaatgatgtcgataacgagttgctcgattatgaagacgacgaggtggagacagcagcaggtggggatggagcagaggctcccgctaagaaggacgtgaaaggctcttatgtctctattcattcttcaggtttccgagatttcctcctcaagcccgagttgctgagagccatagtggattgcggcttcgaacatccctctgaagtgcaacacgagtgtatcccccaggcgatcctcggtatggacgtgctgtgtcaggccaaatccggaatgggaaagaccgcagtctttgtcctagccaccctgcagcagctggaaccagtgactgggcaatcacacgagcacatgacgtcagtaactcttgataatctgaccgcagtcggcgatgtcctctctcaggcctggggctcctag

SEQ ID NO: 231670 - DNA, 972 bp, Artificial Sequence
  derived and/or modified sequence
atggccgaaaacgacgtggacaatgagcttctcgattatgaagacgacgaggtggaaacagcagctggaggcgacggggcagaggcacccgcaaaaaaggatgtgaaaggttcttacgtgtctatccattcaagtggattccgcgactttctcctgaaacccgagctgctgcgggcgatcgttgattgtggtttcgagcacccatctgaagttcaacatgagtgtatccctcaagcgatactgggaatggatgttctgtgtcaggctaaatctgggatgggaaagactgctgttttcgttctggcaacattgcagcagcttgaacctgtgacagggcaggtgagcgtgcttgtgatgtgtcacacgagggagctggcctttcaaataagcaaagagtatgaacggtttagcaagtacatgcctaatgtgaaagtggcagtctttttcgggggcctgtcaatcaaaaaggatgaagaggtccttaaaaagaattgtcctcacatcgttgtgggcacgcctgggcgaatcctcgccctggcccgaaataaatccctcaatttgaaacacatcaaacattttatcctcgatgagtgtgacaaaatgcttgagcagttggacatgcgacgggacgtacaagagatttttcgcatgacccctcacgaaaagcaggttatgatgttcagcgcgaccctgagcaaggaaattcgccctgtgtgtaggaagtttatgcaggaccctatggagatcttcgtagacgacgagacgaagttgaccttacacggcctccagcaatattatgtcaaactgaaagacaacgagaagaatagaaaattgttcgatcttttagacgttctcgagttcaaccaggagatcacatgcaagtccgtgcagcggttctctactacaaacagctgtggatatcagcccatttggccacgtcatggtcacagagctggcgaacactgtttctag

SEQ ID NO: 231671 - DNA, 1332 bp, Artificial Sequence
  derived and/or modified sequence
atggccgagaacgatgttgacaacgaactgctcgattatgaagacgatgaggttgagaccgcggctggaggggacggggctgaggctccagctaaaaaagacgtgaaaggttcttacgtttcaattcacagctccggcttcagggatttccttttgaagccggaactgttaagagctattgtggactgtggctttgaacaccccagcgaggtgcaacacgaatgtattccacaggcaatcctgggcatggacgttttgtgccaggccaaaagcggcatgggaaagacagcagtattcgtgctcgcaactctgcagcagcttgaaccagtcaccggccaggtttatttagggcgagtccttgggagagggttttggtgcgtctttgtgagcgtgttggtcatgtgccacacacgcgaattagcgtttcagatttcgaaagagtacgagcgcttctcaaagtacatgccaaatgtaaaggttgcagtgttttttggtggtctttctatcaagaaggacgaagaagtgctgaagaaaaattgccctcacattgttgtggggacacctggaagaattttggccttggcacgaaataagagcctcaatctgaagcacatcaaacactttatcttagacgagtgcgataaaatgctggagcagctggacatgaggagagatgtccaagaaatctttcgaatgactcctcacgaaaagcaagtgatgatgttctccgcaacactgtctaaggagatacgccccgtctgtcgcaaattcatgcaggatccgatggaaatatttgtggacgacgaaaccaagcttaccctgcacggcctccagcaatattatgtgaagcttaaagacaacgaaaaaaaccggaagctttttgatcttcttgacgttctcgaatttaatcaggtcgtgatcttcgtgaagtccgtgcaaaggtgcatcgctctggctcagttactggtggaacagaacttccccgcgatcgccattcaccgaggcatgcctcaagaagagcgattatctcggtaccagcagtttaaggacttccagcgccgcattttggttgccaccaatttgtttggcaggggaatggacattgaaagggttaacattgccttcaattatgatatgcctgaggactctgatacctatctgcaccgcgttgcacgagccgggcggttcggcactaaaggactggcaatcaccttcgtgagtgatgaaaacgacgctaagattctgaacgatgtgcaagaccgctttgaggtgaatatatcagagctgcccgatgaaatagacatctccagctacattgagcaaacacggtag

SEQ ID NO: 231672 - DNA, 732 bp, Artificial Sequence
  derived and/or modified sequence
atgtggacgatgtccagttggaccatgaaaatgatgaggtggcggcagcagcttggcgagatgggcttgagacccctaccccggagaatgtcccgcgctcccatgtcccctagtacagctctggcctttgtcacctcatgtagctcccagagctgctccgggcctttaagcacagtggcactgagtattcgccagaaggtttccgtcctcgttatgtgtcacaccagggagttggcctttcagattagtaaagagtacgagcgcttctccaagtatatgcctaatgtgaaagtggccgtgtttttcgggggtctgagtataaagaaagatgaggaggttctaaagaaaaactgcccacacattgtggttggcactcctgggagaatcctggcactggcaaggaataagagcttgaatttaaaacacatcaaacacttcatcctggatgaatgtgataaaatgctggagcagttagatatgagacgcgacgtgcaggaaatcttcagaatgacgcctcacgaaaaacaggtgatgatgttttccgccacactttcaaaagaaattagacctgtctgccggaaattcatgcaagatgttaacacactcctgccatccttgcctccgctacccgctaggtgcttactccccttcctcgctcttttcctaagattgccatgtcatagcagcgccaagaaggctgcatgtgcccagctcggcgtgatgaccccttag

SEQ ID NO: 231673 - DNA, 1053 bp, Artificial Sequence
  derived and/or modified sequence
atgtggacaatgagctcctggacaatgaagatgatgcgatggcgtcagcagctgggtgaaatggggctgagaccactcccccgccgtatgtcccgcgcacccatgtcgccatccacagccctggccttcgtgacatcatgcagtagtcagtcatgttctggacctctttccaccgtggccctgagcatccgccagaaagtcgccgtgttttttggaggactaagcatcaagaaggacgaggaggtgcttaagaagaactgtcctcacattgtggtgggaacgccaggaaggattctcgctttagctagaaataagtcattgaatctgaaacacattaagcacttcattcttgatgagtgcgacaagatgctggaacagctggatatgaggcgagatgtgcaggagattttccgaatgacaccacacgagaaacaggttatgatgttttccgcaacactgtcaaaggaaattcgcccagtctgccggaagttcatgcaggatccaatggaaatcttcgtggatgatgagaccaagcttacactgcacgggttgcagcaatactacgtgaagctgaaagataacgaaaagaaccgaaaacttttcgatctgctggacgtactggaatttaaccaggtagttatcttcgtcaaaagcgtgcagaggtgtattgcacttgcccaattactggtagaacaaaacttcccagcaatcgctattcataggggaatgccccaggaggagcggttgtctaggtaccagcagtttaaagacttccagcgcaggatccttgtagcgactaacttgtttggcaggggaatggacatagaacgggtaaatattgcatttaattacgacatgccagaagattcagatacctacctgcacagagttgcacgagctggaaggttcggtaccaaaggcctcgccattactttcgtgagtgacgagaatgatgctaaaatactgaacgacgttcaggatcggtttgaagtcaacataagtgagctgccagacgaaatcgacatttccagctacatcgaacaaacgcgctag

SEQ ID NO: 231674 - DNA, 1332 bp, Artificial Sequence
  derived and/or modified sequence
atggccgagaacgatgtggataacgagctgttagattacgaggatgatgaggtagagacagccgcaggcggcgacggtgctgaggcccctgctaagaaggacgtcaagggatcctatgtgagtattcattcctcaggctttcgggactttctgttaaaaccggagttactccgagctatagtcgattgtggcttcgaacatccttccgaggtacaacacgaatgcatcccccaggctatcttgggcatggacgtgttgtgtcaagccaaatctgggatggggaaaactgcggtgtttgtgctggcgacactgcagcagttggagcctgtgacaggccaggtgtaccttggaagggttctaggacgtggattttggtgcgtcttcgtatcggtgttagtcatgtgccatactagggagcttgcgttccaaatttcaaaggagtacgaacggttttctaaatacatgccgaacgtgaaagttgctgttttcttcgggggactgagcattaaaaaggacgaggaggtgctgaagaaaaattgtccgcatattgtcgtaggcacgccaggacgaattcttgctctggctcgtaacaagtccttaaacctgaagcatatcaaacattttatactggacgagtgtgataaaatgctcgagcaacttgatatgagacgcgacgtacaggaaatattccgaatgactcctcacgagaaacaagtcatgatgttctccgcaacactcagcaaggaaatccgccccgtgtgcaggaaatttatgcaagatccaatggaaatcttcgtagacgacgagactaaactgacactgcacgggttacagcagtattatgtcaagctgaaggataacgagaagaaccggaaactctttgatcttctagacgtgctcgagtttaatcaggtggtaatctttgtcaaatcagtacaaagatgcatcgccctggcgcaattattagtggaacagaattttccagctattgcaatccataggggcatgccccaagaagagaggctgagtcggtaccagcagtttaaagacttccaaagaagaattttggttgccactaacctattcggtcgggggatggacatcgaacgggtgaatattgcctttaattacgatatgccagaagactccgatacatatttgcatcgggtggctcgcgctggccggtttggcaccaagggtctggctatcacatttgtaagcgatgaaaatgacgccaagattctcaatgacgtccaggaccgattcgaggtgaacatctcagagctgcctgacgaaattgatatatcctcctacatcgagcaaactcgctag

SEQ ID NO: 231675 - DNA, 1053 bp, Artificial Sequence
  derived and/or modified sequence
atgtggaccatgagttcctggacaatgaaaatgatgcgctggaggcagcaactaggggaaatggggcttcgtcctcttcctaggcgaatgagtcgggcccccatgtcgccaagcactgccttggccttcgtaacgtcttgctctagtcagagttgtagcggccctctttcaaccgtggccctctctataagacagaaggtcgcagtttttttcggtggtctctccattaagaaggacgaagaggtcctgaaaaagaactgtccacacatagtagtcggaactcctggccgaatcttggccctggcccggaacaagagtctcaatctcaaacacattaagcacttcatcctggacgaatgcgacaagatgctcgagcagcttgacatgaggagagatgtgcaggagatcttcaggatgacaccacatgagaaacaagtgatgatgttctccgcaaccttatcaaaagaaatcagaccagtgtgcaggaagttcatgcaggaccctatggaaattttcgtcgatgatgaaaccaagttaacccttcatggcttacaacaatactatgtcaagctcaaagacaacgagaagaatcggaaacttttcgacttgttagacgtcctggagttcaatcaagtggtgattttcgtcaaatccgtgcagcggtgtatcgccctggcccagttactggtggagcagaattttccagcaattgcgatccacaggggaatgccccaagaggaacggctgtcccgataccagcagttcaaagatttccaaaggcggatcctggtagccaccaatctgtttgggagggggatggacattgagagagtgaatattgcgtttaattatgatatgcccgaggactccgatacctacctgcatcgcgtcgcacgcgctgggcgctttggaactaagggcctggccatcacctttgtgagtgacgaaaacgacgctaagatactgaacgatgtacaggaccgctttgaggtgaacataagtgaactgcccgacgaaatcgacatcagtagttacatagaacagacaagatag

SEQ ID NO: 231676 - DNA, 732 bp, Artificial Sequence
  derived and/or modified sequence
atgtggacgatgtcctcctggacaatgaaaatgatgagatggcggcagcaacttggtgagatggggcttaggcctctgccccggaggatgagtcgcgctcccatgagcccaagcacagcgctggcctttgttacgtcctgttccagccagtcttgctctggacccttgagtacagtggccctcagcatccggcagaaagtgtccgtgctcgtcatgtgtcacacgcgtgagctcgcgttccagatttcaaaggaatacgaacggttctcgaaatacatgccaaacgtgaaagtcgcagtgtttttcggcggcctcagtatcaagaaagacgaagaggtgttgaaaaagaattgccctcatattgtggtcggtactccaggacgcatattggcactggctcggaacaagtccctgaacctgaagcatatcaaacattttatcttggatgaatgtgacaaaatgctggagcagttagacatgagacgggacgttcaggagatatttagaatgactcctcacgagaaacaggtgatgatgttctccgctacactcagcaaggagataagacctgtatgtcgaaaatttatgcaggacgtgaatacactgttaccatccctgccacctctgccagcccggtgtttactaccatttctagcactgtttctccggctcccttgccacagctcggctaaaaaagccgcctgtgctcagctgggagtcatgacgccttag

SEQ ID NO: 231677 - DNA, 420 bp, Artificial Sequence
  derived and/or modified sequence
atggccgaaaatgacgttgataatgagttgctggattacgaggacgacgaagtcgaaacagctgccggaggagatggcgctgaggcgcctgcaaagaaggatgtgaagggcagctatgtttccatccactcgtcagggttcagggattttctgcttaaacctgaactattgagggcaatcgtagactgtggattcgaacatccctccgaggtgcagcatgagtgcataccgcaagccattctggggatggacgtcctgtgccaagctaagtcaggtatggggaaaaccgccgtgtttgtgcttgctacccttcagcagttggagccagtgaccgggcaaagccacgagcacatgacaagcgtgactcttgacaatctgacagcagtgggtgacgtcctctctcaagcatggggatcctag

SEQ ID NO: 231678 - DNA, 1053 bp, Artificial Sequence
  derived and/or modified sequence
atgtggactatgagcagttggactatgaagatgatgcgctggcggcagcaactaggtgagatgggtctgcggcctttgcccaggagaatgtcccgggcacccatgtcaccctcaacagcactggcgtttgtcacgtcctgcagctcccagtcatgttccggccccttgagcactgtggccttaagcatcaggcagaaggttgctgtgtttttcgggggcctcagcattaaaaaagacgaggaggtcctgaaaaaaaattgcccgcacatagtggttggcacaccaggccggattctggctttggccaggaataaatcattaaacttgaagcacattaagcacttcatcctcgatgagtgtgacaaaatgctggaacagttagatatgcggcgggacgtgcaggagatcttccggatgactccacatgagaaacaggttatgatgttctcagccacgctctctaaagagatacgtccggtgtgcagaaaattcatgcaggatcccatggagattttcgtcgacgatgaaactaagctgacgctgcatggcctgcagcagtactacgtgaaactcaaggataatgagaagaacagaaaattgtttgatctgctggatgttctcgaatttaaccaagtcgttatctttgttaagtccgtccagcggtgtatcgcactggctcagttgctggtagaacaaaattttcctgccatcgcaattcaccgcgggatgccccaggaggagcggctcagcaggtaccaacaatttaaggacttccaaagacggatcctcgtggccactaacctgttcggtcggggaatggacatagagcgggtgaacattgcctttaactatgacatgccggaagacagcgatacttacctgcatagggtggccagggccggacggtttggcacaaagggcctcgctatcacatttgtgtcagatgagaacgacgccaagattctgaacgacgtccaagatcggtttgaggtcaacatctcagagctaccagacgaaatcgatatcagctcctatatcgagcaaacaaggtag

SEQ ID NO: 231679 - DNA, 972 bp, Artificial Sequence
  derived and/or modified sequence
atggcagaaaacgatgtcgataatgaattactggactatgaggatgatgaagttgagacggcggcagggggagatggtgcagaggcaccagctaagaaagacgtgaagggatcgtatgtgagcatacatagctccgggtttcgcgactttctgttaaagccagagctcttgagagctatcgtcgactgcggctttgaacacccaagcgaagttcaacacgagtgcatcccccaagcaattctgggcatggatgttctgtgccaggctaaaagcggcatgggcaagactgcagtttttgtgctcgctactcttcaacagcttgagcctgttacaggacaagtgagtgtgctggtgatgtgtcacacccgggaactggcctttcaaatttcaaaggagtatgaacggttcagtaaatacatgcctaacgttaaggtggcagttttcttcggaggcctgagtattaaaaaggatgaagaggtgctgaaaaagaattgcccccatatcgtcgtaggtactccgggccgcatcctggcactcgcaagaaataagtcactcaaccttaagcacatcaaacattttatattagatgagtgcgataaaatgctggagcagctcgatatgcgaagagatgtgcaagaaatcttcaggatgactccccacgagaaacaagtgatgatgttttcggctactctgagcaaggagatacgtcctgtgtgcagaaaattcatgcaggatccaatggaaattttcgtagacgacgagacaaaattgactctacacggactgcagcaatattatgtcaagctgaaagacaatgagaaaaatcgaaagctcttcgatcttctggatgtgcttgaattcaaccaggaaattacttgcaagtctgtccaacgcttctccaccaccaactcctgtggataccaaccaatctggcccagacacgggcatagggccggcgaacactgtttttag

SEQ ID NO: 231680 - DNA, 1053 bp, Artificial Sequence
  derived and/or modified sequence
atgtggacaatgtcctcttggacaatgaagatgatgcgctggaggcagcagctgggggagatgggcttgcgaccgcttcctaggcgtatgtcccgggccccaatgtccccaagtaccgcgctggcgttcgtgacctcttgcagtagccagtcttgcagtgggccgctgagtaccgttgccttaagcattcggcagaaagtggctgtgtttttcgggggtctgtccatcaagaaggacgaggaagtgctgaaaaaaaattgcccgcatatagtcgtcggcacacctggacgaatacttgctctggcccgcaataaatccctaaatttgaaacatataaaacatttcattctggacgagtgcgataaaatgcttgaacagctggatatgagacgcgacgtgcaagaaatttttcgcatgaccccccacgagaagcaggttatgatgttcagcgccactctatcaaaggagattaggcccgtgtgccgcaaattcatgcaggaccccatggagatctttgtagacgacgaaaccaagctgacactgcatggcctgcaacagtattacgttaagttgaaagataatgagaagaatcgaaagctattcgacctgctagatgtcctcgagtttaaccaagtcgtgatatttgtgaaatctgtacagagatgcatagcattggcgcagcttctggtggaacaaaacttccctgcaatcgcaatccatcgggggatgccccaagaggaacggcttagcagataccagcagtttaaagacttccagagaaggatcctggtggcaacaaacctgttcgggaggggcatggacatcgaacgcgttaatatagcctttaactatgacatgcctgaagattcagacacataccttcatcgtgtcgccagagccgggcgattcgggaccaagggtctggccatcacgttcgtgagcgatgaaaacgatgcgaagatcttgaacgacgtgcaggacaggtttgaggtcaacatcagcgaactgcctgacgagattgacattagctcttacattgagcaaactcgttag

SEQ ID NO: 231681 - DNA, 420 bp, Artificial Sequence
  derived and/or modified sequence
atggctgagaacgatgtcgacaatgagctactggattacgaagacgatgaagtagagaccgccgccggtggcgatggggctgaggcacccgccaagaaagacgtcaaaggcagctacgtttctatccatagctccgggttcagggatttccttctgaaacccgaattacttagagccatcgtggattgcggcttcgagcaccctagcgaggtgcagcacgaatgtattccacaggccattcttgggatggatgtgctgtgccaggccaagagtggtatgggaaagacagccgtctttgtcttggccactctgcagcagctggaacccgtgacaggccaaagccatgaacatatgaccagtgtcactttagataacctaaccgccgtgggggatgttctttctcaggcttggggctcatag

SEQ ID NO: 231682 - DNA, 1332 bp, Artificial Sequence
  derived and/or modified sequence
atggcagagaatgacgtcgataatgagttattagactacgaggatgatgaggtggagaccgccgctggaggcgatggagctgaagccccagccaaaaaagacgttaaggggtcttacgttagtatccatagctcaggattccgcgatttcctcctgaagccagagctgctgagagccattgtcgactgtgggtttgaacacccctccgaagttcaacacgagtgtataccacaggccattctagggatggatgtcctgtgccaggccaagagtgggatgggcaaaactgcagttttcgtactggcaaccttgcagcagctggagcccgtgactgggcaagtttacctcggcagagtgcttggccgcgggttctggtgtgtgtttgtgtcagttttggtcatgtgccacactcgggagcttgcgttccagatcagtaaagagtacgaacgcttcagtaaatacatgcccaatgtaaaggtggcagtcttttttgggggtctgtcgattaagaaggacgaggaggttttgaagaagaactgcccccacattgtggtgggaactcccggacgaattctcgccctggccaggaacaaatcacttaacctcaaacatatcaagcactttatcctggacgaatgtgataaaatgcttgagcagttagatatgcgcagagacgtgcaggaaattttcaggatgaccccgcatgaaaaacaggtgatgatgtttagtgctaccctgagcaaagaaatacgacccgtgtgtcgcaagttcatgcaggaccctatggagatcttcgtggacgatgaaacaaagttaaccctgcacggcctgcagcaatattacgttaagctgaaggataacgagaagaacaggaagctctttgacttgctcgacgtcctcgaatttaaccaagtggtgatcttcgtgaaatccgtccagcggtgtatcgccctggctcagcttcttgtcgagcagaacttccccgctatcgctattcaccgaggaatgcctcaggaggagagactgagccggtaccagcagttcaaggatttccagcgtcggatactcgtagccacaaatttattcggcagagggatggatatcgagagagtaaacatcgctttcaactacgacatgcctgaagatagtgatacgtaccttcatagggtggccagggctggcaggttcgggaccaagggccttgcaatcacttttgtgtcggatgagaatgatgccaagatacttaatgatgttcaggataggttcgaggtgaatatctcagagctgcctgatgagatcgatatatcctcttacatagagcagacacgatag

SEQ ID NO: 231683 - DNA, 972 bp, Artificial Sequence
  derived and/or modified sequence
atggctgagaacgatgtggacaacgaactgttggattatgaagacgacgaagtggagaccgccgctggcggagacggtgccgaggctccggccaaaaaagacgtaaaaggcagttatgtctcaatccacagctctggttttcgagacttcttgcttaagccggagctgctgagagctatcgtcgactgcggctttgagcacccctccgaagtgcagcacgagtgcatcccccaggctattttagggatggacgtgctgtgccaggccaagtcggggatgggtaaaacagctgtttttgttctggcgaccctccaacagctagaaccagtaacaggacaggtctctgttcttgttatgtgccataccagagaattagcattccaaattagcaaggagtacgagcgcttctccaaatatatgcccaatgttaaagtggctgttttctttggtggtctctcaattaaaaaagacgaggaagtgcttaaaaagaactgtccccacattgtggtgggtaccccaggcaggatcctggcactggctaggaataagtctcttaatttgaaacacattaaacattttatcctggacgagtgcgacaagatgctagagcagctggatatgagaagggatgtccaggaaatctttcggatgacgcctcatgaaaagcaggtgatgatgttcagtgcaaccttgagtaaagaaatcaggccagtctgcagaaaatttatgcaggatcctatggaaatcttcgtggatgatgaaactaaactgacattgcacgggctgcaacagtactacgtgaaactcaaagacaatgaaaagaaccgcaagctttttgacctgctggacgtgttagaattcaatcaggagataacctgcaagtccgtgcagcgcttctccaccactaacagctgtggctaccagccaatctggccacggcacgggcatcgcgccggtgaacactgtttctag

SEQ ID NO: 231684 - DNA, 972 bp, Artificial Sequence
  derived and/or modified sequence
atggccgagaacgacgtagacaatgaactgctagactacgaagatgacgaagtggagaccgccgctggtggcgacggcgcagaggcaccagctaagaaggatgtcaaaggatcatacgttagtatacattcgagcggctttagggacttcctccttaaacctgagctgctcagagcgatagtggattgcgggttcgaacacccctcagaagttcagcacgagtgtatccctcaggccattttaggtatggatgtcctgtgccaggccaagtcaggtatgggcaaaaccgcagtgttcgtgcttgctacactgcagcagctggaaccagttaccgggcaggtttcggttttagtaatgtgccacaccagagagctcgcgttccaaatctcaaaggagtacgaaagattttcgaagtacatgccaaatgtgaaagtggctgtattcttcggcgggcttagtataaaaaaggacgaggaggttttgaaaaagaattgcccacacatcgttgtgggtacccctggaaggatactcgcactggctcggaacaagagcctgaaccttaaacacatcaagcacttcatcctggatgagtgcgataaaatgttggagcagctggacatgagaagggatgttcaggaaatctttcgtatgacccctcatgaaaaacaggtaatgatgttttcggcaactctgtccaaggagatccgacctgtgtgcaggaaattcatgcaggaccccatggagatcttcgttgatgacgaaactaagctgacgttgcacggccttcaacagtactacgtgaaactcaaagataacgaaaaaaatagaaagttgttcgacctgttggacgtgcttgagttcaaccaggagatcacatgtaagtcagttcagcgattcagtaccactaatagctgtggatatcagcccatctggcctcgtcacggacatcgggctggcgagcattgtttttag

SEQ ID NO: 231685 - DNA, 1053 bp, Artificial Sequence
  derived and/or modified sequence
atgtggaccatgtcctcatggacaatgaaaatgatgagatggcgacaacaactgggagaaatgggcctgagacccctgcccaggcgcatgagccgcgcacctatgagcccctctactgccctggctttcgtgactagctgttcaagccaatcatgcagcggacctcttagcaccgtggccctgagcatcaggcagaaggtggcagtattctttggcggcctctctattaagaaggacgaggaagttctgaagaaaaactgtccccatattgttgtgggaacccctggtaggatcctggccctagccagaaacaagagtctgaacctcaagcacattaagcacttcatcctggatgaatgcgacaagatgctagaacaactggatatgcgtcgcgacgtgcaggaaatttttcgcatgactcctcacgaaaagcaagtgatgatgtttagtgccactctttcaaaagagataagacctgtctgtaggaaattcatgcaggaccctatggagattttcgtcgatgacgaaaccaaactgacactgcacgggcttcaacagtattatgtgaagctgaaagacaacgagaaaaatcggaagttgtttgacctgctggatgttctggagtttaatcaagtggttatctttgtgaaatccgtgcagcggtgtatcgcgctcgcccagcttctggtggagcagaactttcctgccatcgctatccaccgagggatgcctcaggaagaacgcctgtcgaggtatcagcagttcaaagacttccaaagaagaattctagtcgccaccaatttgttcggccgagggatggacatcgagagggtgaatattgcctttaactatgatatgccagaggattccgacacatatcttcatagggtggcccgggctgggagattcgggaccaaaggcctggctatcacgtttgtatcagacgaaaatgacgctaagatacttaatgatgtgcaggacaggtttgaagtgaatatttccgagctacccgacgaaatcgacatttcgtcctacatcgaacaaaccaggtag

SEQ ID NO: 231686 - DNA, 420 bp, Artificial Sequence
  derived and/or modified sequence
atggcagagaatgacgttgacaacgagctcctggattacgaagacgatgaagtcgagacggccgccgggggcgatggcgcagaggcccccgcgaagaaggatgtgaagggatcttatgtatccattcacagttctgggtttagggacttcctccttaagccggagctgcttagggccatcgttgattgcggattcgagcatccaagcgaagtccagcatgagtgcatcccccaagccatcctcgggatggatgtgctgtgtcaggcgaagagtggaatgggcaagactgctgttttcgtgcttgcaacactccagcaactggagccagtcaccggtcagagccacgagcacatgactagcgtgacgctggacaacctgaccgccgtgggggatgttctcagccaggcttggggaagctag

SEQ ID NO: 231687 - DNA, 1053 bp, Artificial Sequence
  derived and/or modified sequence
atgtggacaatgtctagttggacgatgaagatgatgcgatggaggcaacagctcggcgagatgggactgcgtccgcttccacggcggatgtcacgtgctcctatgtccccctctactgctctggcctttgttacatcctgtagttcacagagctgtagcggcccattatctaccgtcgcactgtccattagacaaaaggtggcggtcttcttcggtgggctgtccataaagaaggacgaagaagtgttgaaaaagaattgtccgcatatcgtcgttggtacccctggacggattctggccctagctcgtaataaaagtttaaaccttaagcatataaaacacttcatcctggacgagtgtgataaaatgctggagcagctggacatgcgtcgggacgttcaagaaatattccgtatgacacctcacgagaagcaggtgatgatgttttcagccacactctcgaaggaaattcgcccggtctgtcggaagttcatgcaggacccaatggagatttttgtggatgatgaaactaagctcacccttcacgggctgcagcagtactacgtcaagctgaaagataacgagaagaatagaaagctgtttgacttactcgatgtgctggagtttaatcaggtggttatctttgtcaaatcggtgcagcgctgcatcgctttagcccagttactggtggaacagaacttcccagcgatcgcgatccatagaggcatgccacaggaagagcggcttagccgttaccagcagttcaaagatttccagaggcgcattttggtggcgaccaatctcttcggccggggaatggacattgagagggtgaatatcgctttcaactacgacatgcccgaagacagcgatacctatttgcacagagtggcacgggctggacgcttcggtaccaaaggactcgccatcacattcgtctccgacgagaacgacgccaaaatacttaatgacgtgcaggatcgcttcgaggtgaatatctccgagctgcctgacgaaatcgacatatcatcatatattgaacagaccaggtag

SEQ ID NO: 231688 - DNA, 420 bp, Artificial Sequence
  derived and/or modified sequence
atggccgagaatgatgtcgacaatgagttgttggattatgaggatgatgaagtggagacggctgctggaggagacggtgctgaggccccagctaagaaagacgttaaaggctcttatgtgtcaatccattcttctgggtttcgtgactttctactaaaaccagaactgcttcgcgctattgtggattgcggctttgagcacccttctgaagtgcagcacgagtgtattcctcaagctatccttggtatggacgtactttgccaggccaagtctggaatggggaaaactgcagtcttcgtgctggccacactacagcagctagaacccgtgacgggacagagccacgagcacatgacatctgtaacactggacaatctgactgccgtaggagatgttctatcccaggcctggggctcttag

SEQ ID NO: 231689 - DNA, 1332 bp, Artificial Sequence
  derived and/or modified sequence
atggccgagaacgacgtggacaatgagcttctagattacgaggacgatgaggttgaaactgccgcgggcggcgacggggcagaggccccagcgaagaaagacgtgaagggctcttatgtaagtatccacagctccggtttccgcgactttctgctgaagcctgagctccttcgcgccatcgttgattgtgggtttgagcatccctccgaagtgcagcacgagtgcatcccccaggctatccttggaatggacgttctgtgtcaagctaagtccggcatgggtaagacagctgtgttcgtcctggccaccctgcagcagctcgagccagtgaccgggcaggtgtaccttggccgggtactgggtcggggcttctggtgcgtgttcgttagtgtgctggtgatgtgccacacaagagagttggcgttccagattagcaaagagtacgagcgcttctcaaagtacatgccgaatgtgaaagttgctgtgtttttcggaggattatcaatcaagaaagatgaggaggtcctaaagaaaaattgtccgcatattgtggtgggaacgccaggccgcattctggccctagcccggaataaatccttgaacctgaagcatattaagcatttcattctcgacgaatgcgataagatgttagaacagttggacatgcggcgggatgtgcaggaaattttccgcatgaccccccatgaaaagcaggttatgatgttcagcgctactcttagcaaagaaatccgccccgtctgtcgaaaatttatgcaagaccccatggagatcttcgtcgatgacgaaacaaaacttaccctccatggattacagcagtattacgtcaagttgaaagataacgagaaaaataggaagctgttcgatctgctagatgtcctggagtttaaccaggtggtgatctttgtcaaaagtgtccaacggtgcatcgctcttgcgcagctgttagtggaacaaaatttccccgctattgccatccatcgtggaatgccacaagaagagcgattgagcaggtatcaacaatttaaggactttcagaggaggatcctagtagctactaacctattcggccgcggcatggatatcgaaagggtgaatattgcgttcaactatgatatgcctgaagactcagatacatacctgcatagggtggctagggccggtcgatttggaacaaaagggctggcgattacctttgtatccgacgaaaatgacgctaagatcctcaacgacgtgcaggacagatttgaggtgaacatatcggaactacccgacgaaattgacatttcaagttatatcgaacaaacaagatag

SEQ ID NO: 231690 - DNA, 552 bp, Artificial Sequence
  derived and/or modified sequence
atggaaatctttgtggacgacgagactaaactgactttgcatggtctacagcagtactatgtcaagctcaaggataacgaaaagaataggaaactcttcgacctgctggatgtgctcgagttcaatcaggttgtgatttttgtgaagagcgttcagcgctgtatcgctttagcgcagctacttgtggaacagaattttcccgctatcgctatccaccgtggcatgccacaggaggagaggtggctgtctcggtatcagcagttcaaggattttcagaggaggatccttgtagccacaaatctgtttggaagagggatggatatcgagcgggtcaacattgcatttaattatgatatgcctgaagactccgacacttacctccatcgggtcgcacgggccggacggttcggcactaagggattggccataacctttgtaagcgatgaaaacgatgccaagatcttaaatgatgtgcaagacagatttgaggtaaacatctccgaactgccagatgagatcgacatctcctcatatatcgagcagacccggtag

SEQ ID NO: 231691 - DNA, 1278 bp, Artificial Sequence
  derived and/or modified sequence
atggctgaaaatgatgtggacaatgagctgctggactatgaagatgatgaggtggagacagctgctggaggagatggagctgaggccccagccaagaaggatgtgaagggcagctatgtgtccatccacagcagcggcttccgggacttcctgctgaagccagagctgctgcgggccatcgtggactgtggctttgagcaccccagcgaggtgcagcacgagtgcatcccccaggccatcctgggcatggatgtgctgtgccaggccaagagcggcatgggcaagacagctgtgtttgtgctggccaccctgcagcagctggagcctgtgacaggccaggtgtctgtgctggtgatgtgccacacccgggagctggccttccagatcagcaaggagtatgagcgcttcagcaagtacatgcccaacgtgaaggtggccgtgttctttggaggcctgagcatcaagaaggatgaggaggtgctgaagaagaactgcccccacatcgtggtgggcaccccaggccgcatcctggccctggccaggaacaagagcctgaacctgaagcacatcaagcacttcatcctggatgaatgtgacaagatgctggagcagctggacatgagaagagatgtgcaggagatcttcaggatgacccctcatgagaagcaggtgatgatgttcagcgccaccctgagcaaggagatccggcctgtgtgcaggaagttcatgcaggaccccatggagatctttgtggatgatgagaccaagctgaccctgcacggcctgcagcagtactacgtgaagctgaaggacaatgagaagaacaggaagctgtttgacctgctggatgtgctggagttcaaccaggtggtgatctttgtgaagtctgtgcagcgctgcatcgccctggcccagctgctggtggagcagaacttccctgccatcgccatccaccggggcatgccccaggaggagcggctgagccgctaccagcagttcaaggacttccagaggcgcatcctggtggccaccaacctgtttggccggggcatggacatcgagcgggtgaacatcgccttcaactatgacatgcctgaggacagcgacacctacctgcaccgctgctaccccctgagccccagccgctggccagagcaggccggcctggccccccgggcctggctgagccacctgtgccccatgaggatgatgcccaggagctccatgatgtgcagaattgccctgcggagcatcctggtgtcctgcctgatgaggtag

SEQ ID NO: 231692 - DNA, 1287 bp, Artificial Sequence
  derived and/or modified sequence
atggctgaaaatgatgtggacaatgagctgctggactatgaagatgatgaggtggagacagctgctggaggagatggagctgaggccccagccaagaaggatgtgaagggcagctatgtgtccatccacagcagcggcttccgggacttcctgctgaagccagagctgctgcgggccatcgtggactgtggctttgagcaccccagcgaggtgcagcacgagtgcatcccccaggccatcctgggcatggatgtgctgtgccaggccaagagcggcatgggcaagacagctgtgtttgtgctggccaccctgcagcagctggagcctgtgacaggccaggtgtctgtgctggtgatgtgccacacccgggagctggccttccagatcagcaaggagtatgagcgcttcagcaagtacatgcccaacgtgaaggtggccgtgttctttggaggcctgagcatcaagaaggatgaggaggtgctgaagaagaactgcccccacatcgtggtgggcaccccaggccgcatcctggccctggccaggaacaagagcctgaacctgaagcacatcaagcacttcatcctggatgaatgtgacaagatgctggagcagctggacatgagaagagatgtgcaggagatcttcaggatgacccctcatgagaagcaggtgatgatgttcagcgccaccctgagcaaggagatccggcctgtgtgcaggaagttcatgcaggaccccatggagatctttgtggatgatgagaccaagctgaccctgcacggcctgcagcagtactacgtgaagctgaaggacaatgagaagaacaggaagctgtttgacctgctggatgtgctggagttcaaccaggtggtgatctttgtgaagtctgtgcagcgctgcatcgccctggcccagctgctggtggagcagaacttccctgccatcgccatccaccggggcatgccccaggaggagcggctgagccgctaccagcagttcaaggacttccagaggcgcatcctggtggccaccaacctgtttggccggggcatggacatcgagcgggtgaacatcgccttcaactatgacatgcctgaggacagcgacacctacctgcaccgggtggcccgggccggccgcttcggcaccaagggcctggccatcacctttgtgtctgatgaaaatgatgccaagatcctgaatgatgtgcaggacagatttgaggtgaacatcagcgagctgcctgatgaaattgacatcagcagctacatcgagcagaccaggtag

SEQ ID NO: 231693 - DNA, 564 bp, Artificial Sequence
  derived and/or modified sequence
atgggcagcagccacatcggcggcctgagcatcaatgaaagacgctgcagcgccagcctgggcctggtgatggccgagaatgatgtggacaatgagctgctggactatgaagatgatgaggtggagacagctgctggaggagatggagctgaggccccagccaagaaggatgtgaagggcagctatgtgtccatccacagcagcggcttccgggacttcctgctgaagccagagctgctgcgggccatcgtggactgtggctttgagcaccccagcgaggtgcagcacgagtgcatcccccaggccatcctgggcatggatgtgctgtgccaggccaagagcggcatgggcaagacagctgtgtttgtgctggccaccctgcagcagctggagcctgtgacaggccaggtgtctgtgctggtgatgtgccacacccgggagctggccttccagatcagcaaggagtatgagcgcttcagcaagtacatgcccaacgtgaaggtggccgtgttcttcggcggcctgagcatcaagaaggatgaggaggtgctgaagaagaactag

SEQ ID NO: 231694 - DNA, 378 bp, Artificial Sequence
  derived and/or modified sequence
atggctgaaaatgatgtggacaatgagctgctggactatgaagatgatgaggtggagacagctgctggaggagatggagctgaggccccagccaagaaggatgtgaagggcagctatgtgtccatccacagcagcggcttccgggacttcctgctgaagccagagctgctgcgggccatcgtggactgtggctttgagcaccccagcgaggtgcagcacgagtgcatcccccaggccatcctgggcatggatgtgctgtgccaggccaagagcggcatgggcaagacagctgtgtttgtgctggccaccctgcagcagctggagcctgtgacaggccaggtgtctgtgctggtgatgtgccacacccgggagctgtag

SEQ ID NO: 231695 - DNA, 564 bp, Artificial Sequence
  derived and/or modified sequence
tgaagtgaggagcgggacatcggcaagcccatggagatctttgtggatgatgagaccaagctgaccctgcacggcctgcagcagtactacgtgaagctgaaggacaatgagaagaacaggaagctgtttgacctgctggatgtgctggagttcaaccaggtggtgatctttgtgaagtctgtgcagcgctgcatcgccctggcccagctgctggtggagcagaacttccctgccatcgccatccaccggggcatgccccaggaggagcggctgagccgctaccagcagttcaaggacttccagaggcgcatcctggtggccaccaacctgtttggccggggcatggacatcgagcgggtgaacatcgccttcaactatgacatgcctgaggacagcgacacctacctgcaccgggtggcccgggccggccgcttcggcaccaagggcctggccatcacctttgtgtctgatgaaaatgatgccaagatcctgaatgatgtgcaggacagatttgaggtgaacatcagcgagctgcctgatgaaattgacatcagcagctactag

SEQ ID NO: 231696 - DNA, 870 bp, Artificial Sequence
  derived and/or modified sequence
atggctgaaaatgatgtggacaatgagctgctggactatgaagatgatgaggtggagacagctgctggaggagatggagctgaggccccagccaagaaggatgtgaagggcagctatgtgtccatccacagcagcggcttccgggacttcctgctgaagccagagctgctgcgggccatcgtggactgtggctttgagcaccccagcgaggtgcagcacgagtgcatcccccaggccatcctgggcatggatgtgctgtgccaggccaagagcggcatgggcaagacagctgtgtttgtgctggccaccctgcagcagctggagcctgtgacaggccaggtgtctgtgctggtgatgtgccacacccgggagctggccttccagatcagcaaggagtatgagcgcttcagcaagtacatgcccaacgtgaaggtggccgtgttctttggaggcctgagcatcaagaaggatgaggaggtgctgaagaagaactgcccccacatcgtggtgggcaccccaggccgcatcctggccctggccaggaacaagagcctgaacctgaagcacatcaagcacttcatcctggatgaatgtgacaagatgctggagcagctggacatgagaagagatgtgcaggagatcttcaggatgacccctcatgagaagcaggtgatgatgttcagcgccaccctgagcaaggagatccggcctgtgtgcaggaagttcatgcaggaccccatggagatctttgtggatgatgagaccaagctgaccctgcacggcctgcagcagtactacgtgaagctgaaggacaatgagaagaacaggaagctgtttgacctgctggatgtgctggagttcaaccagtag

SEQ ID NO: 231697 - DNA, 291 bp, Artificial Sequence
  derived and/or modified sequence
atggctgaaaatgatgtggacaatgagctgctggactatgaagatgatgaggtggagacagctgctggaggagatggagctgaggccccagccaagaaggatgtgaagggcagctatgtgtccatccacagcagcggcttccgggacttcctgctgaagccagagctgctgcgggccatcgtggactgtggctttgagcaccccagcgaggtgcagcacgagtgcatcccccaggccatcctgggcatggatgtgctgtgccaggccaagagcggcatgggcaagacctag

SEQ ID NO: 231698 - DNA, 696 bp, Artificial Sequence
  derived and/or modified sequence
atggctgaaaatgatgtggacaatgagctgctggactatgaagatgatgaggtggagacagctgctggaggagatggagctgaggccccagccaagaaggatgtgaagggcagctatgtgtccatccacagcagcggcttccgggacttcctgctgaagccagagctgctgcgggccatcgtggactgtggctttgagcaccccagcgaggtgcagcacgagtgcatcccccaggccatcctgggcatggatgtgctgtgccaggccaagagcggcatgggcaagacagctgtgtttgtgctggccaccctgcagcagctggagcctgtgacaggccaggtgtctgtgctggtgatgtgccacacccgggagctggccttccagatcagcaaggagtatgagcgcttcagcaagtacatgcccaacgtgaaggtggccgtgttctttggaggcctgagcatcaagaaggatgaggaggtgctgaagaagaactgcccccacatcgtggtgggcaccccaggccgcatcctggccctggccaggaacaagagcctgaacctgaagcacatcaagcacttcatcctggatgaatgtgacaagatgctggagcagctggacatgagaagagatgtgcaggagatcttcaggatgacccctcatgagaagcaggtgatgatgttcagcgccaccctgtag

SEQ ID NO: 231699 - DNA, 399 bp, Artificial Sequence
  derived and/or modified sequence
atggctgaaaatgatgtggacaatgagctgctggactatgaagatgatgaggtggagacagctgctggaggagatggagctgaggccccagccaagaaggatgtgaagggcagctatgtgtccatccacagcagcggcttccgggacttcctgctgaagccagagctgctgcgggccatcgtggactgtggctttgagcaccccagcgaggtgcagcacgagtgcatcccccaggccatcctgggcatggatgtgctgtgccaggccaagagcggcatgggcaagacagctgtgtttgtgctggccaccctgcagcagctggagcctgtgacaggccaggtgtgcttctgtgacagccacttccccaggggggacaatgaggagctgcacctgccctag

SEQ ID NO: 231700 - DNA, 1053 bp, Artificial Sequence
  derived and/or modified sequence
atgtggaccatgagctcctggaccatgaagatgatgcgctggaggcagcagctgggggagatgggcctgcggcccctgcccaggaggatgagccgggcccccatgagccccagcacagccctggcctttgtgaccagctgcagcagccagagctgcagcggccccctgagcacagtggccctgagcatccggcagaaggtggccgtgttctttggaggcctgagcatcaagaaggatgaggaggtgctgaagaagaactgcccccacatcgtggtgggcaccccaggccgcatcctggccctggccaggaacaagagcctgaacctgaagcacatcaagcacttcatcctggatgaatgtgacaagatgctggagcagctggacatgagaagagatgtgcaggagatcttcaggatgacccctcatgagaagcaggtgatgatgttcagcgccaccctgagcaaggagatccggcctgtgtgcaggaagttcatgcaggaccccatggagatctttgtggatgatgagaccaagctgaccctgcacggcctgcagcagtactacgtgaagctgaaggacaatgagaagaacaggaagctgtttgacctgctggatgtgctggagttcaaccaggtggtgatctttgtgaagtctgtgcagcgctgcatcgccctggcccagctgctggtggagcagaacttccctgccatcgccatccaccggggcatgccccaggaggagcggctgagccgctaccagcagttcaaggacttccagaggcgcatcctggtggccaccaacctgtttggccggggcatggacatcgagcgggtgaacatcgccttcaactatgacatgcctgaggacagcgacacctacctgcaccgggtggcccgggccggccgcttcggcaccaagggcctggccatcacctttgtgtctgatgaaaatgatgccaagatcctgaatgatgtgcaggacagatttgaggtgaacatcagcgagctgcctgatgaaattgacatcagcagctacatcgagcagaccaggtag

SEQ ID NO: 231701 - DNA, 738 bp, Artificial Sequence
  derived and/or modified sequence
atgtggaccatgagctcctggaccatgaagatgatgcgctggaggcagcagctgggggagatgggcctgcggcccctgcccaggaggatgagccgggcccccatgagccccagcacagccctggcctttgtgaccagctgcagcagccagagctgcagcggccccctgagcacagtggccctgagcatccggcagaaggtggccgtgttctttggaggcctgagcatcaagaaggatgaggaggtgctgaagaagaactgcccccacatcgtggtgggcaccccaggccgcatcctggccctggccaggaacaagagcctgaacctgaagcacatcaagcacttcatcctggatgaatgtgacaagatgctggagcagctggacatgagaagagatgtgcaggagatcttcaggatgacccctcatgagaagcaggtgatgatgttcagcgccaccctgagcaaggagatccggcctgtgtgcaggaagttcatgcaggaccccatggagatctttgtggatgatgagaccaagctgaccctgcacggcctgcagcagtactacgtgaagctgaaggacaatgagaagaacaggaagctgtttgacctgctggatgtgctggagttcaaccaggtggtgatctttgtgaagtctgtgcagcgctgcatcgccctggcccagctgctggtggagcagaacttccctgccatcgccatccaccggggcatgccccagtag

SEQ ID NO: 231702 - DNA, 411 bp, Artificial Sequence
  derived and/or modified sequence
atgggcggcggcagaagaccctatgatgtgttcttcagcaaggtgatggccgagaatgatgtggacaatgagctgctggactatgaagatgatgaggtggagacagctgctggaggagatggagctgaggccccagccaagaaggatgtgaagggcagctatgtgtccatccacagcagcggcttccgggacttcctgctgaagccagagctgctgcgggccatcgtggactgtggctttgagcaccccagcgaggtgcagcacgagtgcatcccccaggccatcctgggcatggatgtgctgtgccaggccaagagcggcatgggcaagacagctgtgtttgtgctggccaccctgcagcagctggagcctgtgacaggccaggtgtctgtgctggtgatgtgccactag

SEQ ID NO: 231703 - DNA, 594 bp, Artificial Sequence
  derived and/or modified sequence
atggctgaaaatgatgtggacaatgagctgctggactatgaagatgatgaggtggagacagctgctggaggagatggagctgaggccccagccaagaaggatgtgaagggcagctatgtgtccatccacagcagcggcttccgggacttcctgctgaagccagagctgctgcgggccatcgtggactgtggctttgagcaccccagcgaggtgcagcacgagtgcatcccccaggccatcctgggcatggatgtgctgtgccaggccaagagcggcatgggcaagacagctgtgtttgtgctggccaccctgcagcagctggagcctgtgacaggccaggtgtgcttctgtgacagccacttccccaggggggacaatgaggagctgcacctgccctacgtgtctgtgtacttcctgcccaaggtgtctgtgctggtgatgtgccacacccgggagctggccttccagatcagcaaggagtatgagcgcttcagcaagtacatgcccaacgtgaaggtggccgtgttctttggaggcctgagcatcaagaaggatgaggaggtgctgaagaagaactgcccccacatcgtgtag

SEQ ID NO: 231704 - DNA, 570 bp, Artificial Sequence
  derived and/or modified sequence
tgagccaccctgcagcagctggagcctgtgacaggccaggtgtctgtgctggtgatgtgccacacccgggagctggccttccagatcagcaaggagtatgagcgcttcagcaagtacatgcccaacgtgaaggtggccgtgttctttggaggcctgagcatcaagaaggatgaggaggtgctgaagaagaactgcccccacatcgtggtgggcaccccaggccgcatcctggccctggccaggaacaagagcctgaacctgaagcacatcaagcacttcatcctggatgaatgtgacaagatgctggagcagctggacatgagaagagatgtgcaggagatcttcaggatgacccctcatgagaagcaggtgatgatgttcagcgccaccctgagcaaggagatccggcctgtgtgcaggaagttcatgcaggaccccatggagatctttgtggatgatgagaccaagctgaccctgcacggcctgcagcagtactacgtgaagctgaaggacaatgagaagaacaggaagctgtttgacctgctggatgtgctggagttcaaccagtag

SEQ ID NO: 231705 - DNA, 711 bp, Artificial Sequence
  derived and/or modified sequence
atggctgaaaatgatgtggacaatgagctgctggactatgaagatgatgaggtggagacagctgctggaggagatggagctgaggccccagccaagaaggatgtgaagggcagctatgtgtccatccacagcagcggcttccgggacttcctgctgaagccagagctgctgcgggccatcgtggactgtggctttgagcaccccagcgaggtgcagcacgagtgcatcccccaggccatcctgggcatggatgtgctgtgccaggccaagagcggcatgggcaagacagctgtgtttgtgctggccaccctgcagcagctggagcctgtgacaggccaggtgtctgtgctggtgatgtgccacacccgggagctggccttccagatcagcaaggagtatgagcgcttcagcaagtacatgcccaacgtgaaggtggccgtgttctttggaggcctgagcatcaagaaggatgaggaggtgctgaagaagaactgcccccacatcgtggtgggcaccccaggccgcatcctggccctggccaggaacaagagcctgaacctgaagcacatcaagcacttcatcctggatgaatgtgacaagatgctggagcagctggacatgagaagagatgtgcaggagatcttcaggatgacccctcatgagaagcaggtgatgatgttcagcgccaccctgagcaaggagatcagatag

SEQ ID NO: 231706 - DNA, 564 bp, Artificial Sequence
  derived and/or modified sequence
atgggcagcagccacatcggcggcctgagcatcaatgaaagaagaagaagtgccagcctgggcctggtgatggccgagaatgatgtggacaatgagctgctggactatgaagatgatgaggtggagacagctgctggaggagatggagctgaggccccagccaagaaggatgtgaagggcagctatgtgtccatccacagcagcggcttccgggacttcctgctgaagccagagctgctgcgggccatcgtggactgtggctttgagcaccccagcgaggtgcagcacgagtgcatcccccaggccatcctgggcatggatgtgctgtgccaggccaagagcggcatgggcaagacagctgtgtttgtgctggccaccctgcagcagctggagcctgtgacaggccaggtgtctgtgctggtgatgtgccacacccgggagctggccttccagatcagcaaggagtatgagcgcttcagcaagtacatgcccaacgtgaaggtggccgtgttcttcggcggcctgagcatcaagaaggatgaggaggtgctgaagaagaactag

SEQ ID NO: 231707 - DNA, 1332 bp, Artificial Sequence
  derived and/or modified sequence
atggctgaaaatgatgtggacaatgagctgctggactatgaagatgatgaggtggagacagctgctggaggagatggagctgaggccccagccaagaaggatgtgaagggcagctatgtgtccatccacagcagcggcttccgggacttcctgctgaagccagagctgctgcgggccatcgtggactgtggctttgagcaccccagcgaggtgcagcacgagtgcatcccccaggccatcctgggcatggatgtgctgtgccaggccaagagcggcatgggcaagacagctgtgtttgtgctggccaccctgcagcagctggagcctgtgacaggccaggtgtacctgggccgggtgctgggccggggcttctggtgtgtgtttgtgtctgtgctggtgatgtgccacacccgggagctggccttccagatcagcaaggagtatgagcgcttcagcaagtacatgcccaacgtgaaggtggccgtgttcttcggcggcctgagcatcaagaaggatgaggaggtgctgaagaagaactgcccccacatcgtggtgggcaccccaggccgcatcctggccctggccaggaacaagagcctgaacctgaagcacatcaagcacttcatcctggatgaatgtgacaagatgctggagcagctggacatgagaagagatgtgcaggagatcttcaggatgacccctcatgagaagcaggtgatgatgttttctgccaccctgagcaaggagatccggcctgtgtgcaggaagttcatgcaggaccccatggagatctttgtggatgatgagaccaagctgaccctgcacggcctgcagcagtactacgtgaagctgaaggacaatgagaagaacaggaagctgtttgacctgctggatgtgctggagttcaaccaggtggtgatctttgtgaagtctgtgcagcgctgcatcgccctggcccagctgctggtggagcagaacttccctgccatcgccatccaccggggcatgccccaggaggagcggctgagccgctaccagcagttcaaggacttccagaggcgcatcctggtggccaccaacctgtttggccggggcatggacatcgagcgggtgaacatcgccttcaactatgacatgccagaagattctgacacctacctgcaccgggtggcccgggccggccgcttcggcaccaagggcctggccatcacctttgtgtctgatgaaaatgatgccaagatcctgaatgatgtgcaggacagatttgaggtgaacatcagcgagctgcctgatgaaattgacatcagcagctacatcgagcagaccaggtag

SEQ ID NO: 231708 - DNA, 987 bp, Artificial Sequence
  derived and/or modified sequence
tgagccaccctgcagcagctggagcctgtgacaggccaggtgtctgtgctggtgatgtgccacacccgggagctggccttccagatcagcaaggagtatgagcgcttcagcaagtacatgcccaacgtgaaggtggccgtgttctttggaggcctgagcatcaagaaggatgaggaggtgctgaagaagaactgcccccacatcgtggtgggcaccccaggccgcatcctggccctggccaggaacaagagcctgaacctgaagcacatcaagcacttcatcctggatgaatgtgacaagatgctggagcagctggacatgagaagagatgtgcaggagatcttcaggatgacccctcatgagaagcaggtgatgatgttcagcgccaccctgagcaaggagatccggcctgtgtgcaggaagttcatgcaggaccccatggagatctttgtggatgatgagaccaagctgaccctgcacggcctgcagcagtactacgtgaagctgaaggacaatgagaagaacaggaagctgtttgacctgctggatgtgctggagttcaaccaggtggtgatctttgtgaagtctgtgcagcgctgcatcgccctggcccagctgctggtggagcagaacttccctgccatcgccatccaccggggcatgccccaggaggagcggctgagccgctaccagcagttcaaggacttccagaggcgcatcctggtggccaccaacctgtttggccggggcatggacatcgagcgggtgaacatcgccttcaactatgacatgcctgaggacagcgacacctacctgcaccgggtggcccgggccggccgcttcggcaccaagggcctggccatcacctttgtgtctgatgaaaatgatgccaagatcctgaatgatgtgcaggacagatttgaggtgaacatcagcgagctgcctgatgaaattgacatcagcagctacatcgagcagaccaggtag

SEQ ID NO: 231709 - DNA, 396 bp, Artificial Sequence
  derived and/or modified sequence
tgagccaccctgcagcagctggagcctgtgacaggccaggtgtctgtgctggtgatgtgccacacccgggagctggccttccagatcagcaaggagtatgagcgcttcagcaagtacatgcccaacgtgaaggtggccgtgttctttggaggcctgagcatcaagaaggatgaggaggtgctgaagaagaactgcccccacatcgtggtgggcaccccaggccgcatcctggccctggccaggaacaagagcctgaacctgaagcacatcaagcacttcatcctggatgaatgtgacaagatgctggagcagctggacatgagaagagatgtgcaggagatcttcaggatgacccctcatgagaagcaggtgatgatgttcagcgccaccctgtag

SEQ ID NO: 231710 - DNA, 411 bp, Artificial Sequence
  derived and/or modified sequence
tgagccaccctgcagcagctggagcctgtgacaggccaggtgtctgtgctggtgatgtgccacacccgggagctggccttccagatcagcaaggagtatgagcgcttcagcaagtacatgcccaacgtgaaggtggccgtgttctttggaggcctgagcatcaagaaggatgaggaggtgctgaagaagaactgcccccacatcgtggtgggcaccccaggccgcatcctggccctggccaggaacaagagcctgaacctgaagcacatcaagcacttcatcctggatgaatgtgacaagatgctggagcagctggacatgagaagagatgtgcaggagatcttcaggatgacccctcatgagaagcaggtgatgatgttcagcgccaccctgagcaaggagatcagatag

SEQ ID NO: 231711 - DNA, 717 bp, Artificial Sequence
  derived and/or modified sequence
atggctgaaaatgatgtggacaatgagctgctggactatgaagatgatgaggtggagacagctgctggaggagatggagctgaggccccagccaagaaggatgtgaagggcagctatgtgtccatccacagcagcggcttccgggacttcctgctgaagccagagctgctgcgggccatcgtggactgtggctttgagcaccccagcgaggtgcagcacgagtgcatcccccaggccatcctgggcatggatgtgctgtgccaggccaagagcggcatgggcaagacagctgtgtttgtgctggccaccctgcagcagctggagcctgtgacaggccaggtgtctgtgctggtgatgtgccacacccgggagctggccttccagatcagcaaggagtatgagcgcttcagcaagtacatgcccaacgtgaaggtggccgtgttctttggaggcctgagcatcaagaaggatgaggaggtgctgaagaagaactgcccccacatcgtggtgggcaccccaggccgcatcctggccctggccaggaacaagagcctgaacctgaagcacatcaagcacttcatcctggatgaatgtgacaagatgctggagcagctggacatgagaagagatgtgcaggagatcttcaggatgacccctcatgagaagcaggtgatgatgttcagcgccaccctgagcaaggagatccggcctgtgtag

SEQ ID NO: 231712 - DNA, 540 bp, Artificial Sequence
  derived and/or modified sequence
gtggccgtgttctttggaggcctgagcatcaagaaggatgaggaggtgctgaagaagaactgcccccacatcgtggtgggcaccccaggccgcatcctggccctggccaggaacaagagcctgaacctgaagcacatcaagcacttcatcctggatgaatgtgacaagatgctggagcagctggacatgagaagagatgtgcaggagatcttcaggatgacccctcatgagaagcaggtgatgatgttcagcgccaccctgagcaaggagatccggcctgtgtgcaggaagttcatgcaggaccccatggagatctttgtggatgatgagaccaagctgaccctgcacggcctgcagcagtactacgtgaagctgaaggacaatgagaagaacaggaagctgtttgacctgctggatgtgctggagttcaaccaggtggtgatctttgtgaagtctgtgcagcgctgcatcgccctggcccagctgctggtggagcagaacttccctgccatcgccatccaccggggcatgccccagtag

SEQ ID NO: 231713 - DNA, 195 bp, Artificial Sequence
  derived and/or modified sequence
tgagccaccctgcagcagctggagcctgtgacaggccaggtgtctgtgctggtgatgtgccacacccgggagctggccttccagatcagcaaggagtatgagcgcttcagcaagtacatgcccaacgtgaaggtggccgtgttctttggaggcctgagcatcaagaaggatgaggaggtgctgaagaagaactag

SEQ ID NO: 231714 - DNA, 78 bp, Artificial Sequence
  derived and/or modified sequence
tgagccaccctgcagcagctggagcctgtgacaggccaggtgtctgtgctggtgatgtgccacacccgggagctgtag

SEQ ID NO: 231715 - DNA, 66 bp, Artificial Sequence
  derived and/or modified sequence
tgagccaccctgcagcagctggagcctgtgacaggccaggtgtctgtgctggtgatgtgccactag

SEQ ID NO: 231716 - DNA, 978 bp, Artificial Sequence
  derived and/or modified sequence
tgagccaccctgcagcagctggagcctgtgacaggccaggtgtctgtgctggtgatgtgccacacccgggagctggccttccagatcagcaaggagtatgagcgcttcagcaagtacatgcccaacgtgaaggtggccgtgttctttggaggcctgagcatcaagaaggatgaggaggtgctgaagaagaactgcccccacatcgtggtgggcaccccaggccgcatcctggccctggccaggaacaagagcctgaacctgaagcacatcaagcacttcatcctggatgaatgtgacaagatgctggagcagctggacatgagaagagatgtgcaggagatcttcaggatgacccctcatgagaagcaggtgatgatgttcagcgccaccctgagcaaggagatccggcctgtgtgcaggaagttcatgcaggaccccatggagatctttgtggatgatgagaccaagctgaccctgcacggcctgcagcagtactacgtgaagctgaaggacaatgagaagaacaggaagctgtttgacctgctggatgtgctggagttcaaccaggtggtgatctttgtgaagtctgtgcagcgctgcatcgccctggcccagctgctggtggagcagaacttccctgccatcgccatccaccggggcatgccccaggaggagcggctgagccgctaccagcagttcaaggacttccagaggcgcatcctggtggccaccaacctgtttggccggggcatggacatcgagcgggtgaacatcgccttcaactatgacatgcctgaggacagcgacacctacctgcaccgctgctaccccctgagccccagccgctggccagagcaggccggcctggccccccgggcctggctgagccacctgtgccccatgaggatgatgcccaggagctccatgatgtgcagaattgccctgcggagcatcctggtgtcctgcctgatgaggtag

SEQ ID NO: 231717 - DNA, 420 bp, Artificial Sequence
  derived and/or modified sequence
atggctgaaaatgatgtggacaatgagctgctggactatgaagatgatgaggtggagacagctgctggaggagatggagctgaggccccagccaagaaggatgtgaagggcagctatgtgtccatccacagcagcggcttccgggacttcctgctgaagccagagctgctgcgggccatcgtggactgtggctttgagcaccccagcgaggtgcagcacgagtgcatcccccaggccatcctgggcatggatgtgctgtgccaggccaagagcggcatgggcaagacagctgtgtttgtgctggccaccctgcagcagctggagcctgtgacaggccagagccatgagcacatgacctctgtgaccctggacaacctgacagctgtgggagatgtgctgagccaggcctggggcagctag

SEQ ID NO: 231718 - DNA, 99 bp, Artificial Sequence
  derived and/or modified sequence
tgagccaccctgcagcagctggagcctgtgacaggccaggtgtgcttctgtgacagccacttccccaggggggacaatgaggagctgcacctgccctag

SEQ ID NO: 231719 - DNA, 732 bp, Artificial Sequence
  derived and/or modified sequence
atgtggaccatgagctcctggaccatgaagatgatgcgctggaggcagcagctgggggagatgggcctgcggcccctgcccaggaggatgagccgggcccccatgagccccagcacagccctggcctttgtgaccagctgcagcagccagagctgcagcggccccctgagcacagtggccctgagcatccggcagaaggtgtctgtgctggtgatgtgccacacccgggagctggccttccagatcagcaaggagtatgagcgcttcagcaagtacatgcccaacgtgaaggtggccgtgttcttcggcggcctgagcatcaagaaggatgaggaggtgctgaagaagaactgcccccacatcgtggtgggcaccccaggccgcatcctggccctggccaggaacaagagcctgaacctgaagcacatcaagcacttcatcctggatgaatgtgacaagatgctggagcagctggacatgagaagagatgtgcaggagatcttcaggatgacccctcatgagaagcaggtgatgatgttttctgccaccctgagcaaggagatccggcctgtgtgcaggaagttcatgcaggatgtgaacaccctgctgcccagcctgccccccctgcctgcccgctgcctgctgcccttcctggccctcttcctgcggctgccctgccacagcagcgccaagaaggccgcctgtgcccagctgggcgtgatgaccccctag

SEQ ID NO: 231720 - DNA, 417 bp, Artificial Sequence
  derived and/or modified sequence
tgagccaccctgcagcagctggagcctgtgacaggccaggtgtctgtgctggtgatgtgccacacccgggagctggccttccagatcagcaaggagtatgagcgcttcagcaagtacatgcccaacgtgaaggtggccgtgttctttggaggcctgagcatcaagaaggatgaggaggtgctgaagaagaactgcccccacatcgtggtgggcaccccaggccgcatcctggccctggccaggaacaagagcctgaacctgaagcacatcaagcacttcatcctggatgaatgtgacaagatgctggagcagctggacatgagaagagatgtgcaggagatcttcaggatgacccctcatgagaagcaggtgatgatgttcagcgccaccctgagcaaggagatccggcctgtgtag

SEQ ID NO: 231721 - DNA, 294 bp, Artificial Sequence
  derived and/or modified sequence
tgagccaccctgcagcagctggagcctgtgacaggccaggtgtgcttctgtgacagccacttccccaggggggacaatgaggagctgcacctgccctacgtgtctgtgtacttcctgcccaaggtgtctgtgctggtgatgtgccacacccgggagctggccttccagatcagcaaggagtatgagcgcttcagcaagtacatgcccaacgtgaaggtggccgtgttctttggaggcctgagcatcaagaaggatgaggaggtgctgaagaagaactgcccccacatcgtgtag

SEQ ID NO: 231722 - DNA, 972 bp, Artificial Sequence
  derived and/or modified sequence
atggctgaaaatgatgtggacaatgagctgctggactatgaagatgatgaggtggagacagctgctggaggagatggagctgaggccccagccaagaaggatgtgaagggcagctatgtgtccatccacagcagcggcttccgggacttcctgctgaagccagagctgctgcgggccatcgtggactgtggctttgagcaccccagcgaggtgcagcacgagtgcatcccccaggccatcctgggcatggatgtgctgtgccaggccaagagcggcatgggcaagacagctgtgtttgtgctggccaccctgcagcagctggagcctgtgacaggccaggtgtctgtgctggtgatgtgccacacccgggagctggccttccagatcagcaaggagtatgagcgcttcagcaagtacatgcccaacgtgaaggtggccgtgttctttggaggcctgagcatcaagaaggatgaggaggtgctgaagaagaactgcccccacatcgtggtgggcaccccaggccgcatcctggccctggccaggaacaagagcctgaacctgaagcacatcaagcacttcatcctggatgaatgtgacaagatgctggagcagctggacatgagaagagatgtgcaggagatcttcaggatgacccctcatgagaagcaggtgatgatgttcagcgccaccctgagcaaggagatccggcctgtgtgcaggaagttcatgcaggaccccatggagatctttgtggatgatgagaccaagctgaccctgcacggcctgcagcagtactacgtgaagctgaaggacaatgagaagaacaggaagctgtttgacctgctggatgtgctggagttcaaccaggagatcacctgcaagtctgtgcagcgcttcagcaccaccaacagctgtggctaccagcccatctggcccaggcatggccaccgggccggggagcactgcttctag

SEQ ID NO: 231723 - DNA, 552 bp, Artificial Sequence
  derived and/or modified sequence
atggagatctttgtggatgatgagaccaagctgaccctgcacggcctgcagcagtactacgtgaagctgaaggacaatgagaagaacaggaagctgtttgacctgctggatgtgctggagttcaaccaggtggtgatctttgtgaagtctgtgcagcgctgcatcgccctggcccagctgctggtggagcagaacttccctgccatcgccatccaccggggcatgccccaggaggagcgctggctgagccgctaccagcagttcaaggacttccagaggcgcatcctggtggccaccaacctgtttggccggggcatggacatcgagcgggtgaacatcgccttcaactatgacatgccagaagattctgacacctacctgcaccgggtggcccgggccggccgcttcggcaccaagggcctggccatcacctttgtgtctgatgaaaatgatgccaagatcctgaatgatgtgcaggacagatttgaggtgaacatcagcgagctgcctgatgaaattgacatcagcagctacatcgagcagaccaggtag

SEQ ID NO: 231724 - DNA, 1278 bp, Artificial Sequence
  derived and/or modified sequence
atggccgagaacgacgtggacaacgagctgctggactacgaggacgacgaggtcgaaacagccgccgggggggacggtgctgaagcacccgctaagaaggatgtcaagggatcatacgtgagcattcactcttcaggcttccgggacttcctgctaaagccggagctcctgcgagccattgttgattgcggctttgagcatccctcggaggtgcagcatgaatgcattcctcaagctatactcggtatggatgtcctctgtcaggcgaaaagtggcatgggcaagaccgcagtgtttgtcctggctactcttcagcagctggagcccgtgacaggtcaggtgtcggtcctggtgatgtgccatacccgcgaactggcattccagatctctaaggaatatgagagattcagcaagtacatgcccaatgtgaaagtggcagtgttcttcggcgggctgagcattaaaaaagatgaagaagttctcaaaaagaactgtcctcacatcgtcgtcgggaccccagggaggattttggcgcttgccaggaataagtctctgaacctaaagcatattaagcacttcatcttggatgaatgcgacaaaatgttagagcagctagatatgagaagggatgtgcaggagatttttaggatgacaccgcacgagaagcaggtgatgatgttttctgccaccctaagcaaggagatccgtcctgtgtgccgcaagtttatgcaggacccaatggaaatattcgtggatgacgaaactaaactgacactccacggcctacagcagtattacgttaagctgaaggacaacgaaaagaaccgcaaattgttcgatctgctggatgtgcttgagtttaaccaagtggttatttttgttaagtcagtgcagcgttgtattgctctcgctcaactccttgtggagcagaactttcccgccatcgctattcataggggcatgccacaggaggagcgcctttctagataccagcagtttaaagattttcagcggcggatcctggtagctacgaacctctttggtcgcggcatggacatagagcgcgtgaacatcgccttcaactatgacatgcccgaggattcagatacctatctgcatcggtgctaccctttgtcccctagtaggtggcccgagcaagcaggtcttgctccccgcgcatggctctcccatctctgtccgatgcgcatgatgccgaggtccagtatgatgtgccggatcgctcttcggtccatcctcgtgtcttgtctcatgcggtag

SEQ ID NO: 231725 - DNA, 1287 bp, Artificial Sequence
  derived and/or modified sequence
atggccgagaacgacgtggacaacgagctgctggactacgaggacgacgaggttgaaacggcagctggcggggatggcgccgaggctcccgcaaaaaaagatgttaagggctcttacgtcagcatacactcttccggattccgtgactttctgctgaagccagagctccttcgagcaattgtggattgtgggttcgagcacccgagcgaagtgcagcatgaatgcattccccaagctatcctcggaatggacgtcctgtgtcaggcaaaaagcgggatgggaaagacggcagtgtttgtgctggcgacgctgcaacagctggagcccgtgacaggccaggtatctgtccttgtgatgtgccatacacgagagcttgccttccagattagcaaagaatatgagagattctccaagtacatgccgaacgtgaaagtggcagttttctttggcggcctctctataaagaaggacgaggaagtgctgaagaagaattgtccccacattgtcgtcggaactcctggtcggattctggctctggctcggaataagtccctgaatctgaagcatattaagcacttcatactagacgaatgtgacaaaatgctcgagcaacttgatatgcgcagagacgtccaggaaatattcagaatgacaccacacgagaagcaggttatgatgtttagcgcaaccctgtctaaggagataaggcctgtctgcagaaaatttatgcaggatcctatggaaatatttgtggacgatgagactaaattgactctccatggcctccagcaatactacgttaaacttaaggacaatgagaaaaaccgcaagctgtttgaccttctggatgtcctggagttcaatcaggtcgttatcttcgtgaaatctgtgcagaggtgcattgctctggctcagctcctcgtggagcagaatttccccgccatagctatccataggggcatgccacaggaagagaggctatctagatatcagcagttcaaggactttcagaggaggatattagtagcaaccaaccttttcggacggggcatggatatcgagcgcgttaatattgccttcaattatgacatgcccgaggatagtgatacttatctgcatcgtgttgcaagggctggacgctttggtacaaagggtctcgccattaccttcgtgagcgacgagaacgatgccaaaatactgaatgacgtacaggacagatttgaggtcaacatctctgaactgccagacgagattgacatctccagctatattgagcagactagatag

SEQ ID NO: 231726 - DNA, 1287 bp, Artificial Sequence
  derived and/or modified sequence
atggccgagaacgacgtggacaacgagctgctggactacgaggacgatgaggtggagactgccgctggcggcgatggcgccgaagcccccgcaaagaaagatgtcaagggctcttacgtgagtatccacagcagcggcttcagggactttctgttaaagccggagttattaagagccatcgtggactgcggcttcgaacacccatccgaggtccagcacgaatgcatcccacaggctatactggggatggatgtgctgtgtcaggctaaatcgggcatgggtaagacagctgtcttcgtgctcgccactctccagcaattggagcctgtaacggggcaggtaagtgtcctggtgatgtgtcacaccagggagttagccttccaaataagtaaagagtacgagagattttccaagtacatgcccaacgttaaagtagcagtttttttcgggggcctcagcataaaaaaagacgaagaggtccttaagaagaattgtccgcacatcgtagtgggaacacctggtaggatcctggctctcgcgaggaacaagagtttaaacctgaaacacatcaaacactttatcctggatgaatgtgataagatgctggagcagcttgatatgagacgcgacgtgcaggaaatttttagaatgactccgcacgagaaacaggtgatgatgttttctgcgacactcagtaaggagatccggccagtctgccggaagttcatgcaggatccaatggagatttttgtcgatgacgaaacgaagcttacactgcacggtctgcagcagtactacgtcaagctcaaggataatgagaagaaccggaagctcttcgacttactagacgtgctcgaatttaaccaggtcgtgatctttgtaaaatccgtgcaacgctgtatcgcactggcgcagctgctggtcgaacagaatttccctgctattgcaatacataggggtatgccacaggaagagagattaagtaggtaccagcagtttaaggactttcagcgaaggattctggtggcaactaatctgtttgggcgaggcatggatatagaacgagtgaacatcgcgtttaactacgatatgcccgaggacagcgacacttacctgcacagggtggcacgcgccggtcggttcgggactaaagggctggccatcaccttcgtgtctgatgaaaatgacgccaagatcctcaacgatgttcaagatcggtttgaagttaacatatcagaattgccagacgaaatcgatatctcctcttatattgaacagaccagatag

SEQ ID NO: 231727 - DNA, 1278 bp, Artificial Sequence
  derived and/or modified sequence
atggccgagaacgacgtggacaacgagctgctggactacgaggacgatgaagttgagactgcagctggtggcgatggtgccgaggcccccgccaaaaaagacgtgaagggatcttatgtgtccatacattcctcagggttccgcgactttctcctcaaaccagaattgctgagagcaatcgtagactgtggctttgagcaccctagtgaagtccagcacgagtgcatcccccaggctatcttgggaatggatgtactctgtcaggctaagtctgggatgggtaaaacggcggtctttgtgcttgctaccctgcagcagcttgaaccagttacaggtcaggtgtctgtgctggtaatgtgccacacccgagaactcgcgttccagatctccaaggagtacgaacgcttcagtaaatatatgccaaacgtgaaggttgctgtgttttttggcggtctctcaatcaagaaagacgaggaagttttaaaaaaaaattgtcctcacattgtcgtgggcacacctggcaggatcctagctctcgccaggaacaagagcttaaaccttaaacatatcaagcatttcattcttgacgaatgtgataagatgttggagcagctggacatgcggcgcgatgtgcaggagattttccgcatgaccccccatgagaagcaagtaatgatgttcagcgctacactcagcaaagaaatccgccccgtttgcagaaagtttatgcaggatccgatggagatatttgtggacgatgagacaaagctgaccctacacggactgcagcagtactacgtgaagctgaaggataatgagaagaacaggaagctattcgacctactggatgtgctcgaattcaatcaagttgtgatctttgtgaaaagcgtgcagcgctgcatcgccttagcacaactgctggtggaacagaatttccccgcaattgccatccaccgtggaatgccgcaggaagagcgcctgagcaggtatcagcagttcaaggacttccaaagacggatcctggtggccacgaatctctttggacgaggcatggatatcgagagggttaacatcgcttttaattacgacatgcctgaggacagcgacacctacctccacaggtgctacccactcagcccctcccggtggcctgagcaggccgggcttgctcctcgcgcctggttgtcacatctctgccctatgcgcatgatgccaagatccagtatgatgtgtagaatcgcacttcggagcatcctggtgtcatgcttaatgcgctag

SEQ ID NO: 231728 - DNA, 1287 bp, Artificial Sequence
  derived and/or modified sequence
atggccgagaacgacgtggacaacgagctgctggactacgaggacgacgaggtagagactgctgccggtggggatggtgccgaagcccccgctaagaaggatgtcaaagggtcatatgtgagcattcactctagtggcttcagagacttcctgctaaagcccgaactgctaagagccatcgtagattgtggattcgaacaccctagcgaggttcaacatgagtgtatcccacaggccatcctaggcatggatgtgctttgccaagcgaaaagcggcatgggaaagaccgcggtcttcgtgttagccacgctgcaacagctcgagccagtgaccggacaggtgagtgtcctcgtgatgtgccacacaagggagttggctttccaaattagtaaggagtacgagcggttcagcaaatatatgcccaacgtgaaagtcgcggtgttcttcggcgggctaagcatcaaaaaagacgaagaggtcctcaagaaaaattgtccgcacatcgtggttgggaccccgggtagaattctagcattagcacgaaataagagtctgaacttaaaacatataaaacatttcatcctagacgaatgcgataagatgctggaacagttggatatgcgacgagatgtacaagaaattttccggatgacaccccatgagaagcaggtgatgatgttctccgccacattgtccaaggagattagaccagtgtgtcggaagttcatgcaggaccccatggagattttcgttgacgacgagactaaactcacgctccacgggcttcagcagtattatgtcaagctcaaggacaatgagaagaatcggaaacttttcgacctgcttgacgtgttggagttcaaccaggtggtgatcttcgtgaagagcgttcaacggtgcattgcactggcccaactgctggtagagcagaactttccagcgattgctatccatcggggcatgccccaggaagagaggctctcgcgttaccagcagttcaaagatttccaacggaggattttggtcgcaacaaatctctttggccgggggatggacattgaacgggtgaatattgcattcaactacgacatgccagaggacagcgacacctatttacatagagtggcacgggccggaaggttcggaaccaagggactggctattacttttgtgtccgacgaaaatgatgccaagatcctcaacgacgtccaggatcgcttcgaggtcaacatcagtgaattaccagatgaaatagatatctcatcatacatcgaacaaactcggtag

SEQ ID NO: 231729 - DNA, 1287 bp, Artificial Sequence
  derived and/or modified sequence
atggccgagaacgacgtggacaacgagctgctggactacgaggacgacgaggtcgagactgcagcgggtggcgatggagcggaagccccggccaagaaagatgtcaagggcagctacgtcagcattcactcatccgggttccgcgactttctgctgaagccggagttgctgcgtgctatcgttgactgcgggtttgagcaccctagtgaagtgcagcatgagtgtattccacaggctattctcggaatggacgtgctctgtcaggccaaatccgggatgggcaagaccgcggtcttcgtactcgctacattacagcaactggagccggttaccggtcaagtttctgtattggttatgtgccacaccagagaactggctttccaaatatctaaggaatacgagcggttctccaaatacatgccaaacgtgaaggtagccgtgttctttggcgggctgagcatcaaaaaggacgaggaggttctgaagaagaactgcccccatattgtcgtgggcacaccaggcagaatactggcgctggcacgtaataagtcactcaatctgaaacatatcaaacatttcattctggacgaatgcgacaaaatgctggaacagctggatatgcgacgagatgtgcaggaaatattccgaatgacacctcacgagaagcaggtgatgatgttctccgctacactctccaaagaaattcggccggtctgtcgcaagttcatgcaggatcccatggaaatctttgtggatgacgagacaaaacttactcttcatggtttgcagcagtactacgtaaaacttaaggacaacgagaagaaccgaaaactgtttgaccttctggatgtgctcgaattcaaccaggtggtcatatttgtgaaatccgtgcagaggtgtattgctctggcacagctattagtcgaacagaattttcctgctatagctattcatagggggatgccccaggaggagcgcctctcaaggtaccagcagttcaaagactttcaacgacgcatcctcgtagctacaaatttgtttggtcgaggcatggatattgagcgtgtgaacatcgcattcaactatgatatgcccgaggattctgacacatatctgcaccgggtggcgagagctggccgctttgggaccaaagggttggctatcacctttgtgtcagatgagaatgacgccaagattcttaatgatgtgcaagacaggttcgaggtaaacatcagcgagttgcctgacgagattgacatcagcagctatattgagcaaacgcgttag

SEQ ID NO: 231730 - DNA, 564 bp, Artificial Sequence
  derived and/or modified sequence
atgggcagcagccacatcggcggcctgagcatcaacgagcggcggtgtagcgcctctctcggcctggtgatggccgaaaacgacgtggacaatgaattgttagattacgaggacgacgaagttgaaaccgctgctggaggggatggggctgaagcccccgctaagaaggatgtgaaagggagctatgtgtctatccatagctccggatttcgggattttctgcttaaacctgagctccttcgcgccatcgtcgattgtggctttgaacacccttcggaagtgcagcacgaatgcatcccacaggctatacttggaatggatgtgctgtgtcaggctaaatctggaatgggcaaaacagccgtattcgtactcgccaccctgcaacaactggagccagtgacaggtcaggtgagcgtgctggtgatgtgccacactagagagctggcctttcagatttctaaggaatacgagcgattttccaaatatatgcctaacgtcaaggtggccgttttttttggcgggctgtcaataaagaaggacgaagaggtgctgaaaaagaactag

SEQ ID NO: 231731 - DNA, 1287 bp, Artificial Sequence
  derived and/or modified sequence
atggccgagaacgacgtggacaacgagctgctggactacgaggacgatgaagtggaaactgccgccggtggggacggggcggaagcaccggcaaagaaagatgttaagggcagttacgtttcaattcattccagcggttttcgcgattttctattaaagccagagctactgcgcgccattgtcgactgtggtttcgagcatccatcggaagtccagcacgagtgcattccccaggcgatactggggatggacgtgctgtgccaagctaaatctggaatgggcaaaaccgcggtcttcgtgctggcaactctccagcagctggagccggttacgggacaggtgagcgtgctggtcatgtgtcacacccgcgaactcgctttccagataagtaaggagtatgaacgcttcagcaaatacatgccaaatgtcaaagtggctgtgttttttggagggctgtccattaagaaggacgaggaggtccttaaaaaaaattgcccccatattgtggtgggcacaccaggacgcatcctggctttggcccggaataaatctctgaatctgaaacacattaagcatttcattctggatgagtgtgacaagatgcttgaacagctggacatgaggagggacgtgcaagagatcttccgtatgactccccacgaaaagcaggtcatgatgttttctgcgacactgtccaaggagatccgaccagtttgtcgcaagtttatgcaggaccccatggagatatttgtggacgatgagacaaaactgacattacacggactacagcagtattacgtaaagttgaaggataatgaaaagaaccggaaactgtttgacctgctggacgtgcttgagttcaaccaggtggtcattttcgtgaagtctgttcagaggtgtatcgcactggcccagttattggtggaacagaattttcctgcaattgctatccatagaggcatgccccaggaagagcggctgtctcgctatcagcaatttaaggattttcagaggagaattctggtggccaccaacctgttcggacgcggcatggacatagagagggttaatatagctttcaattatgatatgccagaagactctgacacttaccttcatcgcgtggcacgcgctggacgattcggcaccaaggggctggccatcacattcgtgtcagacgagaacgacgccaagatacttaacgacgtacaggataggtttgaagtcaacattagtgagctgcctgatgagatcgacataagctcctacatcgaacagacacgctag

SEQ ID NO: 231732 - DNA, 378 bp, Artificial Sequence
  derived and/or modified sequence
atggccgagaacgacgtggacaacgagctgctggactacgaggacgatgaagttgagaccgccgctggcggggacggagctgaagccccagcaaagaaggatgtcaagggttcatatgtgtctattcattcctcaggtttcagggatttcctcctcaaaccagagctacttcgagctatagtggattgcgggttcgaacaccccagtgaagtgcagcatgaatgtatcccccaggctatcctcggaatggatgtcctatgccaggccaagagtggtatgggaaagacagccgtgtttgtcttggcgactctgcagcaattggagccagttaccggacaggtgagtgtattagtcatgtgtcatacgagagagctctag

SEQ ID NO: 231733 - DNA, 1287 bp, Artificial Sequence
  derived and/or modified sequence
atggccgagaacgacgtggacaacgagctgctggactacgaggacgacgaagtggaaaccgccgcagggggcgacggcgcagaggcacccgccaaaaaagacgtgaaagggagctatgtgagcattcattcctccggtttcagggattttctccttaagcctgagctgctcagggctatagtagactgcggcttcgagcacccttccgaagtgcagcatgagtgtattccccaggctatcctcggtatggacgtgctgtgccaggcaaagagcgggatgggaaaaactgccgttttcgtgctggctactctgcagcaactggaaccagtcactggccaagtgagtgtgctggttatgtgtcacacacgcgagctggcatttcagatcagtaaagagtatgagcgcttttccaaatacatgcccaacgtcaaggtggcagtgtttttcggcgggctttctatcaaaaaggatgaggaggttctgaaaaagaattgcccccacatcgtggtgggtacccccggtaggattctggcactggcacgaaataagtctctgaaccttaagcatatcaaacactttattctcgacgagtgcgacaaaatgctggagcagcttgatatgcggcgggatgtccaagaaatttttaggatgacacctcatgaaaaacaggtgatgatgttcagcgcaaccctgagcaaagagattaggcccgtctgtaggaagtttatgcaggacccgatggagatattcgtggacgatgagactaagctaaccctgcatggacttcagcaatactacgtgaagctgaaggacaatgaaaaaaacagaaagctctttgacctccttgacgttctggaatttaatcaggtggtgatattcgtgaagtcagtgcagcgatgtattgctctggcccagcttctcgtggagcagaattttccagccatcgccatccatagaggcatgccgcaagaggaacgattgagtaggtatcagcagttcaaggactttcaacgccgcatcttggtggcgacgaacctgtttggcagagggatggatattgaacgcgtcaacatcgccttcaattatgacatgcctgaggatagcgacacatatcttcaccgcgtagcacgagccgggcgctttggcacgaaaggcctggctattaccttcgtgtccgacgagaacgatgccaagatccttaacgacgtgcaagatagattcgaagtgaacatatccgaactgcccgacgaaattgacatttcatcttatattgagcagactcgatag

SEQ ID NO: 231734 - DNA, 564 bp, Artificial Sequence
  derived and/or modified sequence
tgaagcgaggagcgggacatcggcaagcccatggagatcttcgtggacgacgagactaaactgacactgcacggccttcagcagtactacgtgaaattgaaggacaatgagaaaaatcggaaattattcgacctcctcgacgtcttagagtttaaccaggtggtcatttttgtgaaatctgtgcagcggtgcatagcgctggcccagttattagtcgaacagaacttccctgccattgctattcatagggggatgcctcaagaggagaggctgagcagataccagcagttcaaagattttcagcggcggatcctcgtagccactaatctgttcggaaggggtatggatatcgaacgcgtcaatatcgcgtttaattacgatatgcctgaggatagtgatacttatctgcatagggtggcaagggctggacgcttcggcactaagggacttgccattacctttgtgtccgacgagaatgatgcgaagatcttgaacgatgtgcaggatcggttcgaagtaaacatctcagaactgcctgacgagattgacatctcctcctactag

SEQ ID NO: 231735 - DNA, 378 bp, Artificial Sequence
  derived and/or modified sequence
atggccgagaacgacgtggacaacgagctgctggactacgaggacgacgaagtcgagaccgctgctgggggggacggcgccgaggctccagccaagaaagatgtgaaaggtagctatgtatctatacatagtagtggcttccgggatttcctcctgaaacccgagctgctaagggccattgtagactgcggtttcgaacatccgtccgaagtccagcacgaatgcataccgcaagccattttgggcatggatgtactttgccaagcgaaatccggtatgggaaaaacagccgtgttcgtcctggctaccctccagcaactggagccagtaacaggccaggtcagcgtccttgttatgtgccatactcgtgagctgtag

SEQ ID NO: 231736 - DNA, 1287 bp, Artificial Sequence
  derived and/or modified sequence
atggccgagaacgacgtggacaacgagctgctggactacgaggacgatgaggtggagaccgctgcaggcggagacggggccgaagccccagcaaagaaagacgttaaaggctcgtacgtctctattcattccagcgggtttagagactttcttctcaaacctgagctcctgagggctatcgtggactgcgggttcgagcacccttccgaggtccagcacgaatgcatccctcaggctatcctaggaatggatgttctgtgccaggccaagtcaggaatgggcaaaaccgctgtatttgtcctagctactctccagcagttggagcccgtcacggggcaggtcagcgtgctggtaatgtgccatacacgcgagcttgccttccagatctcaaaagagtatgaacgcttcagtaagtatatgcccaatgtgaaagtcgcagtatttttcggaggtttaagcatcaagaaagacgaggaagtgctgaagaagaactgccctcatattgtcgtcggcacgcctggaaggatcctggccctggcgagaaataaatccttgaacctgaagcatattaagcattttatccttgacgagtgtgataaaatgctggaacagctcgacatgcggcgagacgtgcaggaaattttcagaatgactccccatgagaagcaggttatgatgttttccgctacactctcaaaggaaatccgccctgtatgtagaaagttcatgcaggatcccatggagatctttgtggacgacgaaacaaagttaacactgcacggcttacagcagtactacgtgaagctgaaggacaatgaaaaaaatcggaagctgttcgaccttctggatgttctggagttcaaccaggtggttatcttcgtgaaaagtgtacagcgctgcatcgctttggcacagctgctggttgaacagaattttcccgcaattgcaatccaccgcggtatgccacaggaggagcgccttagccgatatcaacagttcaaggatttccaacgtcgcattctggtggccaccaatctgtttggcagaggtatggacattgagcgcgtgaacattgcttttaattacgacatgcctgaagacagtgacacctatttacacagggtggctagggcgggccgctttgggacgaaaggcctcgccattaccttcgtgagcgacgaaaacgatgccaagattctgaacgacgtgcaggatcgtttcgaggtaaacattagcgagttacctgatgagatagatatctcgtcttatatcgagcaaacgcggtag

SEQ ID NO: 231737 - DNA, 870 bp, Artificial Sequence
  derived and/or modified sequence
atggccgagaacgacgtggacaacgagctgctggactacgaggacgacgaggtcgagacagcggcagggggcgacggggctgaagctccggctaagaaggatgtaaaggggtcatacgtctccatacattcctccggatttagagattttcttctcaagccagagctcttaagggccattgttgactgcggctttgagcaccccagcgaggtccagcacgaatgtattccccaggcgattctgggtatggacgtgctttgccaggccaagtctgggatgggtaaaacagcagtgttcgtgttggccacactgcaacagctggagcctgtgaccggacaggtttccgtcctcgtaatgtgtcatacgcgcgagctggcctttcaaatttctaaggagtacgagcgcttttccaagtacatgcctaacgtgaaagtggccgttttcttcggagggctctccatcaaaaaagatgaagaggtgctcaaaaagaattgcccccatatcgtggtggggacaccagggcggattctcgcactcgccagaaacaagagcttgaatctgaagcatattaaacactttattctagacgaatgtgataagatgttggagcagcttgatatgagacgcgacgttcaggaaattttccggatgacacctcacgagaagcaagttatgatgtttagcgccactctcagtaaggaaattaggccggtgtgccggaaatttatgcaggaccccatggagatcttcgtggacgacgagaccaagctgactctgcacggacttcagcagtattatgtgaaattaaaggataatgagaaaaatagaaagctgttcgatttacttgacgtgctcgaattcaatcaatag

SEQ ID NO: 231738 - DNA, 1287 bp, Artificial Sequence
  derived and/or modified sequence
atggccgagaacgacgtggacaacgagctgctggactacgaggacgacgaggtggaaacagccgcagggggcgatggagctgaagcccctgccaagaaagatgtgaaaggaagttatgttagtatccattcgtcagggtttcgtgatttcttactaaagcctgagctgctgagggccattgtggattgtgggttcgaacatccctctgaggtgcagcacgaatgtataccacaggcaatcctcggcatggacgtgctctgtcaggccaaatccggcatgggcaagacagccgtcttcgtgctcgctaccctccagcagctggaaccagtgactggacaggtgtctgtgttagttatgtgccacaccagagagctcgcctttcagatttcaaaggaatacgaaaggttcagtaagtacatgcctaacgttaaagtggcagtgtttttcggtggcctgtctatcaagaaggacgaggaagtgctaaaaaaaaactgcccccatatcgtcgtcggcactccaggccggatcctggcactggccagaaataagtctctgaacctcaagcatattaagcacttcattttagacgaatgcgacaaaatgctggaacagctcgacatgcggcgagacgtgcaggaaatctttcgcatgactccccacgagaagcaggtgatgatgttttctgctaccttaagtaaggaaattcgtcccgtatgccggaagttcatgcaggacccaatggaaatctttgtggatgatgagaccaagttaactctgcatggtctgcaacaatactacgttaagcttaaggacaacgagaagaaccgaaagctttttgatctgttggatgtgctggagttcaaccaggtcgtgatctttgtaaaaagtgtgcagcgctgtatcgctctggctcagctgctggtagagcaaaatttccccgccatcgccatccaccgcggcatgccccaggaggagaggctgtccaggtaccagcaatttaaggacttccagcggcgcatccttgtggcaacaaatctcttcggcagagggatggacatagagagagttaatattgccttcaattacgacatgcctgaagatagtgatacatacttacaccgtgtagcccgcgccggtcgcttcggcacaaagggcttggccattactttcgtcagcgatgagaacgatgcgaagattctgaacgacgtacaagatcgatttgaagtgaacatcagtgaacttccagatgaaatagacatatcatcttatatagaacagacgcggtag

SEQ ID NO: 231739 - DNA, 291 bp, Artificial Sequence
  derived and/or modified sequence
atggccgagaacgacgtggacaacgagctgctggactacgaggacgacgaggtggaaaccgccgcaggcggagatggagccgaggccccagcgaagaaagacgtcaaaggctcttatgtgagcatacatagtagcgggttccgagatttcctgctaaaacctgaacttctgcgcgctattgtcgattgcggcttcgagcacccctctgaggtacagcatgaatgcatcccccaggccatcctcgggatggacgttctgtgtcaagcgaagtctggcatggggaaaacctag

SEQ ID NO: 231740 - DNA, 378 bp, Artificial Sequence
  derived and/or modified sequence
atggccgagaacgacgtggacaacgagctgctggactacgaggacgacgaggtggaaactgcagcggggggagatggggccgaagctcctgcaaaaaaggatgtaaagggcagctacgtttcgatccatagtagcggatttcgcgatttcctgctcaagcctgagctgctccgcgcaatcgtggattgcggttttgagcacccgagcgaggtgcagcacgaatgcattcctcaggccattttgggtatggatgtcctctgccaggctaagtcaggcatggggaagacagcggtgtttgttctggctaccctgcagcagttagagcctgttactggccaagtgagcgtgctggtgatgtgccacactagggagctctag

SEQ ID NO: 231741 - DNA, 696 bp, Artificial Sequence
  derived and/or modified sequence
atggccgagaacgacgtggacaacgagctgctggactacgaggacgacgaggtcgaaactgccgccggaggcgacggagccgaggcccctgctaaaaaagacgtgaagggcagctatgtgtctatccactccagcggcttccgtgatttcctgctgaagcccgaattgttaagagctatcgtagattgtggctttgagcacccttccgaggtgcagcatgagtgtatcccccaggcgatcctcggcatggatgtgctgtgtcaggccaagagtggcatgggaaagacagctgtgttcgtactggcgacactccagcagctcgagcctgtgactggacaggttagcgtactggtcatgtgtcacactcgcgagctcgcctttcagatctctaaagagtacgagcggttcagcaagtacatgcctaacgtcaaggtcgcagtcttttttgggggcctctcaatcaaaaaagacgaggaagtcctcaagaaaaactgcccccatatcgtggtcgggaccccaggaaggatcttggccctcgcaagaaacaagagtctcaacctgaaacatatcaagcatttcatcctggacgagtgtgataagatgttagagcagcttgacatgagacgagacgtgcaggaaatattccggatgacgccacacgaaaaacaggtaatgatgttttcagctacactgtag

SEQ ID NO: 231742 - DNA, 399 bp, Artificial Sequence
  derived and/or modified sequence
atggccgagaacgacgtggacaacgagctgctggactacgaggacgatgaggtcgagactgcagccggcggcgacggcgcagaagccccagccaagaaggacgtgaaagggagctatgtctcaatccacagtagcgggttccgcgactttctgctgaaaccggagctgcttcgtgccatcgtggattgcggctttgagcaccccagcgaggttcaacatgaatgtataccgcaggccattctcgggatggacgtcctgtgtcaggcaaagtctggcatgggaaagacagccgtttttgtactggcaactctgcaacaactggaacctgtgaccggacaggtatgcttctgtgacagtcacttccctcgaggcgataatgaggagctgcacctcccctag

SEQ ID NO: 231743 - DNA, 1053 bp, Artificial Sequence
  derived and/or modified sequence
atgtggaccatgagcagctggaccatgaagatgatgcggtggcggcagcagctgggcgagatgggactcagaccgctgccaagacgcatgtccagggcacccatgagcccctccactgcactggcatttgtgacatcctgtagctctcagtcttgctccggcccactgtccacagttgctcttagtattaggcagaaggtggcggttttcttcggaggactgagcatcaagaaggacgaggaagttttaaaaaagaactgtcctcacatcgtagtgggcaccccagggagaatccttgctttagcaaggaacaagagtctgaacctgaagcacatcaagcacttcatcctagatgagtgcgataaaatgttggagcagttagacatgaggcgcgacgtacaggagatctttaggatgactccccatgagaaacaggtgatgatgttctccgccaccctctcgaaagaaattcgccctgtgtgccggaaatttatgcaggaccccatggagatcttcgttgatgatgaaacaaagttgacactgcacggcctgcagcagtattacgtgaaactcaaagacaatgaaaagaatcgcaagctcttcgacttacttgatgtcctcgaatttaatcaggtcgttatatttgtaaaatcagtgcagaggtgcatcgctcttgcccagctattggtggagcaaaacttccccgcaatcgctattcataggggaatgccccaggaggagcgactatctcggtaccagcagtttaaagattttcagcgtagaatcctggttgccaccaacttgttcggcagagggatggacattgaacgggtgaatattgcctttaactatgacatgcccgaagatagtgatacctacctgcatcgggtcgccagagccggaaggtttggtacgaagggcctagccattacgttcgtatccgacgaaaatgacgcaaaaatcttaaacgacgttcaggacaggtttgaagtgaatatatccgaactacccgatgagattgacatttcctcatacattgaacagacccgatag

SEQ ID NO: 231744 - DNA, 738 bp, Artificial Sequence
  derived and/or modified sequence
atgtggaccatgagcagctggaccatgaagatgatgcggtggcggcaacagctgggcgagatgggcctgcggcccctcccgcgtcgaatgtcccgcgctcctatgtcacccagtacagctttagcttttgtcacgtcctgttccagccagtcatgcagcggtcctttaagcaccgtggccctgtccattagacaaaaggtggctgtgttttttggcgggctgtctattaaaaaagacgaggaggttctcaagaagaattgtcctcacattgtggtcggcaccccggggaggattctggctttagcgcggaacaagtccctaaacctgaaacatattaagcatttcatcctagacgagtgcgataagatgctggaacaattggacatgagaagggacgtgcaagaaatttttcggatgacccctcatgaaaagcaggttatgatgttctcagcaaccttgtcaaaagagatcaggcctgtctgtagaaagttcatgcaggacccgatggaaatctttgtggacgatgagacaaagctgacactgcatggcctgcagcagtactatgtcaaactgaaggataatgaaaagaataggaagctatttgacctgcttgatgtgcttgagttcaatcaggtcgtgatctttgtaaaaagcgtgcagaggtgcatcgccctcgcccagttacttgttgaacagaatttccctgcaatcgctattcacagagggatgccacagtag

SEQ ID NO: 231745 - DNA, 411 bp, Artificial Sequence
  derived and/or modified sequence
atgggcggcggccggcggccctacgacgtgttcttcagcaaggtgatggccgagaacgatgtcgacaatgaactcctggactacgaagacgatgaggtggagaccgccgctggaggcgatggtgccgaagcccccgcaaaaaaggatgtgaaggggagttacgtaagcatccactccagtggttttagagactttcttcttaagcctgaactgctccgggcaatagtggactgcggattcgagcacccaagcgaggtgcagcatgagtgtatacctcaggccattcttggaatggacgtgctgtgccaagccaaatctggaatggggaagaccgctgtgtttgtgctcgctaccctccagcagctcgaacccgtcaccggccaggtgagcgtactggtaatgtgccactag

SEQ ID NO: 231746 - DNA, 1287 bp, Artificial Sequence
  derived and/or modified sequence
atggccgagaacgacgtggacaacgagctgctggactacgaggacgatgaagtcgaaactgcagctgggggtgatggcgctgaggctccggctaagaaggacgttaaggggtcatatgtttccatccactcttctggcttcagagacttcttgctcaaacccgagctactccgggcaattgtcgactgtgggttcgagcacccgtctgaagtccagcatgagtgcatcccgcaggccatcctggggatggatgtgctctgtcaggccaaaagtggcatggggaaaactgctgtgttcgtgctggcgaccctgcaacaactcgagcccgtgaccgggcaggtgtctgtcctcgtgatgtgtcacacccgtgagttggccttccaaatcagcaaggaatatgaacggttctcaaaatatatgccaaatgttaaggtggcagtgtttttcggcggcttgtccattaaaaaagacgaggaggtgctgaagaagaattgcccacacatcgttgtgggaactcctgggaggattctggccttggcccggaacaaatccttgaatctcaagcacatcaagcacttcatcctagacgagtgcgacaagatgttggaacaacttgatatgcgaagggatgtccaggagattttcagaatgactccacatgaaaagcaagtgatgatgtttagtgcaaccctctccaaagaaatcaggcccgtgtgccgaaaattcatgcaggatcccatggagatttttgtggatgacgagacaaagctcaccctgcatgggttacagcagtactacgtaaaactgaaagacaatgagaaaaatcggaagctattcgatctcctcgacgttctggaattcaaccaagttgtaatctttgtgaagagcgtgcaaaggtgtatagccttggcacagctcctcgtagagcagaacttcccggcaatcgctatccaccgaggcatgcctcaggaggagcgccttagtcggtaccaacaattcaaggactttcagcgcaggattctcgtcgcgaccaacctgttcggcagaggaatggatatcgaacgcgtcaacatcgcctttaactatgacatgcctgaagattccgacacttacctgcaccgggttgcacgcgccgggaggttcggcaccaaaggcctggccatcacatttgtgagtgatgagaacgacgccaaaatcctgaacgatgtgcaggaccgatttgaggttaatatctccgagttaccagatgaaattgacatcagcagctacattgaacaaaccagatag

SEQ ID NO: 231747 - DNA, 594 bp, Artificial Sequence
  derived and/or modified sequence
atggccgagaacgacgtggacaacgagctgctggactacgaggacgatgaggtggaaaccgccgcaggcggggatggagctgaggccccagccaaaaaggatgtgaagggatcttacgtatctatccactcatccggcttccgagactttttgttgaagccagagctgttgagggctattgtcgattgtggttttgaacacccctccgaggtacagcacgagtgcatacctcaggccatactgggaatggatgtgctttgccaggccaagagtggtatgggaaagacagctgttttcgtgctggcaaccttacaacaactggaaccagtaactggacaagtctgcttctgtgatagccactttcccagaggggataatgaagaactacacttaccctacgttagcgtctatttcttgcctaaggtttccgtgctggtgatgtgtcatacacgggagctggcatttcagatttctaaggagtacgaacggttctcaaaatacatgcctaatgtgaaggtagcggtgttttttggcggtctgtctattaagaaggacgaggaagtcctgaaaaagaactgccctcacatcgtgtag

SEQ ID NO: 231748 - DNA, 570 bp, Artificial Sequence
  derived and/or modified sequence
tgagccaccctgcagcagctggagcccgtgaccggccaggtgagcgttctggtgatgtgtcacacccgtgagctcgcattccagatttcgaaagaatatgaacggttttcgaaatacatgcccaacgtaaaggtagctgtgttctttggtggccttagcatcaaaaaggatgaggaggtgcttaagaaaaattgtccccacatagtcgtaggcacgccgggccggattcttgcgctcgctcggaacaaatctctgaacctcaagcatatcaagcatttcatcctggacgagtgcgataaaatgttggagcaactggacatgaggcgggatgttcaggagatcttcagaatgactccgcatgagaagcaggtaatgatgttcagtgcaactttgtccaaggaaattcgtccagtctgcaggaaattcatgcaggaccctatggagattttcgttgatgacgaaactaaattgaccctgcatggattacagcagtactacgtgaaactgaaggataacgagaagaataggaagctgttcgacctccttgatgtgctcgaattcaaccagtag

SEQ ID NO: 231749 - DNA, 1287 bp, Artificial Sequence
  derived and/or modified sequence
atggccgagaacgacgtggacaacgagctgctggactacgaggacgacgaagtcgaaaccgccgcaggaggagatggggccgaagctcctgccaagaaagacgttaaaggctcttatgtgagcattcattcctccggtttccgggattttctgttgaaaccagaactgctgagagccattgtggattgcggttttgaacatccatccgaggtgcagcacgaatgcataccccaagccatcctaggcatggacgtgctgtgccaagctaaatccggtatgggtaagacagctgtttttgtgttagccacactccaacagctcgaacctgtgactggccaggtgagcgtcctggtcatgtgccacacacgtgagctggcctttcagatctccaaggagtatgagagattctctaagtacatgcctaacgtcaaagtggcagtgttctttggaggtctgtccatcaagaaagacgaagaggtactgaagaagaactgtccacacattgtcgtggggacgcctggccggattctagcgctggctcgaaataaaagcctgaatctaaagcacattaagcacttcatcctggatgaatgcgacaaaatgctggagcagttagacatgagacgcgatgtgcaggaaatctttagaatgacaccccatgagaagcaggtcatgatgtttagtgcgaccctgagtaaggaaatccgtccagtatgccgcaaatttatgcaggaccctatggagatcttcgttgatgatgaaacaaaactgaccctacatgggctccagcagtattatgtcaagttgaaggataacgaaaagaaccgaaaactcttcgatttattggatgttctcgaattcaatcaggttgtgatttttgttaaaagcgtgcagagatgcattgccctagcccagctcctcgttgaacagaattttcccgccatcgccattcaccgaggtatgccccaggaagagagactgagtcggtatcagcagtttaaagatttccagagacgtatcctggtcgctaccaacctgttcgggaggggaatggatatcgagagggtgaacatcgctttcaactacgatatgcctgaggatagcgacacctatttacacagggtcgccagagctggccgtttcggcaccaagggactggcgattaccttcgtctcagatgagaatgacgctaagatactgaatgatgtgcaggaccgcttcgaggtaaacatcagcgaacttccagacgaaattgacattagctcatatattgaacaaaccaggtag

SEQ ID NO: 231750 - DNA, 711 bp, Artificial Sequence
  derived and/or modified sequence
atggccgagaacgacgtggacaacgagctgctggactacgaggacgatgaggtcgaaacggcagctggaggagacggagccgaagcacctgcaaaaaaggacgtgaagggatcctatgtcagcattcactctagtggcttccgggactttctccttaagcctgaactcctgcgcgccattgtcgactgcggcttcgaacaccccagcgaggtacagcacgagtgtatcccacaggccattcttgggatggacgtcctgtgtcaggcaaagagcgggatggggaagaccgctgtgtttgtgctagcaaccctccagcaactggagccagtgacagggcaggtgtctgtgctcgttatgtgtcacactagggagcttgcttttcagatcagtaaggagtacgaaagattcagcaagtacatgcctaacgtaaaagtggcagtgtttttcggcggactgtctatcaagaaggacgaagaggtgctcaagaagaattgccctcatattgtcgtcggcactcccggcaggattcttgccctggcccggaataaatcactgaacctgaaacacatcaagcattttatacttgatgagtgtgacaagatgctggaacaattagacatgcgcagagacgtacaggagatcttccggatgaccccacacgaaaaacaggtaatgatgttttctgccactctcagcaaggagattaggtag

SEQ ID NO: 231751 - DNA, 564 bp, Artificial Sequence
  derived and/or modified sequence
atgggcagcagccacatcggcggcctgagcatcaacgagcggcggcgcagcgccagcctcggtctggttatggccgaaaacgatgtggacaatgaactccttgattacgaagacgatgaagtggagactgctgcaggaggggatggcgcagaggcacccgccaaaaaggacgtcaaagggagctacgttagtatccactctagcggattcagggatttcttactgaaacccgagttgctgcgcgctatcgtggactgtggattcgagcatcctagtgaggtccagcacgagtgtatcccccaggcgatactcgggatggatgtcttgtgccaggcaaagagtggaatgggtaaaactgccgtcttcgtgctggcaactctccagcagctggagcccgtcaccggccaggtttctgtgctggtgatgtgccacaccagagagttggcatttcagatcagcaaggagtacgagcggtttagcaaatatatgccgaatgttaaagttgcggtgttcttcggcggcctttcaatcaagaaggacgaggaagtgctcaaaaaaaattag

SEQ ID NO: 231752 - DNA, 399 bp, Artificial Sequence
  derived and/or modified sequence
atggccgagaacgacgtggacaacgagctgctggactacgaggacgatgaggtggaaactgcggccgggggtgatggcgctgaggcacctgccaagaaagacgtgaagggctcttacgtctctattcacagttcaggcttccgggacttcctgttgaagccggaactcttgcgagcaatcgtcgactgcggtttcgagcaccccagcgaggttcaacacgaatgcattccccaagccattctggggatggatgttctatgtcaagccaaatctggaatgggaaaaactgcagtctttgtgcttgccacactgcagcagctagagccagtgaccggccaggtgtgtttttgtgattcccatttccctcgaggggataatgaagagttgcatctcccatag

SEQ ID NO: 231753 - DNA, 1332 bp, Artificial Sequence
  derived and/or modified sequence
atggccgagaacgacgtggacaacgagctgctggactacgaggacgatgaggtggagacagctgcaggtggagatggcgcggaggccccggctaagaaggatgttaaaggttcttacgtttctatccattccagcgggttccgcgacttcctgctgaaacccgaacttcttcgcgctattgtggactgtggttttgagcacccatcggaggtgcaacacgaatgcattcctcaggctatactgggcatggatgtcctctgccaagccaagagtggcatgggcaaaaccgcggtctttgtgctggccaccctccaacagctcgagcctgtgactggacaggtgtacctgggcagagtcctgggccggggattttggtgcgtattcgtctctgtactggttatgtgtcatacacgggagctggcgttccagatcagtaaagagtatgagaggttctctaagtacatgcctaacgtgaaagtcgcggtgttcttcggtggcttgtctatcaagaaagatgaggaagtgctcaaaaagaattgtccacatatcgttgtcggtacacccgggcgaatactggctctcgcacgcaacaagagcttaaacctgaagcacatcaagcattttatactggatgaatgtgacaagatgctcgagcagctggatatgcgccgggatgtgcaggaaatttttaggatgaccccacacgagaagcaggttatgatgttctcagcaaccctcagcaaggagatacggccagtgtgtcgcaaatttatgcaggatccaatggagatcttcgtggacgatgaaacaaagttaaccctgcatggattgcagcagtattacgtgaagctaaaagataacgagaagaacaggaaactgtttgatctattggatgtgctggagttcaatcaagttgtgatcttcgtgaaatccgtacaaagatgcattgccttagcacaactgctagtcgagcagaacttcccagccatcgcaatccaccgcggcatgcctcaggaagaacgtctgagccggtaccagcagtttaaagatttccagaggaggatcctggtcgctaccaatctatttggccgagggatggacatcgaacgggtaaatattgcattcaactatgacatgcccgaggactctgacacttacctgcaccgggtagctagggcaggacgatttggaaccaaaggtctcgctatcacattcgtatctgacgaaaacgatgccaagattctcaatgatgtccaggaccgatttgaggtgaacataagtgagctccccgatgagatagacattagcagttacatagaacaaactcggtag

SEQ ID NO: 231754 - DNA, 870 bp, Artificial Sequence
  derived and/or modified sequence
atggccgagaacgacgtggacaacgagctgctggactacgaggacgatgaggtagaaacggccgctggaggggatggcgcagaagctcccgcaaaaaaggacgtgaaagggagctacgtaagcattcacagtagcggcttccgggacttcctgctgaagcccgaattgcttcgggccatagtcgattgcggattcgagcatcctagcgaggtgcaacacgagtgcatcccacaggccatccttggaatggacgtgctgtgccaagctaaatcaggaatgggcaagaccgcagtctttgtcttggccaccttgcagcagcttgaacctgtgaccggtcaggtgagcgtgctggtgatgtgccacacacgggagcttgccttccagataagcaaggagtatgagaggttctctaaatacatgccaaatgtgaaggtggcagtgttcttcggcggacttagcattaaaaaagatgaagaggtccttaagaaaaattgtccccatatcgtggttgggaccccaggcagaatcctggcactggccaggaacaagagtctcaacctgaagcatatcaagcatttcatactggacgagtgcgacaaaatgctggaacaactggacatgagaagagatgtgcaagagatttttagaatgacccctcatgaaaaacaagtgatgatgttctcggcgaccctgtccaaggaaattcggccagtgtgtagaaagtttatgcaggatcccatggagatcttcgttgacgatgagactaagcttaccttgcacgggcttcagcaatactacgttaagcttaaggataacgaaaagaatcggaagttgtttgatctgctggacgtgttggagttcaatcagtag

SEQ ID NO: 231755 - DNA, 564 bp, Artificial Sequence
  derived and/or modified sequence
tgaagcgaggagcgggacatcggcaagcccatggagatcttcgtggacgacgagaccaaactgactttgcacggcctccagcagtattacgtgaagcttaaggataacgaaaagaataggaaactgttcgatctgctcgatgtcctggagttcaaccaagtggtgatattcgtaaaatccgtccagaggtgcatcgcgttggcccagttactagtcgagcagaacttccctgctatagcaatccacaggggtatgcctcaggaagaaagattgtctcgctaccagcaatttaaggactttcagcgccgaattctggtcgcgaccaacctttttggtcgaggaatggacatcgaacgtgtaaacatcgctttcaattacgatatgcctgaggattcagacacgtacctgcatagagtggcccgagccgggcgcttcgggaccaaagggttagctatcacattcgtatctgacgagaatgacgccaaaatcctgaacgacgtacaggatagattcgaggttaacatctctgagctacccgatgagattgacatttcttcttactag

SEQ ID NO: 231756 - DNA, 411 bp, Artificial Sequence
  derived and/or modified sequence
atgggcggcggccggcggccctacgacgtgttcttcagcaaggtgatggccgagaacgatgtggataacgagctactggattacgaggacgacgaggtagaaacagccgctgggggagacggggcggaggccccagcgaagaaggatgtcaaaggatcctatgttagtatccattcctctgggtttagagactttctcctcaagcctgagctcctccgggcgattgttgactgcggatttgagcatccgagcgaggtccagcacgagtgcatacctcaggcaatcttgggaatggacgtcctttgccaggccaaatctggcatggggaagactgccgtgttcgtgcttgcaactctccagcagttggagcctgtgacaggccaggtcagtgtccttgtcatgtgccattag

SEQ ID NO: 231757 - DNA, 411 bp, Artificial Sequence
  derived and/or modified sequence
atgggcggcggccggcggccctacgacgtgttcttcagcaaggtgatggctgagaacgacgtggacaatgagttgctggactatgaggatgatgaggtcgagacagcagccggtggggacggtgcagaggccccagccaaaaaagatgtgaagggcagctacgtgagcattcattcttctggcttcagagatttcctgttgaagcctgagctgctgagggccatcgtggactgtggattcgaacacccaagtgaggtccagcatgagtgcatcccccaggccattctgggaatggacgtgctctgtcaagctaaaagtggcatgggtaaaacggctgtatttgtgcttgcgacgctccaacagctcgaacctgtcactgggcaggttagcgttctggtgatgtgccattag

SEQ ID NO: 231758 - DNA, 399 bp, Artificial Sequence
  derived and/or modified sequence
atggccgagaacgacgtggacaacgagctgctggactacgaggacgatgaagtcgagacagctgccggcggagatggggctgaagctccagccaagaaggacgtgaagggcagctatgtgtctatccactcctcaggtttccgagatttcttgctgaagccggagctgctccgggccattgtggattgtggcttcgagcaccctagcgaggtgcagcacgagtgtatcccacaagctatcctgggtatggacgtgctgtgccaagcaaagagcgggatgggcaaaactgccgtttttgtgcttgccaccttacagcagttagagcccgttactggtcaggtgtgtttttgcgactcgcactttccgagaggggacaatgaggagctgcatcttccttag

SEQ ID NO: 231759 - DNA, 711 bp, Artificial Sequence
  derived and/or modified sequence
atggccgagaacgacgtggacaacgagctgctggactacgaggacgacgaggtggagactgcagcgggaggggatggtgctgaggctcccgctaagaaggacgtgaagggctcttacgtaagtatccattctagtggctttcgcgactttctcttgaagcctgagctgctacgagccatcgtggattgcggcttcgaacatcctagcgaggtgcagcatgaatgtatacctcaggctattcttggcatggacgttctctgccaggctaaaagcggcatgggtaaaacagccgtgtttgtactggcaacactgcagcaactcgaacccgtgacaggacaagtatctgtgctggtgatgtgccatacgcgggagctggcgttccagatcagcaaggagtacgagcggtttagcaagtacatgccaaacgtgaaagtcgctgtttttttcgggggtctgagtataaagaaagacgaggaggtgcttaaaaagaactgtccacacatcgtggtcggaacgcccggtcgtattttagctcttgcccggaacaaatcactcaatttaaagcatatcaaacactttatactggacgagtgcgacaaaatgctagagcaactcgacatgcggagggatgtgcaggagatcttccggatgactccacatgaaaaacaggtgatgatgtttagcgctaccctctccaaagaaatccgatag

SEQ ID NO: 231760 - DNA, 378 bp, Artificial Sequence
  derived and/or modified sequence
atggccgagaacgacgtggacaacgagctgctggactacgaggacgacgaggtagaaaccgcagccggcggtgatggcgcagaggcccccgccaaaaaagacgtaaagggcagctatgtgtctatacattcatctggtttcagggacttcttactcaaacctgaacttctgcgcgccatcgtggattgcggtttcgaacacccatctgaagtccagcatgagtgtatcccacaggcaatcctcggcatggacgtcctgtgccaggccaagagtggtatggggaaaaccgccgtgtttgttctcgctactttgcaacagctggagccagttactggccaggtttctgttttggtgatgtgtcacacaagggagctctag

SEQ ID NO: 231761 - DNA, 987 bp, Artificial Sequence
  derived and/or modified sequence
tgagccaccctgcagcagctggagcccgtgaccggccaggtgagcgttctggtcatgtgccatactcgcgaacttgccttccagattagcaaagagtatgaaaggtttagtaagtacatgccgaatgtcaaggtcgccgtttttttcggaggtctgtctattaaaaaggatgaagaggtcctaaaaaagaattgtccccatattgtcgtagggacccctggaaggattctggccctggcccgcaataagagcctgaacctcaagcatatcaaacatttcatcttggatgagtgtgacaagatgttagagcagctagacatgaggcgtgatgtgcaggagattttcaggatgacaccgcatgaaaagcaagtgatgatgtttagcgcaaccttatctaaggagataagacccgtgtgtcgcaagtttatgcaagatccaatggagatatttgtggacgacgaaacaaagctcacgttacacggtctccagcagtattacgtgaagcttaaggacaacgaaaagaataggaaactgtttgatcttctcgacgtgctagaattcaatcaggtggtgatctttgtgaaatctgttcagagatgcatagcattggctcaactcctcgtggagcagaactttcccgccattgcgattcatagaggtatgccacaagaggaacgattgagcaggtaccagcaattcaaagactttcagcgaaggattcttgtagctacaaacctctttggtagagggatggacattgagagagtaaacattgcatttaattatgacatgccagaagactccgacacataccttcatcgagtggctcgcgccggccgattcggaacaaagggactcgccattacatttgtgtcagatgagaacgacgcaaagatcctaaatgacgttcaggatagatttgaagtgaatatctctgagttacctgacgaaatcgacatttcaagttacatagagcaaacgaggtag

SEQ ID NO: 231762 - DNA, 711 bp, Artificial Sequence
  derived and/or modified sequence
atggccgagaacgacgtggacaacgagctgctggactacgaggacgacgaggtggaaacagcagccgggggagacggcgcggaagcgccggctaaaaaagatgtcaaagggtcctatgtgagtatccattcatccggttttagagatttcttactcaaacctgagcttctgagagccatcgtggattgcggctttgagcatccttccgaggtgcagcacgagtgcatcccgcaggccattctggggatggacgtgctgtgccaggctaaaagcgggatgggcaaaaccgctgttttcgtcttagccaccctgcagcagctcgagcccgttaccgggcaggttagtgtcctggtgatgtgtcacacaagagaactggcctttcagatctccaaagagtacgagaggttcagcaagtacatgccaaatgtgaaggtggctgtattttttggaggtctgtccatcaagaaggacgaggaagtactcaagaagaattgcccccatatcgtagtgggcacccctggacgtattctcgcattggccaggaataagtccctgaatctcaagcacattaagcacttcattttggacgagtgtgataaaatgttggaacagctcgacatgaggcgcgacgttcaggagatattccggatgacaccacacgaaaagcaagtgatgatgttcagtgcgacactttctaaggaaataagatag

SEQ ID NO: 231763 - DNA, 564 bp, Artificial Sequence
  derived and/or modified sequence
tgaagcgaggagcgggacatcggcaagcccatggagatcttcgtggacgatgaaacgaaactgacattgcacggactgcaacaatactacgtgaagctgaaagacaatgaaaagaataggaagctcttcgacctgctggacgttttggagttcaatcaggtcgtgatttttgttaaaagtgtacaacgatgtatcgcccttgcacagctgcttgtggaacagaactttcctgccattgctatccaccgcggcatgcctcaggaggagcggctctccaggtatcagcaattcaaagatttccagcggaggatacttgtcgcaacaaacctgtttggcagaggcatggatattgaaagggtcaatattgcctttaattacgacatgccagaagattctgacacatacctgcatcgcgtggccagagctgggcggtttgggacgaaagggctcgccataacctttgtgagtgatgagaacgacgccaagatcctaaacgacgtgcaggatcggtttgaagtgaacataagcgaacttccggatgaaattgacatatcttcttattag

SEQ ID NO: 231764 - DNA, 378 bp, Artificial Sequence
  derived and/or modified sequence
atggccgagaacgacgtggacaacgagctgctggactacgaggacgacgaggttgagacggctgctgggggcgacggtgccgaggcacccgctaagaaagacgtgaaagggtcttacgtgtccatacattcatctggatttcgggatttcttactgaagccggagttgctgcgagctattgttgactgtggcttcgagcatcccagcgaggttcagcatgagtgcataccccaggctatcctgggcatggatgtgctatgtcaggccaagtcagggatgggcaagacagcagttttcgtgcttgctacactgcagcaactggagccggtgacagggcaggtgagtgtcctcgtgatgtgccataccagagagctttag

SEQ ID NO: 231765 - DNA, 291 bp, Artificial Sequence
  derived and/or modified sequence
atggccgagaacgacgtggacaacgagctgctggactacgaggacgacgaagtcgaaacggctgccggcggcgacggagcagaagccccagccaagaaggacgtcaaaggcagttatgtcagcatccatagcagcggctttagagactttctcctgaagcctgaactgcttagggctatagtggactgtggatttgaacacccttccgaagtgcagcatgagtgtattcctcaagctatcctggggatggacgtgctgtgtcaagcgaaaagtggaatgggaaagacatag

SEQ ID NO: 231766 - DNA, 378 bp, Artificial Sequence
  derived and/or modified sequence
atggccgagaacgacgtggacaacgagctgctggactacgaggacgatgaggttgaaacagctgcgggtggagatggggctgaggcccctgccaagaaggacgtgaagggatcgtatgtgtctatccactcttcaggtttccgggattttctgcttaaacccgaactgctgagggccatcgtcgactgtggattcgagcatccgagtgaagtccagcacgaatgtattccccaggctatcctggggatggatgtgctctgtcaagctaagtccggcatgggcaaaactgctgtgtttgtgctggctactctgcaacagctcgagcccgttaccgggcaggttagcgtactggtgatgtgccacacgcgcgaactgtag

SEQ ID NO: 231767 - DNA, 987 bp, Artificial Sequence
  derived and/or modified sequence
tgagccaccctgcagcagctggagcccgtgaccggccaggtgagcgtactggttatgtgccacacacgcgaacttgcttttcaaatctctaaggagtatgagaggttcagtaagtacatgcccaatgtgaaggtggccgtctttttcggcggtttgtctatcaaaaaggatgaagaggtgctcaagaaaaattgtccgcacatcgtagtggggaccccgggccgcatcctggccttggcacgcaacaaaagcctaaatctcaaacacataaagcactttattctcgatgagtgtgataaaatgctggaacaattggatatgaggagagacgtgcaggagatctttcgcatgactccacacgagaagcaagtaatgatgttcagcgccaccttgagcaaggagattagacccgtgtgccggaagtttatgcaagacccgatggagatctttgttgacgacgagacaaagctaacactacacggtctgcagcagtactacgtgaaacttaaggataatgaaaagaatagaaaattgttcgacctgttagacgtgctcgagtttaaccaagtagttatcttcgttaaatcagtgcagcgatgcatcgcactagctcaattgcttgtcgagcagaattttccggctattgcaatccaccgtgggatgccccaggaggagcgattgtctcgataccaacagttcaaggatttccagcggcggattttggtcgcaacaaacctcttcggaaggggcatggacatcgagcgtgtgaacatcgctttcaactatgacatgcccgaggactcagatacctatttgcaccgtgtcgctagggcaggcaggtttggcacgaaaggcttagctatcacattcgtctctgatgaaaacgatgcaaagattctgaatgatgtgcaggatagattcgaagtgaatataagcgagttaccagatgaaatcgacatcagtagctatatagaacagaccaggtag

SEQ ID NO: 231768 - DNA, 870 bp, Artificial Sequence
  derived and/or modified sequence
atggccgagaacgacgtggacaacgagctgctggactacgaggacgatgaggttgagaccgccgcaggcggggatggggctgaagcccctgccaagaaggacgtgaaggggagctacgtatctatccactccagcgggttcagggatttcctcctgaaacccgagttgctccgagccatcgtggattgcggcttcgagcatcctagtgaagtgcagcatgagtgcatcccgcaggctatcctggggatggacgtactatgtcaggccaagtctgggatgggaaaaacagccgttttcgtactggcaacactgcagcaacttgagcccgtaaccggtcaggtcagtgtgttagtgatgtgccacacgagggaattggctttccagatcagtaaagaatacgagagattcagcaaatatatgcctaacgtgaaagtggccgtgtttttcggagggctgtctattaagaaagacgaggaagttttgaaaaagaactgtccacacatcgtggtgggcacaccagggcggatcctggccctggcacgcaataaatccctgaacctgaaacacattaagcattttattctcgatgaatgcgataaaatgctggagcagctcgatatgcgtcgagatgtgcaagaaatatttcgcatgaccccacacgaaaaacaggtcatgatgttctccgctactctctcaaaggaaattcgcccagtttgtagaaaatttatgcaggatcctatggagattttcgttgatgatgagaccaaactcactctacatggactgcagcagtattatgtaaagctaaaagataacgaaaaaaaccggaagctgtttgatctcctggacgtgctagagtttaaccagtag

SEQ ID NO: 231769 - DNA, 738 bp, Artificial Sequence
  derived and/or modified sequence
atgtggaccatgagcagctggaccatgaagatgatgcggtggcggcagcaacttggggagatgggtctgcggcccctccctcgacgcatgtcccgtgctcctatgtcaccatccactgccctagccttcgtaacgagctgctcatcccaatcgtgttccggtcccctgtcaactgtagccctgagcattcgccagaaggttgcggtttttttcgggggccttagcatcaaaaaggatgaagaagtcttaaaaaagaattgtccccacattgtcgtaggcactccaggacggatacttgcactggcacgcaataagtctctgaacctgaagcacattaaacactttatcctggacgaatgcgataaaatgcttgagcagctcgatatgagacgggacgtgcaggaaatctttaggatgacaccccacgaaaaacaggtaatgatgtttagtgcaacactgagcaaagagatcaggccagtctgccgcaaattcatgcaggatccaatggaaatcttcgtggacgacgaaaccaagctaacacttcatggcttgcagcagtactatgtaaaacttaaggataacgagaagaaccgaaagttatttgacctgctagatgtcttggagttcaaccaggttgttatctttgtgaagagcgtccaacgttgtatagccttagctcagttattggtggaacagaacttcccggcaattgctatacacaggggcatgcctcagtag

SEQ ID NO: 231770 - DNA, 738 bp, Artificial Sequence
  derived and/or modified sequence
atgtggaccatgagcagctggaccatgaagatgatgcggtggcggcaacaactcggagaaatgggcctgcggccacttccccgccgcatgagccgggccccaatgagcccaagcaccgctctagcattcgtgacttcttgtagctctcaaagctgctctggacccctgagcacggttgctctgagcatccggcagaaagttgctgttttcttcggagggctgtccattaagaaagacgaagaggtgctgaagaagaactgtccacatattgttgtcgggacgccaggcagaatattggccctagccagaaacaaatctctgaatctgaaacatattaaacactttatcctggacgagtgcgataagatgctagagcaactcgatatgcgccgcgatgtgcaggaaatttttaggatgaccccccacgaaaagcaggtaatgatgttttctgctacactgtccaaggagatacggcctgtgtgccggaagttcatgcaagacccaatggagatatttgttgatgatgagacaaaactgacattgcacggcctccagcagtattatgtgaagcttaaggataacgaaaaaaatcgcaagctgtttgatctgctagacgttttagagttcaaccaggtcgtcatcttcgtcaagtctgtgcagcgctgtatcgccttagcacagctcctggttgaacagaatttcccagccattgctatacacagggggatgcctcaatag

SEQ ID NO: 231771 - DNA, 396 bp, Artificial Sequence
  derived and/or modified sequence
tgagccaccctgcagcagctggagcccgtgaccggccaggtgagcgtgctggtgatgtgccacacccgggaactggcatttcaaatctctaaagagtacgagcggttctcaaagtatatgcctaatgtaaaagtggcggtgtttttcgggggtctgagcatcaagaaggacgaagaagtattgaaaaagaattgtcctcacattgtggtgggcacacccggacgaattcttgcgctcgcgcgcaataagagtctcaacttgaagcatataaaacatttcatactggatgaatgcgacaaaatgctggaacagctggacatgagaagggacgtgcaggaaatctttcggatgacccctcacgagaaacaagttatgatgtttagtgccactctttag

SEQ ID NO: 231772 - DNA, 411 bp, Artificial Sequence
  derived and/or modified sequence
tgagccaccctgcagcagctggagcccgtgaccggccaggtgagcgttctggtgatgtgtcatacaagggagttagcttttcagatttccaaggaatatgagaggttttcgaagtacatgcccaatgttaaggtggcagtgttcttcggtgggctgtccatcaaaaaggacgaagaggttcttaaaaaaaactgcccacatattgttgtaggaacccccgggagaatcttggcactggcacgtaacaagtccctaaatctgaagcatattaaacacttcatcttggatgaatgcgacaaaatgctggaacaactggacatgaggcgcgatgtccaagagatctttagaatgaccccgcacgaaaagcaagttatgatgttctcagcgactctgagcaaggaaattagatag

SEQ ID NO: 231773 - DNA, 717 bp, Artificial Sequence
  derived and/or modified sequence
atggccgagaacgacgtggacaacgagctgctggactacgaggacgatgaggttgaaaccgccgccggtggagacggcgcagaggcacccgctaagaaagacgtgaaaggaagctatgtgtcaatccactcttcaggtttcagagacttcctcctgaaacctgaactgctccgtgccatcgtagattgcggctttgagcaccccagcgaagtccagcatgagtgcattcctcaggcgatcttagggatggatgtcctatgccaggcaaagagcgggatggggaaaacagccgtatttgttttagcaaccctccagcaacttgagccggtcaccgggcaggtctctgtgcttgtaatgtgtcacactcgagaattggctttccagatcagtaaagagtatgagcgattctctaaatatatgcctaacgttaaggttgccgtcttttttgggggactgagcatcaaaaaggacgaagaagtcctgaagaaaaactgtcctcacatcgtggttggcactcccggtcgaattttggccctggctcgcaacaagtcgcttaacctcaaacatataaagcatttcattttagacgagtgtgataagatgttggaacagcttgatatgcgcagggatgtgcaggaaatctttcgcatgacacctcacgaaaaacaggtcatgatgttttccgccactctcagtaaagagataaggccagtgtag

SEQ ID NO: 231774 - DNA, 564 bp, Artificial Sequence
  derived and/or modified sequence
tgaagcgaggagcgggacatcggcaagcccatggagatcttcgtggatgatgaaaccaagttaacccttcatggattacaacaatactatgttaagctcaaggacaacgagaaaaaccgaaagctgttcgatctgctggacgtcctggaatttaaccaggttgtgattttcgtaaaaagcgtgcagcgctgtatcgctctcgcccagcttctcgtcgaacagaattttcctgccatcgccatccatagaggtatgccacaagaggaaagactgagtagatatcaacagttcaaagacttccagagacgcatcctcgtggccaccaacctttttggtaggggcatggatatcgagcgcgtcaacatcgcctttaattacgacatgcctgaagactctgacacatacctccatcgtgtggcaagagccgggcgctttggtactaaagggctggcaattacattcgtgtccgatgagaatgacgcgaagatcctgaatgacgtacaagaccgctttgaggttaacatttcagaactgcccgacgagattgatatcagctcctattag

SEQ ID NO: 231775 - DNA, 594 bp, Artificial Sequence
  derived and/or modified sequence
atggccgagaacgacgtggacaacgagctgctggactacgaggacgacgaggtggagaccgctgccggcggagacggagcggaggcccctgccaagaaggacgtcaaaggaagctatgtctccatccatagctctggatttcgtgatttcctgctgaaacccgaattgctacgggccatcgttgattgtggcttcgagcaccccagtgaggttcagcacgagtgcataccccaggcaattcttggcatggacgtgctgtgtcaggccaaatccggcatgggcaaaacagccgttttcgtgctggccaccttgcagcagctggagccggtcacggggcaggtgtgcttttgtgactcacatttccctagaggagacaatgaggagctccatctcccctacgtgtcagtctatttccttccaaaagtgtccgtgctggtgatgtgtcacacgcgcgaactcgccttccagatcagtaaagagtacgagcgcttctcaaaatatatgcctaatgtgaaagtagctgtcttcttcgggggcctctccataaagaaggacgaggaagtgctcaaaaaaaattgcccccatattgtttag

SEQ ID NO: 231776 - DNA, 594 bp, Artificial Sequence
  derived and/or modified sequence
atggccgagaacgacgtggacaacgagctgctggactacgaggacgacgaggtagaaacggccgccggcggcgatggtgccgaggccccagcaaagaaagacgtaaaaggaagctatgtcagtatccacagctctgggtttagggattttctgctgaagccggaactgctacgagctattgtggattgtggtttcgaacatccgagcgaagttcagcatgagtgcatcccgcaggctatcctgggcatggatgtgctgtgccaagctaaatccgggatgggcaagacagcagtctttgtgttggccactctgcagcaactcgagccagtgactggccaagtgtgtttctgtgactcccatttcccacgaggcgataacgaagagcttcacttgccatatgtgtcagtttacttcctccctaaggtgagcgtcctggtgatgtgccatactcgtgagttggcatttcagatcagtaaggaatatgagcgcttctccaaatatatgccaaatgtcaaagtggccgtcttcttcggcgggctgtccatcaaaaaagacgaagaagtgctcaagaagaattgcccccacatagtgtag

SEQ ID NO: 231777 - DNA, 411 bp, Artificial Sequence
  derived and/or modified sequence
atgggcggcggccggcggccctacgacgtgttcttcagcaaggtgatggccgaaaatgacgttgataatgagttattggactacgaggacgacgaagttgaaaccgctgcagggggggacggcgccgaggccccagccaagaaggatgttaaaggctcatatgtctccattcattcaagcgggtttagggacttcctgctgaagcccgagctgttgcgggccatcgttgattgcggatttgagcatccaagcgaggtgcagcacgagtgtatcccccaggccatcctgggaatggacgttctatgccaggcgaagtccggtatggggaagacagcggtgttcgtgcttgccacactccagcagctcgagcccgtgacgggacaggtaagcgtcttggtgatgtgccactag

SEQ ID NO: 231778 - DNA, 1278 bp, Artificial Sequence
  derived and/or modified sequence
atggccgagaacgacgtggacaacgagctgctggactacgaggacgatgaggtggagacggcggcaggaggggatggggccgaagcgcctgcaaaaaaggacgtcaaaggaagttatgtctctatccacagtagcgggttcagggactttttactcaaacccgaacttctgagggccatagtcgactgcgggtttgagcacccaagcgaggtacaacacgagtgtatcccccaggccatcttgggtatggacgtgctgtgccaggccaaatccggcatggggaagacagcggtcttcgtgctcgccactctgcaacagctggagcctgtaactgggcaggtatctgtactggtgatgtgtcacactcgggagttggcgttccagattagcaaagaatatgaacgattttctaaatacatgcctaatgtaaaagtggccgtgttcttcggtggattgagtatcaagaaggacgaggaagtgctgaaaaaaaattgcccgcacattgtggtgggcactcctggaagaatcctcgccctggcccggaacaaatccctgaacttaaagcacattaaacatttcattctggatgagtgcgacaaaatgctggaacagcttgatatgaggcgggacgtccaggagatcttcaggatgactccccatgaaaagcaggttatgatgttttcagctacactgtctaaagaaatccgtcccgtgtgccggaaattcatgcaggaccccatggagatcttcgtcgatgatgagacaaaactaactctgcacgggttacagcagtactacgtgaagctaaaagacaatgagaaaaatagaaaattatttgacctgcttgacgttcttgagtttaatcaagttgtaatattcgttaaatctgtgcagaggtgcattgcattggcacagctgctcgtggaacagaactttccagctatcgccatccacaggggcatgccccaggaggagaggctgtctcgttaccagcagttcaaagactttcagaggagaatcctggtggccacaaaccttttcggaagggggatggacatcgaaagagtaaatatcgcctttaattatgatatgcctgaagacagcgacacttatctccataggtgttacccgctttcaccctcaaggtggcccgaacaggccggactcgccccacgagcttggctctcacacctgtgtccaatgcgaatgatgcctcggtcatcaatgatgtgtaggatcgcgctgcgctcgatcctcgtgagttgcttgatgaggtag

SEQ ID NO: 231779 - DNA, 1287 bp, Artificial Sequence
  derived and/or modified sequence
atggccgagaacgacgtggacaacgagctgctggactacgaggacgacgaggtcgagaccgcagccggcggagacggcgccgaggcccccgccaagaaggatgttaagggctcctatgtaagtatccactcctctggctttcgtgatttcttactcaaacctgagctccttagggcgattgtagattgtggtttcgaacacccctctgaggtgcaacacgagtgcataccacaagcgatattaggcatggacgtgctctgtcaggcaaaaagcggaatggggaagactgccgtgtttgttctcgctacactgcaacagctcgaacccgttacgggacaggtgagcgtactcgtgatgtgccacacacgagagcttgcttttcagatctctaaagagtatgaaaggttcagcaagtacatgcccaacgtgaaagtcgccgtgttcttcggaggcctaagcatcaagaaggacgaagaggttctcaaaaaaaattgtccacacattgtggtggggactcctggaaggatcctggcattggcccggaacaagagcctgaacctgaaacacataaaacacttcatcctggatgaatgtgataagatgctggaacagctggatatgagacgcgacgtgcaggagatcttccgcatgaccccccacgaaaaacaggtgatgatgttctcagcgaccctgagcaaggagatcaggccagtctgtcgcaagttcatgcaggaccccatggaaatttttgtagatgatgagacaaaattgaccctccacggtttgcaacaatattacgtcaaactgaaggataacgaaaaaaaccgcaaattgttcgacctgttagacgtgctggagttcaaccaagtggttatcttcgtaaaatctgtgcagcgctgcattgccctggctcagctcctggtggaacaaaacttcccggccattgccatacaccgcgggatgcctcaggaggagaggctatccagataccagcagttcaaagacttccaacgacgcatcctagtcgctactaatcttttcggaaggggtatggatattgaacgggtcaacattgcttttaactatgacatgccagaagattccgatacttacctgcatcgtgtggccagggccgggagattcgggactaagggtctggctattacgttcgtctctgatgaaaatgatgctaaaattttgaacgatgtgcaggaccgatttgaggttaatatctcggaactgccagatgaaattgacatttcttcctacatagaacaaacaagatag

SEQ ID NO: 231780 - DNA, 1287 bp, Artificial Sequence
  derived and/or modified sequence
atggccgagaacgacgtggacaacgagctgctggactacgaggacgacgaagttgagaccgccgctgggggagatggcgcagaagcacccgccaaaaaggatgtcaaaggcagctacgtgtccatacacagcagtgggtttagggatttccttctcaagccagaactgcttagggccattgtggactgtgggttcgagcatccctccgaggtccagcacgagtgtattccccaggccatccttgggatggacgtgctctgccaagccaaatcggggatgggtaagaccgccgtgttcgtactggccacacttcaacagctcgaacccgttacagggcaggtaagtgtgttggtcatgtgccacacacgagaattagcgttccagatcagtaaggaatacgagcggttcagtaagtacatgccgaacgtcaaagtcgcagttttttttggggggctctcaattaagaaggacgaggaggtgttgaagaagaactgccctcatattgtggtgggtaccccaggtagaatcctggcactcgcacggaataagtctctcaacctgaaacacataaaacacttcattctcgacgagtgcgacaagatgctggagcaacttgacatgaggcgtgacgttcaggagattttcaggatgacaccgcacgaaaaacaagtgatgatgttcagtgcaacattatctaaggagataagaccagtgtgtcgtaagtttatgcaggaccctatggagatcttcgttgatgatgagaccaagctgacgctccatggtcttcagcagtactatgtgaaactgaaagataatgaaaagaatcgtaaactattcgatctattggacgtcctagaattcaaccaggttgtaatctttgtcaaaagcgtgcagagatgcatcgcccttgcccagctgctagttgagcagaattttccagctattgccatacatcgcggtatgccacaggaagaaaggcttagcagatatcagcagtttaaggatttccagcgccgaattttggtggcaacaaatctgttcggaaggggtatggacatcgagagagtcaacatcgcctttaactatgacatgccagaggactctgatacgtaccttcatcgagtggcccgggcaggccggttcggtacaaaagggcttgctatcacctttgtgtccgacgagaacgatgccaagatccttaacgacgtgcaggataggttcgaggttaacatcagcgaactgcccgatgagatcgatatttcatcctatattgaacaaactagatag

SEQ ID NO: 231781 - DNA, 738 bp, Artificial Sequence
  derived and/or modified sequence
atgtggaccatgagcagctggaccatgaagatgatgcggtggcggcagcaactgggagaaatggggctccggcctctcccgcggcggatgtctcgagccccaatgagtccctctactgccctagccttcgtgaccagttgctcctcacagtcatgcagtggaccactgtcaacagtcgccctgtcaatccgccagaaggtggcggtattttttggaggattgtcaattaagaaggacgaggaagtgttaaaaaaaaattgtccccatattgttgtgggcacacccggtcggatcctggccctggctcggaacaaatctctcaacctgaaacatatcaagcatttcatcctcgacgaatgcgacaagatgctggagcagctggacatgaggagggacgtgcaagaaatctttcggatgaccccgcatgagaagcaggtaatgatgtttagtgccacgctgtctaaagagatccgccccgtgtgccgaaagtttatgcaggatccaatggagatttttgtggacgacgagaccaagctcactctgcatggactgcagcagtactatgtgaaactgaaagacaatgaaaaaaataggaagctcttcgatctgctcgacgtcttggaatttaatcaggtggtgattttcgtgaaatctgttcaaagatgcattgctttggcacagcttctcgtcgagcagaatttccccgcaattgcaatacaccgcggaatgccccagtag

SEQ ID NO: 231782 - DNA, 696 bp, Artificial Sequence
  derived and/or modified sequence
atggccgagaacgacgtggacaacgagctgctggactacgaggacgacgaggtggaaactgccgcaggaggagacggcgcggaggcaccagccaagaaggacgtgaaaggatcgtatgtgtccatacactcaagtgggttccgggatttcctgctgaaacccgagttactccgagcaatcgtcgattgcggcttcgagcaccccagcgaggtccaacatgagtgcattcctcaggccatccttgggatggatgtcctatgccaggcgaagtccggcatgggcaagaccgcggtcttcgtgttggccacactccagcagctggaacccgtaacggggcaggtgtccgtactcgtgatgtgccacactcgggagctggccttccagatcagtaaggagtatgaacggttcagcaaatatatgccaaatgtgaaggttgcagttttttttggcggcctatcaattaaaaaggatgaagaggtactgaaaaaaaactgcccacacattgttgtcggcacccccggccggatccttgcgctcgccaggaacaagtccctgaacctgaagcacattaagcacttcatactggatgagtgtgataagatgttggagcagctggacatgcgccgcgacgtccaggagatctttcggatgactccgcatgagaaacaggtcatgatgttcagcgccacattgtag

SEQ ID NO: 231783 - DNA, 594 bp, Artificial Sequence
  derived and/or modified sequence
atggccgagaacgacgtggacaacgagctgctggactacgaggacgacgaggtagaaacggctgccgggggagatggtgcagaggctccagcaaagaaggatgtgaagggaagttatgtcagcattcattcatcggggttcagggacttcttactaaagcccgaattgttgcgggccatagttgactgcggattcgaacatccttctgaagtgcagcatgagtgtatcccccaggccatcctaggcatggacgtcctctgccaagccaaaagtgggatgggtaagacagccgtattcgtgttggccactctgcagcagcttgaaccagtgacaggccaggtgtgcttttgcgactcacatttcccaagaggggacaatgaggaactgcatttgccctatgttagtgtgtacttcctaccaaaagtgagcgtgctggttatgtgccatactagagagttggccttccagatctcgaaggagtatgagcgattttctaagtacatgccgaacgtgaaggttgcggtattcttcggggggctctctattaaaaaggatgaagaggttttgaagaagaactgcccacacatcgtttag

SEQ ID NO: 231784 - DNA, 594 bp, Artificial Sequence
  derived and/or modified sequence
atggccgagaacgacgtggacaacgagctgctggactacgaggacgatgaggtggagaccgcagctggcggtgatggagccgaagccccagccaaaaaggatgtgaaagggagctatgtatccatccactcctcaggcttccgcgactttctcttgaagcccgaattgctgcgcgcaatagtggactgtgggtttgagcacccttcagaagtacaacacgagtgtatcccacaggccattctggggatggatgtcctgtgccaggctaagagcggcatgggaaaaacagctgtattcgttctcgcaaccctgcagcagctggagcccgttactggccaggtctgtttctgcgactcacacttcccgcggggggacaatgaagagctgcaccttccctacgtatctgtgtactttctgcccaaagtgtcggtcttggtaatgtgccatacgcgtgagctggcattccagatttctaaggaatacgagcgattctcgaagtatatgccaaatgttaaggtggccgtcttctttggtggcctgagcatcaaaaaggatgaggaggttctgaaaaagaattgcccgcatatcgtctag

SEQ ID NO: 231785 - DNA, 540 bp, Artificial Sequence
  derived and/or modified sequence
gtggccgtgttcttcggcggcctgagcatcaagaaggacgaggaggtgcttaaaaagaattgtccccatatcgttgtggggactcctggtagaatcctggctttggcacgcaataagtcacttaacctgaaacacatcaaacacttcatccttgatgaatgcgataaaatgctggaacaacttgacatgagacgcgacgtgcaggaaatcttccggatgacgcctcacgagaaacaagtaatgatgttcagcgccacgctgtccaaggaaatccgccccgtctgccgcaagttcatgcaggatcccatggagatatttgttgacgacgaaactaaactgacgttgcacggtctacaacagtattatgtaaagctgaaggacaacgaaaaaaatcgaaagctgttcgacctgttagacgtgctcgaattcaaccaagtggtaattttcgtgaagagcgtccagcgctgtattgccttggcacagctgttggttgaacagaactttccggcgatagcaatacatcgcgggatgccacagtag

SEQ ID NO: 231786 - DNA, 594 bp, Artificial Sequence
  derived and/or modified sequence
atggccgagaacgacgtggacaacgagctgctggactacgaggacgacgaggttgagacagctgctggcggggatggcgccgaggcaccagccaaaaaggatgtgaaggggtcgtatgtctccatccactccagtggattccgagacttccttctgaaacccgaactccttagagctattgtggattgcggttttgaacatccatcggaagtacagcatgaatgcatcccccaggccatccttgggatggacgtattatgccaagctaagtcgggaatggggaaaacagccgtatttgtgctcgctactcttcaacagctcgaaccagtcacgggacaggtgtgtttctgcgacagtcatttccctcgcggtgacaacgaggagctgcacctgccctatgtgtcagtttacttcttacccaaagtgtccgtgctggtgatgtgccacactcgtgaactggcttttcagatttcgaaggagtacgagcgattctcgaaatatatgcctaatgtgaaagtagctgtgtttttcggaggtctctctataaaaaaggatgaggaggtgttgaagaagaattgcccccacatagtgtag

SEQ ID NO: 231787 - DNA, 564 bp, Artificial Sequence
  derived and/or modified sequence
tgaagcgaggagcgggacatcggcaagcccatggagatcttcgtggatgacgaaaccaagctcaccctgcacggactacagcagtattatgtcaagctcaaggataacgagaagaatcgaaagttatttgatctgctggatgtgctggagttcaatcaggtggtgatttttgtgaagtccgtgcaacggtgcattgcgctggcacaattattggttgagcagaactttccggctatcgcaattcacagaggaatgccgcaggaggaacgcctgagcagatatcagcaatttaaggactttcagagacgcatactggtagcaaccaatctgttcggccgcggaatggatatagagagagtgaatatagctttcaattacgatatgcctgaggacagcgacacctacctgcacagagtcgcaagagctggacgattcggtaccaaaggcttagctatcacgtttgtgtcggacgaaaatgacgcaaagatccttaacgacgtgcaggacagattcgaagttaacataagtgagctgcctgatgaaatcgacataagttcatactag

SEQ ID NO: 231788 - DNA, 195 bp, Artificial Sequence
  derived and/or modified sequence
tgagccaccctgcagcagctggagcccgtgaccggccaggtgagcgtgcttgtcatgtgtcacacacgtgagctggccttccagataagcaaggagtacgagcgtttcagcaagtatatgcctaacgtaaaagtcgctgttttcttcggcggccttagcataaagaaggatgaggaagttctgaagaaaaactag

SEQ ID NO: 231789 - DNA, 78 bp, Artificial Sequence
  derived and/or modified sequence
tgagccaccctgcagcagctggagcccgtgaccggccaggtgagcgtgctggtcatgtgccataccagagagctatag

SEQ ID NO: 231790 - DNA, 66 bp, Artificial Sequence
  derived and/or modified sequence
tgagccaccctgcagcagctggagcccgtgaccggccaggtgagcgtgctggttatgtgccactag

SEQ ID NO: 231791 - DNA, 870 bp, Artificial Sequence
  derived and/or modified sequence
atggccgagaacgacgtggacaacgagctgctggactacgaggacgatgaggttgaaacagccgctggcggagacggggcagaagccccggctaaaaaggatgtgaaggggtcctatgtcagtatacattccagtgggttccgcgattttttgctgaagcccgagctccttcgagctatcgtggactgcggatttgagcacccatctgaggttcaacacgaatgtatcccccaggctatactgggcatggatgtgctttgtcaggctaaatccggcatgggtaaaacagcagtgttcgtgctagctaccctgcagcagttggaacctgttacagggcaggtgtctgtgctggtgatgtgccacactcgggaattggcgttccaaattagcaaagagtacgaacgcttctcaaaatacatgcccaatgtgaaggtggctgtgtttttcggcggtctgagcattaagaaagatgaagaggttctcaaaaagaattgccctcacatcgtggtaggcaccccaggcaggatcctggctctcgcccggaataagtcacttaaccttaaacacatcaagcactttatcttggatgaatgcgataagatgctcgagcagctggatatgaggagagatgtccaggaaatcttcaggatgaccccccatgagaaacaggtgatgatgttctctgcaactctgtctaaggagatcagaccagtgtgcaggaaattcatgcaggatcctatggagattttcgtggacgatgaaacgaaattgactctgcatggcctccagcaatattacgtcaagttaaaagacaatgagaagaaccgaaaactgttcgatctgctggatgtcctggagttcaaccagtag

SEQ ID NO: 231792 - DNA, 711 bp, Artificial Sequence
  derived and/or modified sequence
atggccgagaacgacgtggacaacgagctgctggactacgaggacgatgaggtggaaacagccgccggcggtgacggagccgaagctcctgcaaagaaggatgtgaaagggagctacgtgtcaatacacagttcaggcttccgagactttctgctgaaaccggagctgttgcgtgcaatcgtggattgcgggtttgagcacccgtccgaggtccagcacgagtgtatcccccaggccatcttaggaatggatgtcttgtgccaagctaaatcaggaatgggcaagaccgctgtctttgtgttggccactctacagcagctcgagccggtcaccgggcaagtcagcgtgctggtgatgtgccacacaagagaactggcttttcagatcagcaaggagtacgaaagattctctaaatatatgcccaatgtgaaggtggccgtgttcttcggaggcttatctatcaaaaaggacgaggaagtgctgaaaaaaaactgtcctcacatcgtggtcgggacgcctgggagaatccttgccttggccaggaataaaagcttgaatttgaagcacattaaacattttattttggacgagtgtgacaaaatgttggaacagctcgatatgagacgggatgtacaggagatctttagaatgacccctcatgagaagcaggtgatgatgttcagtgccaccctttcaaaagaaatacggtag

SEQ ID NO: 231793 - DNA, 711 bp, Artificial Sequence
  derived and/or modified sequence
atggccgagaacgacgtggacaacgagctgctggactacgaggacgacgaggtggagacagccgctggcggcgatggtgctgaagcccccgccaagaaagatgttaaaggtagttacgtgtccattcacagcagtggctttagggatttcctgctgaaaccggagctcctgcgggctatcgtggactgtgggtttgagcatcctagtgaagtgcagcacgaatgcattccgcaggctatcctaggcatggatgtcctttgtcaggctaaatcgggaatgggtaagaccgcagtcttcgtgctggctacattacagcaactggagccagtgaccggacaagtaagcgtactggtgatgtgccacactagagaactagctttccagatctcaaaggagtatgagcgttttagtaagtatatgcccaacgtgaaggtggctgttttttttggcgggctctccatcaagaaggacgaggaagtacttaagaagaattgtccacacattgttgttggaactccaggtcgcatactcgcccttgccaggaacaagtctctgaacctgaaacacatcaagcatttcattctggacgaatgtgacaagatgcttgagcagctcgacatgcgacgagacgtgcaggaaatcttccggatgacacctcatgaaaagcaagtcatgatgttctccgccaccttgagtaaagaaattcgctag

SEQ ID NO: 231794 - DNA, 978 bp, Artificial Sequence
  derived and/or modified sequence
tgagccaccctgcagcagctggagcccgtgaccggccaggtgagcgtgttggtaatgtgccatactagggagctggcgtttcagatctctaaggaatacgaacggttctccaaatacatgcccaatgtaaaggttgcagtgttctttggaggactatccattaagaaggatgaggaggtgctgaaaaaaaattgtcctcacatcgtggtcgggacacctgggcgtatcctggctctggctcgcaacaaatctctcaacctgaagcacatcaaacacttcatattagacgaatgcgataagatgttagaacagctggacatgagaagagatgttcaagagattttccgcatgactcctcatgagaaacaggtgatgatgttttccgcaacacttagtaaggaaatccgcccggtttgcagaaagttcatgcaggaccctatggaaatttttgtggatgacgagactaagctgacacttcacgggctgcaacaatattatgtcaagttgaaagacaatgaaaagaaccggaaattgttcgacctgctcgacgtgctggaatttaatcaagtcgttatttttgttaaaagcgtgcagcgctgcatagccctggctcaattactggtggagcagaactttcccgcaatcgctatccatcggggcatgccccaggaggagcgactctctagataccagcagttcaaggacttccagcggcggatactggtggccaccaatttgttcggtcgcggaatggatattgagagggtcaacatcgccttcaactacgacatgcccgaagattccgacacttacctgcatcgatgttaccctctgagcccatctagatggccagagcaagccgggctcgccccaagggcttggctctcccacttgtgtcccatgcgtatgatgcctaggtccagcatgatgtgcagaatcgcacttaggagcattttagtgagttgtctgatgcggtag

SEQ ID NO: 231795 - DNA, 717 bp, Artificial Sequence
  derived and/or modified sequence
atggccgagaacgacgtggacaacgagctgctggactacgaggacgacgaggtggagacagcagccggaggcgatggagccgaggcacccgcaaaaaaagacgtcaaaggatcctacgtgagcatccattcctcaggctttagagacttcctgttaaaacctgaactactgcgggctatcgtcgactgcggctttgaacaccctagcgaagtgcagcacgaatgcataccacaggctatcctggggatggatgtgctgtgccaggctaaatctggtatgggcaagacagccgtttttgtcctggcaaccctgcaacagctcgaacctgttacgggccaggtgtccgttctggtcatgtgccatactcgagagctcgcatttcagatttccaaagaatatgagagattcagcaagtacatgcccaatgtgaaggtggcagttttctttggcggactcagcataaagaaggatgaggaggttctgaaaaaaaattgtccgcacatagtagtgggaactcctgggcgcattctggcgctggcacggaataagtcgttgaatctaaagcacattaaacactttattctggatgagtgcgataagatgctggaacagctcgacatgagaagagatgtccaagagatatttagaatgacgccgcatgagaagcaggttatgatgttttccgcaaccctttcgaaggaaatccgccctgtttag

SEQ ID NO: 231796 - DNA, 717 bp, Artificial Sequence
  derived and/or modified sequence
atggccgagaacgacgtggacaacgagctgctggactacgaggacgacgaggtggaaacggcggctggcggagatggagcagaagcgccggccaagaaagacgtgaagggctcttatgtgtccatacacagctctggcttccgggattttctgctgaaacccgaactgctgcgcgctatcgtcgattgtggattcgaacacccttctgaagtacaacatgagtgtatcccccaggctatcttaggtatggatgtgctctgtcaggcaaaatccggaatgggaaagacggccgtgtttgtgcttgcaactcttcaacaattagagcctgtgacaggtcaggtgtctgtgttggtcatgtgtcatacccgggaattagcattccagattagtaaagagtacgaacggttttcaaaatacatgcccaatgtgaaggtggccgtgttcttcggtggacttagcataaagaaggatgaggaagtgctgaagaagaactgtccacacatcgtcgttgggactcctggacggattctggcactagcacgaaacaaatcattaaacctaaagcacatcaaacactttatattagatgagtgtgataaaatgcttgagcagctcgatatgaggcgggatgtgcaggaaattttccgaatgacaccgcatgaaaagcaggtgatgatgttctccgctaccctgtctaaagagatcagacccgtctag

SEQ ID NO: 231797 - DNA, 870 bp, Artificial Sequence
  derived and/or modified sequence
atggccgagaacgacgtggacaacgagctgctggactacgaggacgatgaggtcgaaactgcagccggcggcgacggtgcggaagcgccagccaaaaaggacgtgaaagggagttatgtcagtatccatagctcaggattccgcgactttctgttgaagcccgagctgctgagggcaattgtcgactgtggctttgagcatccatccgaagtccagcacgagtgcataccgcaggcaattttgggaatggacgtgctatgccaggcgaagagcggaatgggcaaaaccgctgtgtttgtgctagctactttgcagcagcttgagcccgtgactgggcaggtgagtgttttagttatgtgccatactcgggagctagcatttcagatatccaaggaatatgaacgcttttcaaagtacatgcccaacgtgaaagttgccgtgttctttgggggcctgtccatcaaaaaagacgaggaggtgctgaaaaaaaactgtcctcacatcgtagttggaaccccagggcggatcttggccctcgcgcggaacaagtccttgaatctgaagcacattaagcacttcatcctggacgagtgcgacaagatgttggagcagctcgatatgaggcgagacgtgcaggaaatcttcaggatgaccccccatgagaagcaggtcatgatgttttcagctacgctgagcaaggaaattcgccccgtgtgcagaaaattcatgcaggatccaatggaaattttcgttgacgatgagacaaagctcacattacatggtctgcagcaatattacgtgaaactgaaagataacgaaaagaacaggaaattgttcgatttactggacgtactggaattcaaccagtag

SEQ ID NO: 231798 - DNA, 1278 bp, Artificial Sequence
  derived and/or modified sequence
atggccgagaacgacgtggacaacgagctgctggactacgaggacgacgaggtggagactgctgccggaggagacggcgccgaagctcccgctaagaaggatgtgaagggatcttacgtgtctatccactcctccggattccgggattttctgctcaagccggaattgctcagggccatcgtggactgcgggttcgaacacccttccgaggttcaacacgagtgcatcccgcaggcgatccttggtatggacgtcttgtgccaggccaagagcgggatgggcaaaacggcagtgttcgtgctggccaccctccagcagctggagcctgtgacaggccaggtcagtgtccttgtgatgtgccatacccgcgagttggcatttcagataagtaaggagtacgagcgattttctaagtatatgcccaacgtcaaggtggcagtctttttcggcggtttgagcattaagaaagacgaggaggtgctcaaaaagaattgtccacacatcgttgtggggacacccggacggatcctagccctcgctagaaataagtccctgaatctgaagcatattaagcactttatcctagacgagtgtgacaagatgcttgagcagctggacatgagaagggacgtccaggaaatcttccgcatgacacctcacgagaaacaggtcatgatgttttcagccacactgtccaaggagatcagacctgtatgtcgtaagtttatgcaggatcctatggagatcttcgtcgatgatgaaaccaaactgaccctacacgggctgcagcaatactatgtgaagttaaaggataatgaaaagaatagaaaactattcgacctcctggacgtcctggagttcaaccaggtagtaatttttgtcaagtccgtgcagagatgtatagcactggcacaactgctagtggagcaaaatttccccgctattgccatccaccggggcatgccccaggaggagcgcttaagcaggtatcagcaattcaaggactttcagagaagaatcctggttgctactaacctgttcgggagaggaatggacatcgagcgggtgaacatagccttcaactatgacatgccggaggacagtgatacctatctccaccggtgctacccgctgtctccttccaggtggccagaacaggccggcctggccccacgggcttggctgagtcacctctgccccatgcgcatgatgccgcgtagctccatgatgtgtcggatcgctttgcgcagcattttggtgtcctgtttaatgcgctag

SEQ ID NO: 231799 - DNA, 411 bp, Artificial Sequence
  derived and/or modified sequence
atgggcggcggccggcggccctacgacgtgttcttcagcaaggtgatggccgaaaacgatgtggacaacgaattgctggactacgaggatgacgaggtggagaccgccgctgggggcgacggagcagaggcacctgccaagaaggacgtgaaggggagttacgtgtctatacacagcagcggctttagggacttccttctcaagcctgaactgctgcgtgccatcgtggattgcggattcgagcatcccagtgaggtgcaacacgaatgtatcccccaggcaatcctcggaatggacgttctatgccaggctaagtctgggatgggaaagacagcggtttttgttctcgctacccttcagcagctggaacccgtgactggacaggtgtcggttctggtcatgtgccactag

SEQ ID NO: 231800 - DNA, 564 bp, Artificial Sequence
  derived and/or modified sequence
atgggcagcagccacatcggcggcctgagcatcaacgagcggcggtgttcagcttcactcggacttgttatggccgaaaacgacgttgataacgagctccttgactatgaggatgacgaggtagagacagctgcaggtggggatggcgctgaggcgccagcaaagaaagacgttaagggctcttatgtgtctatccacagctccggcttcagggatttcctgcttaaaccagagcttctcagagcaatcgtggattgcggattcgagcacccctctgaggtgcaacatgagtgcattccacaagctatcctgggcatggacgtcctgtgtcaggccaaatccggtatgggaaagaccgccgtatttgtcctagctacactccagcagctcgagcccgtgactgggcaggtgagtgtactcgtcatgtgccatactagggaactggcctttcagataagcaaagagtatgaaagatttagcaaatacatgcccaacgtgaaggtggccgtgtttttcggcggtctgagtattaaaaaagacgaggaggtccttaaaaagaattag

SEQ ID NO: 231801 - DNA, 399 bp, Artificial Sequence
  derived and/or modified sequence
atggccgagaacgacgtggacaacgagctgctggactacgaggacgatgaagttgagactgccgcagggggggacggggcagaagcccccgcaaaaaaagatgtgaagggctcatatgtgagcatacactcctccggattccgcgattttctactgaagcctgagcttttacgtgctatcgtggactgtggattcgagcacccctcggaggtccagcatgaatgcatcccccaggccattctggggatggatgtgctctgtcaggctaagtctggtatgggcaagacagctgtttttgtcctggccaccctgcagcaacttgaacccgtgactggacaagtctgtttctgcgacagccattttccacggggcgataacgaggaacttcatctaccctag

SEQ ID NO: 231802 - DNA, 870 bp, Artificial Sequence
  derived and/or modified sequence
atggccgagaacgacgtggacaacgagctgctggactacgaggacgatgaagtggaaacagccgctgggggagacggggcagaagctcctgctaaaaaggacgtgaagggatcatatgtgagcatacattcatctgggtttcgcgatttcctacttaaacctgaattgttgagggccatcgtcgactgcgggttcgagcacccttcagaagtgcagcacgaatgtataccccaagcaatcctgggaatggacgtgctctgtcaggccaaatccggaatggggaagacggccgtgttcgttctggccactctccaacagctagagccagtgacaggtcaggtgagcgttctggtgatgtgtcatacgcgtgagctggccttccagatctccaaggagtatgagcggttttccaaatacatgcccaatgtgaaggtggcagtattcttcggaggactgagtataaagaaggacgaggaagtcttaaagaaaaactgcccacacatcgtggttggaactcccggccgcattctggctcttgcacggaataagagtctcaacctgaagcatataaagcatttcattttggatgagtgtgacaaaatgctggagcagcttgacatgcgtcgggatgtgcaggaaatatttcggatgactccccacgagaaacaggttatgatgtttagcgctaccctttcgaaagagatacggccagtgtgcaggaagttcatgcaggatccaatggagatttttgtcgatgatgaaacaaaactgactctgcacggactccagcagtactatgtgaaactaaaagacaacgagaagaatagaaagttgtttgacctgttagacgtgctggaattcaaccagtag

SEQ ID NO: 231803 - DNA, 1287 bp, Artificial Sequence
  derived and/or modified sequence
atggccgagaacgacgtggacaacgagctgctggactacgaggacgacgaggtcgagaccgcagctgggggcgacggcgccgaggctcccgccaaaaaagacgttaagggtagctatgtgagcatccactccagcggcttcagggatttcctgctgaagccagaactgttgcgcgcaatcgtggattgcggatttgaacatcctagtgaagtgcagcacgagtgcataccccaggctatactcggaatggacgttctctgtcaggctaagagcggtatggggaagacggcagtctttgtgctggcgaccctgcaacagttagagccagtcacaggccaagtgtctgtgctggtgatgtgccacacaagagaactggccttccagatcagcaaagagtatgagaggttttccaaatacatgcccaatgttaaagtcgccgtgtttttcgggggactgagcattaagaaggatgaggaagtgctgaagaaaaactgtccacacatagtggtcggaacacctggaagaatattagcattggcaaggaataagagtctgaacctcaagcacataaaacactttatacttgacgaatgcgacaaaatgttagaacagcttgacatgcggcgcgatgtacaagagatattccggatgaccccccacgaaaagcaggtcatgatgttttcggctacactctctaaagagattcggccagtgtgtaggaagtttatgcaggaccctatggagatttttgttgatgacgagaccaagttgacactgcacggattgcagcaatactatgtgaagctgaaggataacgaaaagaaccggaagcttttcgaccttttggatgtcctggagttcaatcaggtggtcatcttcgtcaagtcagtgcaaagatgtatcgctcttgcacagctgttggtggagcagaatttcccagctatcgccatacatagggggatgccccaggaagagagactctccaggtatcaacagttcaaagacttccaaaggaggattctggtcgctaccaacctgttcggcagaggtatggacattgagagggttaatatcgcttttaattacgacatgccagaagacagcgacacgtaccttcatagagtggcacgggctggacgcttcggcactaaggggcttgctattactttcgttagtgatgaaaacgacgcaaagatcttaaacgatgtgcaagatcggttcgaggttaacatatccgagctgccagacgaaatcgatattagttcatacatagagcagaccagatag

SEQ ID NO: 231804 - DNA, 564 bp, Artificial Sequence
  derived and/or modified sequence
atgggcagcagccacatcggcggcctgagcatcaacgagcggcggtgcagcgcgtcgctgggtttggttatggcggagaatgatgtggacaacgaactgctggactacgaggacgacgaggttgagacagccgccggaggcgatggcgctgaggctccagcgaagaaagatgtcaagggctcgtacgtgtcaattcacagctccggattccgagacttcctgttgaagcctgaacttctcagggccatcgtggactgtggattcgagcacccttcggaagtgcagcacgaatgcattcctcaggctattctcggcatggatgtcctttgtcaggctaaatctgggatgggtaaaaccgcagtgtttgttctcgccacgcttcagcagctcgagccagtgactgggcaagtgtccgtgctagtcatgtgccatacaagggaactggcctttcagatatctaaggaatacgagcgcttctccaagtatatgcccaatgtcaaggtggccgtattcttcggtggcctctccattaaaaaggacgaggaagtcttgaaaaagaattag

SEQ ID NO: 231805 - DNA, 291 bp, Artificial Sequence
  derived and/or modified sequence
atggccgagaacgacgtggacaacgagctgctggactacgaggacgacgaagtggaaactgccgccgggggggacggtgctgaagctccagcaaaaaaggatgtaaagggttcttatgtgtctattcactcatccggatttagagatttccttctgaagccagagctactccgcgccatagtggattgcggcttcgaacatccaagcgaggtccagcatgagtgcatcccgcaggccattttaggaatggatgtactctgccaagctaaatcagggatgggaaaaacgtag

SEQ ID NO: 231806 - DNA, 564 bp, Artificial Sequence
  derived and/or modified sequence
atgggcagcagccacatcggcggcctgagcatcaacgagcggcggtgcagtgcctcactcggtctggtcatggccgagaacgacgtggataatgagctcttggattatgaggacgacgaggtcgaaactgcggcgggaggcgacggcgctgaggcgcccgcaaagaaagatgttaaaggctcctatgtttctatccattcgtcagggttccgtgacttcttgctaaagccagagctgttacgagcaattgtcgactgtgggttcgagcaccccagtgaagtgcagcacgaatgcattcctcaggccattctaggcatggatgtgttgtgtcaggcaaagtccggcatggggaaaaccgcagtatttgtcctcgccacgctccagcagttagagcctgttactggacaagttagtgtgctggtgatgtgccacacacgtgagctggctttccagatttcaaaggaatacgagcggttctcaaagtatatgcccaatgtgaaggttgccgttttcttcggtggactttctatcaagaaggatgaggaagtgcttaaaaaaaattag

SEQ ID NO: 231807 - DNA, 594 bp, Artificial Sequence
  derived and/or modified sequence
atggccgagaacgacgtggacaacgagctgctggactacgaggacgacgaagttgaaaccgccgcaggcggcgatggagctgaggcccctgcaaagaaggacgtgaaaggtagctatgtgtccatccacagtagcggctttcgggacttcctgcttaagcctgaactgctaagagccatcgtcgattgtggtttcgagcatccaagcgaagtccaacatgaatgcatcccccaggcaattctcgggatggacgtgctgtgccaggcgaaatccggaatgggtaagaccgctgtgtttgtgttggccactcttcaacaactcgaaccagttaccggccaggtatgtttttgtgattctcacttcccccggggagacaacgaggagctccacctgccatacgtttctgtttactttctgccaaaagtatctgttcttgtaatgtgtcacacacgcgagctcgcctttcagatctctaaagagtatgagcgattctccaagtatatgccaaacgtcaaggtggcagtgttctttggaggcttaagcatcaagaaggacgaggaagtattgaaaaagaattgtccacatatagtttag

SEQ ID NO: 231808 - DNA, 291 bp, Artificial Sequence
  derived and/or modified sequence
atggccgagaacgacgtggacaacgagctgctggactacgaggacgatgaagttgagacagccgccggaggagacggcgctgaagccccggcaaaaaaagacgtcaagggtagctatgtgtcgattcattctagtggttttagagatttcctgctgaaacccgagctcttacgcgccatagtcgactgtggcttcgagcatccgagcgaggtccaacatgagtgcattccacaagcaattcttggaatggacgtgctgtgccaagccaagtcagggatgggtaagacctag

SEQ ID NO: 231809 - DNA, 696 bp, Artificial Sequence
  derived and/or modified sequence
atggccgagaacgacgtggacaacgagctgctggactacgaggacgatgaggtggagaccgcagcaggcggggacggggcggaggctccagccaagaaagacgtaaaggggtcctatgtgtctattcactcctctggattccgcgacttcctcctgaagccagagctcctcagagctattgtcgactgcggttttgagcacccaagcgaagttcagcatgagtgtatcccacaggcaatcctggggatggacgtcctttgccaagccaaatcaggtatggggaagacagcggtgttcgtactcgctaccctccaacagcttgagcccgtaacaggacaggtaagcgttctcgtgatgtgccacacgagagaactcgcgtttcaaatttcaaaagagtacgaacgattctcaaaatacatgcccaacgtgaaggtagcggtttttttcgggggcttgtccattaaaaaagatgaagaggtgctgaagaaaaactgtccccacattgtagtaggcaccccagggagaatactcgccctggcgaggaacaagagcctcaatctcaaacacattaaacacttcatcttagacgagtgcgataagatgctggagcagttggacatgcggcgtgatgtacaggaaatttttcgtatgacccctcacgaaaagcaggtgatgatgttttccgccaccctgtag

SEQ ID NO: 231810 - DNA, 696 bp, Artificial Sequence
  derived and/or modified sequence
atggccgagaacgacgtggacaacgagctgctggactacgaggacgatgaggtggagacagccgcgggcggggatggagccgaagctcccgccaagaaggatgtgaaaggcagctacgtgagcatacactccagcggtttccgagattttctcctcaagcccgagctgttgagagccatcgtggattgtggattcgagcatccctcagaggttcaacacgagtgcatccctcaggcaatccttggaatggatgtgctgtgccaggcgaagagcggcatgggcaagacagcggttttcgtgctggccacgctacaacaactagagccagttacgggccaagtgtcagttcttgttatgtgccacacacgcgaacttgctttccagataagcaaggagtatgagcgcttcagtaagtacatgccaaacgtgaaggtggcagtgttcttcgggggactgagcatcaaaaaggatgaagaggtattgaagaaaaactgtccgcacattgtcgtgggcacaccagggcgcatcctggccctggcacgcaacaagtcgctcaacctgaaacacataaaacattttatcctggatgaatgcgataaaatgctggagcagctggatatgcgtagagatgtccaggagattttccggatgacaccacacgagaagcaagtgatgatgttttccgcgaccttgtag

SEQ ID NO: 231811 - DNA, 717 bp, Artificial Sequence
  derived and/or modified sequence
atggccgagaacgacgtggacaacgagctgctggactacgaggacgacgaagttgaaacagccgccgggggggatggcgccgaagcgcctgcaaagaaagacgtaaagggaagctacgtcagcattcatagttccggctttagagactttttactgaagccagagctgctcagagctatcgtagattgtggattcgagcacccctccgaggtgcagcacgagtgtatccctcaggccatactaggcatggatgtgctgtgtcaagcaaaaagcggaatgggaaagacagccgttttcgtccttgctaccctccagcagctggaacctgtcactggccaggtctctgtgctggtaatgtgtcatacgcgggaactcgcttttcagatcagcaaggaatacgaacgtttttccaaatacatgcctaacgtgaaggtggccgtgttttttggcggactgagtattaagaaggacgaagaggtgctgaagaagaattgcccgcacatcgtggtcggaactcccgggagaatactcgcacttgcaaggaacaaatctctcaatctgaagcacattaagcattttatactagacgagtgtgacaaaatgctcgaacaactagacatgcgcagggatgtgcaagaaattttcaggatgacaccgcacgagaaacaggtgatgatgttcagcgctacgctgtcaaaggaaataaggccagtctag

SEQ ID NO: 231812 - DNA, 1287 bp, Artificial Sequence
  derived and/or modified sequence
atggccgagaacgacgtggacaacgagctgctggactacgaggacgacgaggtggaaactgccgctggcggcgacggggccgaagcgccggctaagaaggatgtgaaaggctcctacgtttctattcattcttctggtttccgggacttcttgctcaaacccgagctcctccgagcaatagttgattgtggttttgaacacccctccgaggtccagcacgagtgtatcccacaggctattctcgggatggacgtgctctgccaggctaaaagcgggatgggtaagactgctgtctttgtcctggccacactgcagcagcttgagcccgtgacaggtcaggtgtccgtgcttgttatgtgtcacactagggagctggcgttccaaattagcaaagagtatgagaggtttagcaaatacatgcctaatgttaaagtcgccgttttcttcggaggcctgagtataaaaaaggacgaagaagtgttgaagaaaaattgtccccacatcgttgtggggactcccggcaggatactggctctcgccaggaataagtctctcaaccttaaacacatcaagcacttcatcctggatgaatgtgataagatgctggagcagttagacatgcgcagagacgtccaggagatcttccgaatgacaccccatgaaaaacaagtaatgatgttcagtgctaccctctccaaagaaattaggcctgtgtgtaggaagttcatgcaggatcccatggaaatctttgtcgatgacgaaacgaagttaacactgcatgggctgcaacagtattacgtgaaacttaaagacaacgagaaaaacagaaagctttttgatctcctggatgtactggagtttaaccaagtggtgatctttgttaagtcagttcagaggtgcattgccctcgcccagctgctagtcgagcaaaactttcccgctattgcaatccacagagggatgccccaggaggagaggctgtccagatatcagcagttcaaggacttccaaagacgcattctagtggccacaaatttattcgggagaggcatggatatcgagagggtaaacattgcctttaactacgacatgcccgaggattccgacacttacctccaccgtgtcgcccgtgccggacgattcggaaccaaaggcctcgcaattacattcgtgtccgacgaaaatgatgccaagattctgaacgacgtgcaggaccgcttcgaggtcaacatcagcgagcttcccgacgagattgacataagttcatatatcgagcagactaggtag

SEQ ID NO: 231813 - DNA, 564 bp, Artificial Sequence
  derived and/or modified sequence
tgaagcgaggagcgggacatcggcaagcccatggagatcttcgtggacgacgagacaaagcttaccttacacggtctccagcagtattatgtgaaacttaaagacaacgaaaaaaaccggaaactctttgatctcttggatgttctggagtttaatcaggtggtgattttcgtgaaatcagttcaaaggtgcatcgctttagcacagctgttggtggagcaaaatttccccgcaatcgccatccacagggggatgccccaggaggagaggctcagccggtatcagcagttcaaagatttccagaggcggatacttgtagctaccaacctctttgggcgaggcatggacatcgagcgggtcaatattgcctttaattatgacatgccagaggactcagacacctacctgcatagagtagcaagagctgggagatttggcacgaagggcctggctattacttttgtgtctgacgaaaacgacgccaagattctgaacgatgttcaggatcggttcgaggttaacatatcggaattacctgatgaaatagacattagttcctattag

SEQ ID NO: 231814 - DNA, 564 bp, Artificial Sequence
  derived and/or modified sequence
atgggcagcagccacatcggcggcctgagcatcaacgagcggcggtgctccgcttctctgggactggtaatggccgaaaatgatgtagataacgaacttttggattatgaagacgatgaagtggaaacagccgctggaggagatggggcagaggctccagccaaaaaagacgtcaagggaagctacgtgtccattcactctagtggtttcagagactttctgctcaaaccagaactactgcgggccattgtcgattgcggtttcgaacaccctagcgaagtccagcacgagtgtatcccacaggctattctaggtatggacgtactctgccaggcgaagtcggggatggggaagactgccgtgttcgtgcttgctaccctgcagcagctggagcctgtcaccggacaggtgagtgtgctcgtcatgtgccacacaagagaacttgcctttcagatctcaaaagagtacgagaggttttcgaagtatatgcctaacgtgaaagtggccgtcttttttgggggcctctccataaaaaaggatgaagaagtgcttaaaaagaactag

SEQ ID NO: 231815 - DNA, 717 bp, Artificial Sequence
  derived and/or modified sequence
atggccgagaacgacgtggacaacgagctgctggactacgaggacgacgaggttgagaccgccgcagggggtgacggcgcagaggcaccagcaaagaaggacgtgaagggctcatatgtgtccatacattcatctggtttccgggatttcctgctcaagcccgaactcctaagagccatagtcgactgtgggtttgaacacccttcggaggttcagcacgagtgcatcccacaggccatcctggggatggacgttctgtgccaggccaagtctggtatggggaagacagctgtttttgtcctcgctacactccagcaactcgaaccagtgaccggccaggtttctgtccttgtgatgtgccacacccgcgaactggcttttcagattagcaaagagtacgaaaggttctccaaatacatgccgaacgtcaaggtagcagttttttttgggggcctgagcattaaaaaggacgaagaagtgctaaagaagaactgcccccatatcgtggttggaactccaggcagaattctcgcccttgccagaaataagtccctgaatctgaaacacatcaaacacttcattttggatgaatgtgacaaaatgctggagcagctcgacatgcgaagagatgtgcaggaaattttccgcatgaccccacacgaaaaacaggtgatgatgtttagtgcaacactcagtaaggagattagaccagtttag

SEQ ID NO: 231816 - DNA, 738 bp, Artificial Sequence
  derived and/or modified sequence
atgtggaccatgagcagctggaccatgaagatgatgcggtggcggcagcagctaggcgagatgggcctcagaccgttgccacgaaggatgtccagggccccaatgagcccgagcaccgctctcgcttttgttacttcttgctcctcccaatcgtgctccggaccgctctccacagtagccctgtccattaggcaaaaagtggccgtattcttcggcggtctgagtatcaagaaagatgaggaggtgctgaagaaaaattgtccccacatcgtggtgggcactccagggcgaattttagccctggccaggaacaagagcttgaatcttaaacacattaaacactttattctggacgagtgtgataagatgctggagcagctagacatgcggagggatgtgcaggagatctttcggatgacccctcacgagaagcaagtgatgatgttcagcgctactctgtcaaaggaaatcaggccagtctgccggaagttcatgcaagatccaatggaaatctttgtagatgatgaaacaaagctcacccttcacggcttacagcagtattatgttaagctgaaggacaacgagaaaaatagaaagctgttcgacctgctcgacgtactcgagtttaaccaggttgttattttcgtcaagtctgtccagcggtgtatagcactagcccagctactagtggaacagaacttccctgcgatagccattcatcggggaatgccccaatag

SEQ ID NO: 231817 - DNA, 1278 bp, Artificial Sequence
  derived and/or modified sequence
atggccgagaacgacgtggacaacgagctgctggactacgaggacgatgaggtggagactgctgcgggcggtgacggcgctgaggcacccgcaaagaaagatgtcaaggggtcctacgtgtccattcatagctccggtttcagagacttcttgcttaagccagaactgctgagggccatagtcgattgcggttttgagcatccatccgaggttcaacatgagtgcataccccaggctatcctcgggatggacgtattgtgccaagcaaagtccgggatgggtaaaactgctgtattcgttctggcaacactgcagcagttggagcccgtcaccggacaggtatccgtcctagttatgtgtcacaccagagaactagccttccagataagtaaggagtatgagcggttctccaagtatatgcctaatgtgaaggtggcagtgttttttgggggtcttagcatcaagaaggatgaggaagtgctgaagaagaactgtccccacatagtggtggggacaccgggtagaatcctggcactagccagaaacaaatctctgaacctgaaacatatcaaacatttcatccttgatgaatgtgacaagatgttagagcagcttgatatgagaagagatgttcaggaaattttcaggatgacaccccatgagaagcaggtgatgatgttctccgctacactgagcaaggagattcggccagtgtgtcgaaagtttatgcaggaccctatggagatctttgtagatgacgaaacaaagctgactctgcacgggctgcaacaatattacgttaagctcaaggacaacgaaaagaatagaaagctgtttgacctgctcgatgtcctggaattcaatcaggttgtgatattcgtcaaatcggtacagcgctgcatagcactcgctcaacttcttgtcgaacagaatttccctgccatagcaatccatagagggatgcctcaggaggagcggctttcccgataccaacagtttaaagacttccagcgcagaatcttagtggccaccaacctctttgggaggggcatggacatcgagagagtgaacatcgccttcaattacgacatgcccgaggatagcgacacttacctgcataggtgttacccgctctcaccctcgcggtggcctgagcaggccggtcttgcccccagagcatggctctctcacctgtgtcctatgcgaatgatgccccgttccagtatgatgtgccgcatcgcactgcgctcgattctggttagctgcttaatgaggtag

SEQ ID NO: 231818 - DNA, 711 bp, Artificial Sequence
  derived and/or modified sequence
atggccgagaacgacgtggacaacgagctgctggactacgaggacgatgaggtcgaaacagccgctggcggagacggtgccgaggcccctgccaagaaggatgtgaaggggtcctacgtctcaatacattcctctggctttagagacttccttttgaaaccggaacttctgagggccatcgtggactgcggattcgagcaccccagtgaggtgcagcacgagtgcataccacaagcaatactcgggatggacgtgctgtgccaggcgaaatcaggcatgggtaaaacggcagtctttgtgttggctaccctgcaacagttggagcccgtaactggccaggtctctgtgctcgtgatgtgtcacactagggaactagctttccagatatccaaggaatatgagagattttctaagtacatgcccaatgtgaaagtggcagtcttcttcggcggtctaagcatcaagaaagacgaggaagtactgaaaaagaactgtccccatatcgttgtcggcactccgggaagaattttggccctggcccgaaacaagtccttgaacctgaaacacatcaaacactttatcctggacgaatgtgacaaaatgctggagcagcttgacatgcggcgtgatgtacaggagatctttcggatgactccacatgagaagcaagtgatgatgtttagcgcgacactgagtaaagagattcgctag

SEQ ID NO: 231819 - DNA, 738 bp, Artificial Sequence
  derived and/or modified sequence
atgtggaccatgagcagctggaccatgaagatgatgcggtggcggcagcagcttggtgaaatggggctgcggccgctaccaagacgaatgtctcgggccccgatgagtcccagcacagccctcgcatttgtcacctcatgctcttctcagagttgctctggcccactgtcgactgtagccttaagcattcgccagaaagttgccgtgtttttcgggggcctctccatcaagaaagacgaggaagtcctcaagaagaattgcccccatatagtcgttggaactccaggccggatcctcgcactggcaaggaacaagtctctgaatttaaaacatataaaacactttatactggacgagtgcgataaaatgcttgaacagctggatatgaggcgcgacgtgcaagagatatttcgaatgaccccgcacgagaagcaagtgatgatgtttagcgctaccctatctaaagaaatccggcccgtctgccggaagttcatgcaggacccgatggaaatcttcgtcgacgatgagaccaagctcacattgcacgggttacagcagtattatgtgaagcttaaggacaacgagaaaaacaggaagttgttcgacttgttagacgtgctggaattcaaccaggtggtgatatttgtcaagtcggttcagaggtgtattgccctcgcccaacttcttgtggagcagaacttccctgctattgccattcatcggggcatgccacagtag

SEQ ID NO: 231820 - DNA, 1287 bp, Artificial Sequence
  derived and/or modified sequence
atggccgagaacgacgtggacaacgagctgctggactacgaggacgacgaggtggaaactgccgccggcggagatggtgcagaagctcctgccaagaaggatgtcaagggaagctatgttagtatccattcaagcggcttcagagactttctgctaaaacctgagttacttcgggcaatcgtagattgcggctttgaacatcctagcgaagttcaacacgagtgcatcccccaggcaattttaggaatggatgtgctctgtcaggctaaaagcgggatggggaagactgcggtttttgtgctggcgaccctccaacaactggagccagtgacagggcaagtttctgtcctggtaatgtgtcacacacgagaactggcatttcagattagcaaagagtacgagcgcttcagcaagtacatgcctaatgtaaaggtggctgtgtttttcggtggcttatcaatcaagaaggatgaagaagtgctcaagaaaaattgcccacacattgtcgtgggtacgcccggcagaattctcgctctggcccgcaataagtccctgaatttgaagcatatcaaacatttcatattggacgaatgtgataaaatgctggaacaactggatatgagacgtgatgtgcaggaaatattccgaatgacacctcacgagaaacaggtcatgatgtttagcgctacgctcagcaaagaaataagacctgtgtgcaggaaatttatgcaggatccaatggagatctttgtggacgatgagacgaagcttaccctgcacggacttcagcaatactacgtaaagttgaaggacaatgaaaagaaccgcaagctattcgatctcctggatgtcctggagttcaatcaggtggtcatattcgtgaagtcagtgcaacgctgcatcgcactggcccagttgctagtcgaacagaattttcctgcaatcgctattcatagaggaatgccccaggaagaacggttgtcaagataccagcagtttaaagactttcagagacgcatcctcgtcgctacgaatctctttggtaggggcatggacatagagagggttaatatagcctttaattatgacatgcctgaggattccgatacttacctccatagggttgctcgcgcaggtaggtttggtacgaaggggctcgctataacattcgtttccgatgagaatgacgccaaaattctgaatgacgtacaggaccgctttgaggtaaacatcagtgaactccccgatgaaattgacatttcctcttatatcgaacagacaaggtag

SEQ ID NO: 231821 - DNA, 411 bp, Artificial Sequence
  derived and/or modified sequence
atgggcggcggccggcggccctacgacgtgttcttcagcaaggtgatggccgagaatgacgtcgacaacgaactgctggactatgaggacgacgaggtcgagaccgcggcaggcggcgacggcgccgaagctccggccaaaaaggatgtgaaggggtcatacgtcagcattcactccagtggctttagggacttcttactgaagcccgagctgctgcgcgcgatcgtggattgtggttttgaacatccaagtgaggtccaacacgaatgtatccctcaggcaatcctgggcatggatgtcctgtgccaggctaaatccggaatgggcaagactgccgtgtttgtcctggccaccctgcagcagttggaacccgttacaggtcaggtgtccgtgctggtaatgtgccattag

SEQ ID NO: 231822 - DNA, 987 bp, Artificial Sequence
  derived and/or modified sequence
tgagccaccctgcagcagctggagcccgtgaccggccaggtgagcgtactggtgatgtgtcacactagggaactggcattccagatctctaaggaatatgagcgcttctctaagtacatgcctaatgtcaaggtagctgttttttttggaggtctgtctattaaaaaagatgaagaagtactgaagaagaactgcccgcacattgttgtcgggacccccggaaggatcctcgcactggccaggaacaaaagcctcaatctgaaacacattaagcatttcatcttggatgagtgtgacaagatgttggagcaactggatatgaggcgggatgtgcaggagatttttcgcatgacccctcacgagaaacaggttatgatgttcagcgctaccctctctaaggaaatcaggccggtttgcaggaagttcatgcaggatccaatggagatttttgtggacgacgagaccaagctaacacttcatggactccagcagtactacgtgaagctcaaggataatgagaaaaatcggaagctcttcgacttgttggatgtgctagagtttaaccaggtggttatcttcgtgaagagcgtacaacggtgcatcgcattggctcagcttctggtcgagcagaattttcctgctattgctatccaccgaggaatgcctcaggaagaacgtctgagtcggtaccagcaatttaaggacttccagcggcgtattttagttgcgaccaatctgtttggtagaggaatggatatcgaaagagtgaatatcgccttcaattacgatatgcctgaagactcagacacttacctccacagagtggcaagggcaggacggttcgggaccaaagggctggcgatcacttttgtctcggacgaaaatgatgctaaaattttgaacgatgttcaggacagattcgaggtgaatatttcggagctcccagacgagatcgacatctcatcctatatagagcagacccgctag

SEQ ID NO: 231823 - DNA, 399 bp, Artificial Sequence
  derived and/or modified sequence
atggccgagaacgacgtggacaacgagctgctggactacgaggacgacgaggtagaaactgcagctggcggcgacggagcggaagcccctgccaaaaaagatgtcaaaggtagttatgtaagtattcactctagcggctttcgcgactttctcctcaagcctgaattactgagagccatagttgactgcggcttcgagcaccccagtgaagtccagcatgaatgcatcccgcaagccattttgggcatggatgtgctatgtcaggcaaagagcggtatgggaaagaccgctgtatttgtcctggcgacactgcagcagctggagcccgtgaccggccaagtctgcttttgcgatagtcatttccctcggggtgataacgaagagttacacctaccatag

SEQ ID NO: 231824 - DNA, 420 bp, Artificial Sequence
  derived and/or modified sequence
atggccgagaacgacgtggacaacgagctgctggactacgaggacgatgaagtggagactgctgccggtggggatggcgcagaagctccggccaaaaaggacgtgaaggggtcatacgtctcaattcacagttctggcttccgggacttcctgctaaagccggagcttttaagggctattgtggattgcggatttgagcaccccagtgaggtgcagcatgaatgtattcctcaggccatcttaggcatggacgttttatgtcaggccaagagcggcatgggaaagactgctgtatttgttctggcgactctccagcagttggagcccgtgacaggacagtcgcacgagcacatgacaagcgttacattagacaacttgaccgctgtgggcgatgtgctgtcccaagcatgggggagctag

SEQ ID NO: 231825 - DNA, 717 bp, Artificial Sequence
  derived and/or modified sequence
atggccgagaacgacgtggacaacgagctgctggactacgaggacgatgaggttgagaccgccgctggtggggacggagccgaagcccccgcgaagaaggatgtgaaaggaagttacgtttccatccactcatccggcttccgtgatttcctactgaagcctgagctgcttagggcgatagtggactgcggttttgagcacccatccgaggtccagcacgagtgcataccccaagctatccttggcatggatgtactctgtcaggccaagtcggggatgggaaagactgccgtgtttgtgctagcaacacttcaacagttagagccagtgactggtcaggtgagcgtgctagttatgtgccatacgcgcgaactggcattccagatatccaaagaatatgaacgatttagcaaatacatgccaaatgtcaaagtagctgtattcttcggaggcctcagcatcaagaaggatgaggaagtgctcaaaaaaaactgcccccacattgtcgtgggaacccctggcaggattctggcactcgctaggaacaagtcactgaacctgaaacacatcaaacacttcatactcgacgagtgtgataaaatgttggaacagttggacatgcgaagggatgtgcaggagatttttagaatgactccgcatgagaagcaagtgatgatgttctctgctaccctatccaaagagatccgccctgtgtag

SEQ ID NO: 231826 - DNA, 564 bp, Artificial Sequence
  derived and/or modified sequence
atgggcagcagccacatcggcggcctgagcatcaacgagcggcggcgatcagcttcactgggccttgtgatggcagagaacgacgtcgataacgagctgctggactacgaagatgacgaggtagagacggcagcgggtggcgacggggctgaagcacccgctaagaaagatgtgaagggatcttacgtatcaatccatagcagcggtttcagagacttccttcttaagcccgaactgctgcgggcaattgtggactgcggttttgaacacccttccgaagttcaacatgagtgtataccacaagctattctgggcatggacgttttgtgccaagccaagtcgggaatggggaaaacggctgtctttgtgctggctacgctgcagcaacttgaacccgtgactggccaagtgtccgtcctggtgatgtgccacactcgggagctggcattccaaatttcaaaggagtatgaacgctttagcaaatatatgccaaatgtcaaggtagccgtatttttcggtggtctgagcataaagaaagatgaggaagttctcaagaaaaattag

SEQ ID NO: 231827 - DNA, 711 bp, Artificial Sequence
  derived and/or modified sequence
atggccgagaacgacgtggacaacgagctgctggactacgaggacgacgaggtcgagaccgccgcgggcggagatggggccgaggctcctgcaaaaaaggacgtaaaagggtcatacgtaagcattcatagctctggctttagggacttcctattgaaaccggagctgctgagggctatagttgactgcgggtttgagcatccctccgaggtgcagcacgagtgtattccacaggcgatcttaggtatggatgtgttgtgtcaggcgaagagcggcatgggaaagaccgccgtcttcgtgctggcgacacttcaacaacttgagccagtgacaggccaggtctcggtcctcgtcatgtgtcacacgcgcgagttggcttttcagatttcaaaagaatacgagcgtttctccaagtatatgccaaacgtgaaagtggccgtattttttgggggactgtcgattaaaaaggatgaagaagtgctcaaaaagaactgcccccatatcgtggtcggtacccccgggaggatactggcgctggcgcgcaacaagagtcttaatcttaagcatatcaaacatttcatactggacgaatgcgacaaaatgctggaacagctcgatatgcggcgggacgtccaagagatctttcgcatgacacctcatgagaagcaggtaatgatgttctccgctactctgtctaaggagatcaggtag

SEQ ID NO: 231828 - DNA, 1278 bp, Artificial Sequence
  derived and/or modified sequence
atggccgagaacgacgtggacaacgagctgctggactacgaggacgacgaagtggagactgcagctggcggtgatggtgcagaagcccccgccaagaaagatgtcaaagggtcatatgtgtccatccactccagcggtttccgggactttctgctgaagccagagctgctccgcgccatcgtggactgcggcttcgagcatccaagtgaagtccagcacgaatgcatcccacaggccatcctgggtatggacgtgctctgtcaggcgaaatcaggtatgggaaaaacagccgtgttcgtgctggccacattgcagcagctggagcccgtgaccggccaggtgtctgttcttgtcatgtgtcatacacgagaacttgctttccaaattagcaaagaatacgaacgtttctccaagtatatgcccaatgttaaggtcgcggtgttctttggcggcctctctattaagaaggatgaggaggtgctcaaaaagaactgtccacatatcgtggtcggcacccctggcaggatactggccttagccagaaacaaatccctgaacctgaagcacatcaagcacttcattctagatgagtgcgacaagatgctggaacaactcgatatgagaagagacgtgcaggagattttcagaatgaccccccacgaaaagcaggtgatgatgttctccgccactctgagcaaggagatccgccccgtttgccgcaaattcatgcaagatcctatggagatttttgttgatgatgaaacaaagctgaccctccatggattgcagcaatattatgttaagctgaaagataatgaaaaaaatcgcaaactgttcgacctcctcgacgtcctggaatttaaccaggttgtaattttcgtgaagagcgtgcagaggtgcatcgctttagcccaactgctcgtcgaacagaacttccctgctattgcaatacacaggggaatgccacaggaggagcggctcagtcgctaccagcagttcaaagattttcagcgtcgaatccttgttgccacaaatcttttcggcagaggcatggatatagaaagggtgaacatcgcgttcaactatgacatgccagaggattcggacacgtacttacataggtgctatccactgtctccttctcggtggcctgaacaggctggactggctcccagagcctggctcagccatctgtgtcccatgaggatgatgcctaggtccagcatgatgtgcaggatagctttgagaagcatcctcgtgagctgccttatgcggtag

SEQ ID NO: 231829 - DNA, 696 bp, Artificial Sequence
  derived and/or modified sequence
atggccgagaacgacgtggacaacgagctgctggactacgaggacgatgaggttgagaccgctgccggcggtgacggggctgaggcccccgcaaagaaggatgtgaaaggttcttatgtatcgatccactcttcaggttttagagatttccttctaaaacctgaactgctccgtgctatcgtggactgtggattcgagcatccgtcggaagtacagcacgagtgtattccacaggcaatactgggaatggacgttctttgtcaggccaagagcggcatgggcaaaacagccgttttcgtgttagccaccttacagcaattagagccagtcaccggccaagtgtcagtactcgtgatgtgccacacccgagaacttgccttccagatttccaaggaatacgagaggttttctaaatacatgcctaacgtgaaagtggccgtattttttggtggactgagtatcaaaaaggatgaggaagtactcaagaagaactgcccacacatcgttgtcggtacgcccggcagaattcttgccctggcgagaaataaaagcctaaatctgaaacacataaagcattttatcctcgacgaatgtgataagatgctcgaacagctcgacatgcggcgggatgttcaggaaatctttagaatgactccccacgagaagcaggtaatgatgttctctgcaactctgtag

SEQ ID NO: 231830 - DNA, 399 bp, Artificial Sequence
  derived and/or modified sequence
atggccgagaacgacgtggacaacgagctgctggactacgaggacgacgaagtggaaaccgctgccggaggggatggagcagaggctcctgctaagaaggacgttaaggggtcctacgttagtatccactcctccggcttccgcgacttcctgttaaagcctgagctgctgagagctatcgtggattgcggatttgagcacccctcagaggtccaacatgaatgcatcccgcaggcaatcttaggcatggatgtcctttgtcaggcgaaatctgggatgggtaagactgccgtgttcgtgctggctaccctgcagcagctggaacctgtgacaggccaggtctgcttctgcgattctcatttcccacgtggcgacaatgaagaattgcatcttccctag

SEQ ID NO: 231831 - DNA, 399 bp, Artificial Sequence
  derived and/or modified sequence
atggccgagaacgacgtggacaacgagctgctggactacgaggacgatgaagtagagaccgccgcggggggagacggtgccgaggccccggctaaaaaagacgtgaagggaagttacgtgtccatccattcgtcaggattcagggacttcctgctcaaaccagaactgttgagggctatcgtggattgtggtttcgaacacccctcggaagtgcagcatgaatgcatcccccaggccattctgggcatggatgtcctatgtcaggctaagtcaggaatgggcaaaacggcagtatttgtgcttgctacacttcagcaactcgagccagttactgggcaggtgtgcttctgcgattcccatttccctcgcggcgataacgaagagcttcacttgccatag

SEQ ID NO: 231832 - DNA, 738 bp, Artificial Sequence
  derived and/or modified sequence
atgtggaccatgagcagctggaccatgaagatgatgcggtggcggcagcagctgggtgagatgggattgagacctctccctaggcggatgtcacgtgcaccaatgtctccctcaacagctctggcgttcgtgacttcatgttcatctcagagctgcagtgggccccttagcacggtggctctctccattcgccagaaggtggccgtgttcttcggcggcctcagcatcaagaaggatgaggaggtgctgaagaagaactgccctcacattgtggtgggcacccccggcagaatcctcgccctggcacgaaacaaaagcttgaatttaaaacacattaaacacttcatcctcgatgagtgcgacaaaatgctcgaacaattagacatgcggagagacgtgcaggagatctttcgcatgactccacacgagaagcaggtgatgatgtttagcgcgactcttagcaaggagattcgacctgtgtgcagaaagttcatgcaagatcctatggaaatttttgtggacgacgaaacgaagctgacgctccacgggctccagcaatattacgtaaagttgaaggacaacgaaaagaaccggaaactcttcgacctgctggacgtcctcgaatttaaccaggtcgtcatttttgtcaaaagcgttcagcgctgtatcgccctggcacaactccttgtcgagcaaaattttcctgccatcgccattcataggggaatgccacagtag

SEQ ID NO: 231833 - DNA, 696 bp, Artificial Sequence
  derived and/or modified sequence
atggccgagaacgacgtggacaacgagctgctggactacgaggacgacgaggtggaaaccgcagccggaggggacggggcagaagcaccagccaaaaaagatgtgaagggaagctatgtttctatacattcctcaggtttcagagacttcctcctcaagcccgagctgctgcgggccatcgtggattgcggattcgaacatccaagtgaagtgcaacacgaatgtatcccacaggctatcctcggcatggacgtgctgtgccaggccaaaagtggcatgggcaaaaccgcagtgttcgtgctggcaacactccagcaactcgaaccagtgacgggacaggtctcggttttagtgatgtgccacactagggagttagcatttcagatcagtaaagagtacgagaggttttctaagtacatgcccaacgtcaaggtggcagtctttttcggcggactatccatcaagaaggacgaggaagtattaaagaaaaactgcccacatattgttgtggggacccctggccgcatcctggctcttgcccgaaacaagtctctgaatctgaaacacattaaacatttcatcctggacgaatgtgataaaatgttagagcagctggatatgagacgcgatgtccaggagatcttccgcatgaccccccatgaaaagcaggttatgatgttttcggctacactgtag

SEQ ID NO: 231834 - DNA, 732 bp, Artificial Sequence
  derived and/or modified sequence
atgtggaccatgagcagctggaccatgaagatgatgcggtggcggcagcagctcggcgagatgggcctaagacctctgcctaggaggatgtcgcgcgctcccatgtcaccaagcacggctctggccttcgttacatcttgttcctcacagagctgttctggaccactgagcactgtagccctgtctatccgacagaaggtctcagttctcgtgatgtgccacaccagagaacttgcattccaaatatccaaggagtacgaacggttttcaaaatacatgcccaacgttaaggtggcggtcttttttggtgggctcagtattaaaaaagatgaggaagtcctgaaaaaaaattgcccccacatagtggtcggcacacccggccgcattctggcgttggccaggaacaaaagcttgaatctgaagcacataaagcactttattcttgacgagtgcgacaagatgctggaacagctcgacatgagacgggatgtgcaggagatcttccgaatgacaccccacgaaaagcaggttatgatgttttccgctactctgtcaaaggagatacggcctgtctgtcgcaagttcatgcaggatgtgaacaccctgctcccctctctgcctcctctcccagccaggtgccttctacctttcctagcgctcttcttacggcttccctgtcactccagcgctaagaaagccgcatgcgctcaactaggagtcatgactccgtag

SEQ ID NO: 231835 - DNA, 1287 bp, Artificial Sequence
  derived and/or modified sequence
atggccgagaacgacgtggacaacgagctgctggactacgaggacgatgaagtggaaactgcagctggaggagatggcgccgaggcccccgcaaagaaagacgtgaagggtagctacgtttcaatccatagcagcggttttagggactttctgctgaaaccggaactactacgagccattgttgattgcgggttcgaacatccctctgaagtgcagcacgagtgcataccgcaggcgattctcggaatggatgttctgtgtcaggccaagagtgggatggggaagacagctgtcttcgtgctggccacgctgcagcagctcgagccggttacaggtcaggtgtcagttttggttatgtgtcataccagggagctggccttccagatctccaaagagtacgaaagattctcaaagtacatgcctaacgtaaaagttgctgtttttttcggcggcctctcaatcaagaaggatgaggaagtcttgaagaagaattgtcctcacatcgtcgtcggcaccccaggccggattctggcactagcacgcaataagtcactaaacctgaagcatatcaagcactttatcctcgacgagtgcgataaaatgctcgagcagttagacatgcggagagacgtccaggagatctttcgtatgacaccccacgaaaagcaggtgatgatgttttccgcaaccctcagtaaggagataagacccgtgtgtagaaagtttatgcaggatcccatggaaatcttcgtagatgatgaaactaaattgaccctacacgggctgcagcaatattatgtcaagttgaaagataatgagaagaatagaaagctcttcgacctccttgacgtcctcgaatttaatcaggtcgttattttcgtgaaatccgtacagagatgcattgcgctggcacagttactcgtggagcagaattttcctgcaatcgcaatccaccgaggtatgccacaggaggaacggcttagtaggtaccaacagtttaaggacttccagcgccgaatcctggtcgccacgaatctctttggccgcggcatggatatcgagcgcgtgaacatagcatttaactacgacatgcccgaagatagtgatacttatctccatcgcgtggcccgggccggacgcttcgggaccaagggacttgctatcacatttgtgagtgacgagaacgatgccaagattctgaacgatgtccaggataggtttgaggtcaatatttctgaacttccagacgagattgacatcagctcgtacatcgagcaaactaggtag

SEQ ID NO: 231836 - DNA, 1278 bp, Artificial Sequence
  derived and/or modified sequence
atggccgagaacgacgtggacaacgagctgctggactacgaggacgacgaagtggaaaccgccgctggtggggatggggccgaggccccggcaaaaaaagacgtgaagggcagttacgtgagcattcactctagcgggttcagggactttctccttaagccagaattactgcgtgcaatcgtggactgcgggtttgaacatccttccgaagtacagcacgagtgcattccacaagccatactgggtatggacgtcttgtgtcaggccaagtctgggatggggaagacagccgtgttcgtgttggcaactctgcaacagctggagccagtgacgggtcaggtgagtgtactcgtcatgtgccacacccgcgaactggcgttccaaataagcaaggaatacgagaggtttagtaaatacatgcctaacgtgaaggtcgccgtctttttcgggggtctttccatcaaaaaggacgaagaagtgcttaaaaagaactgtccccatatcgtggtggggacaccagggcggattctagcgctcgctcgaaataagagccttaatcttaaacatattaagcactttattttagatgaatgtgacaagatgttggaacagctggacatgaggcgagatgttcaagagatttttagaatgactcctcacgaaaagcaagtgatgatgttctccgcaaccctcagcaaggaaattagacctgtttgtaggaagtttatgcaagacccaatggaaattttcgtggacgatgaaactaagctgaccctgcatgggctacagcaatattatgtcaagttgaaggacaacgaaaagaataggaaactcttcgacctcctggacgtgctcgaattcaatcaagtcgtgatctttgttaaaagcgtgcagcggtgcatcgccctagcccaattactggttgagcagaacttcccagccattgccattcatcgtgggatgccacaggaggagagattaagccgataccaacagttcaaggatttccagcggcgcatcctcgtcgctacaaacctgttcggtagggggatggatattgagcgggtcaacatcgccttcaattacgatatgccagaagattcggatacatacttgcataggtgttaccccctttcaccttcccggtggccggagcaggccgggcttgcgccacgcgcctggctgagccatctgtgtcccatgaggatgatgccaagatcttctatgatgtgccggattgctctgagaagtatcctcgtctcctgtttaatgaggtag

SEQ ID NO: 231837 - DNA, 291 bp, Artificial Sequence
  derived and/or modified sequence
atggccgagaacgacgtggacaacgagctgctggactacgaggacgacgaagtggagaccgcagcagggggggatggggccgaagctcctgctaagaaagatgttaaggggagctatgtgagcattcattcaagtggtttcagggactttctgttgaaacccgagttactgcgtgctattgtagactgtggattcgaacacccttctgaagtccagcacgagtgcattccacaggccattctgggaatggatgttctatgccaggccaagtctgggatgggtaagacttag

SEQ ID NO: 231838 - DNA, 411 bp, Artificial Sequence
  derived and/or modified sequence
atgggcggcggccggcggccctacgacgtgttcttcagcaaggtgatggctgagaatgatgtcgacaacgaacttctcgattatgaagatgatgaggtggagaccgctgcaggcggcgatggcgctgaggctcccgccaaaaaagatgtgaagggcagttacgtctcaatccattccagtggcttccgggatttcttactaaagcctgaacttctcagggccatcgtggactgcggatttgagcatcccagcgaagtgcagcacgaatgtataccacaagccatactgggtatggatgtcttgtgccaggcaaagagtggtatggggaagaccgccgtgttcgtgctagctaccttacagcaactcgaacccgtcacaggccaagtgtccgtattagtgatgtgccattag

SEQ ID NO: 231839 - DNA, 564 bp, Artificial Sequence
  derived and/or modified sequence
tgaagcgaggagcgggacatcggcaagcccatggagatcttcgtggatgacgaaaccaagcttaccctgcatggcctccagcagtactacgttaaactcaaggacaatgagaaaaacaggaaactattcgacctgttagatgtcctggagttcaatcaggttgtgatcttcgttaagagtgtccagagatgcattgcactggctcaactgctggtggaacagaatttccccgccatcgctatccataggggcatgccgcaggaggagcgattatctcgttatcagcagttcaaggatttccagcggcgaattctggtggcaactaacctgttcggtcggggcatggacatcgagagggtcaatatcgcttttaactacgatatgcctgaggattcagatacatatcttcaccgggtggcgcgcgctggcaggttcggcactaagggcttggccatcacctttgtgtcagacgagaacgacgcgaaaatcctgaatgacgtgcaggacagattcgaagttaacatcagcgagctaccagacgagatcgacatcagctcttactag

SEQ ID NO: 231840 - DNA, 717 bp, Artificial Sequence
  derived and/or modified sequence
atggccgagaacgacgtggacaacgagctgctggactacgaggacgacgaagtggagactgccgccggaggcgacggagctgaagctccagcaaagaaggatgtgaagggatcctatgtttccatacattcatctggttttagagatttcctgctgaagcccgaattgctccgggcgattgtggattgtggcttcgaacaccccagcgaagtgcagcacgagtgtatcccacaggccattctcggaatggatgtgctttgccaggcaaagtccggtatggggaaaacggccgtttttgtgcttgcgacactccagcagcttgagcccgtgacgggacaagtgtccgtgctggtgatgtgccacacacgtgagctggcctttcagataagtaaggagtacgaaagattttcgaagtacatgcccaatgtgaaggtcgctgtcttcttcggcgggttgtccattaagaaagacgaggaagttcttaagaagaattgcccccacatagtagtaggcaccccaggaagaatcctggctttagcccggaacaaaagtcttaatctaaagcatattaagcactttatcttggatgaatgcgacaaaatgctggaacagttggatatgcgaagagatgtgcaggagatctttaggatgacaccacacgagaaacaggttatgatgtttagtgccaccctgtccaaggagataagacctgtgtag

SEQ ID NO: 231841 - DNA, 417 bp, Artificial Sequence
  derived and/or modified sequence
tgagccaccctgcagcagctggagcccgtgaccggccaggtgagcgtcctcgtgatgtgtcacactcgagaactggcctttcaaatctctaaggaatacgaacgtttctctaagtacatgccaaatgtaaaggtggctgttttctttgggggactgagtataaaaaaggatgaggaagtgttgaagaagaattgtccacatattgtggtggggactcccggccggatcctggccttggctaggaacaagtcgttgaacctgaaacacataaaacactttatcctggatgagtgcgacaagatgctcgaacagctggacatgcgacgggatgtccaggaaatctttcggatgacaccccatgagaagcaagtcatgatgtttagcgctacgttgtcaaaggagattaggccggtctag

SEQ ID NO: 231842 - DNA, 870 bp, Artificial Sequence
  derived and/or modified sequence
atggccgagaacgacgtggacaacgagctgctggactacgaggacgacgaggtggaaactgctgccggaggcgatggcgccgaagctcctgcgaaaaaggacgtgaaaggcagctacgtatctatccacagttctggctttagggacttccttcttaaacccgagctgctgcgggccatcgtggattgtgggtttgagcatcccagtgaggttcagcatgagtgcataccacaggccatactgggaatggatgtgctgtgccaagcaaagtctgggatgggcaagaccgccgtttttgtcctggcgaccctccagcagctggagcctgtgacgggacaagtatccgttctggtcatgtgtcatacccgagaactcgctttccagatttctaaggaatatgagcgatttagcaagtacatgcctaatgttaaggtagctgtcttttttggagggctttcaatcaagaaggatgaggaagtcctgaaaaagaattgcccacacattgtagttggaacacctggccggatcttagcactagcgcggaacaagagtcttaacctaaagcatatcaaacatttcatactggacgagtgcgataagatgttggagcagcttgatatgagaagagatgtccaagaaatctttagaatgacaccgcatgaaaagcaggtcatgatgttctcggcaaccctctctaaggaaatcagacccgtctgcagaaaattcatgcaggaccccatggagattttcgtcgacgatgaaacgaaactcactctgcacggtctccagcagtattatgtgaaactgaaagataacgaaaaaaaccgaaagttgttcgacctgctggacgtcctggagttcaaccaatag

SEQ ID NO: 231843 - DNA, 1287 bp, Artificial Sequence
  derived and/or modified sequence
atggccgagaacgacgtggacaacgagctgctggactacgaggacgatgaagtcgagacagccgctggaggggatggggcggaggcgccagccaagaaggacgttaaaggttcgtacgtgtctatccacagcagtggatttcgtgatttcctccttaaaccagagctgctgagggcaatcgtggactgcggtttcgagcacccttctgaagtgcagcatgaatgtatcccgcaggccatcctcggtatggatgtcctttgccaagcgaaaagcggtatgggcaagaccgccgtgtttgtccttgccacactccaacagctcgagcctgttacaggacaggtaagtgttctcgttatgtgtcacacgcgggagttggcattccagatcagcaaggagtatgaaagattttccaaatacatgcccaacgttaaggtggccgtgttcttcggaggcctgagtattaagaaggatgaagaagtgctgaaaaagaattgtccacacatcgtcgtcggcactcctgggcgaatcctggcactggctcgcaacaaaagcctgaatctgaagcatatcaaacatttcatcttggatgagtgcgacaagatgctggagcagttagacatgcgaagggacgtgcaggagatctttagaatgaccccacacgaaaagcaggttatgatgttttccgccacgctctccaaggagattcggcccgtgtgtaggaaattcatgcaggatccaatggagattttcgtggatgacgaaacaaagttaacccttcacggacttcaacagtactacgttaaactcaaagataacgaaaagaaccgcaagttattcgatctcctggacgttctagaattcaatcaagtggtgatcttcgtgaagtccgtgcaacgctgtattgcccttgcacagctgcttgtcgaacaaaacttccctgctattgccatccataggggcatgcctcaggaggagcggctttctagataccagcagtttaaagatttccagcggcgcatcctggtagccacaaatctattcgggcgcggaatggatatcgaacgcgtcaacatagccttcaactatgacatgcctgaagactcggatacctacctgcacagggtggcccgcgcaggaagatttgggacgaagggcctcgcaattacattcgtgtccgatgaaaatgacgccaagattctaaacgatgtacaagataggtttgaagtgaatatctcagaactgccagacgaaatcgacatctccagttacatcgagcagacccggtag

SEQ ID NO: 231844 - DNA, 696 bp, Artificial Sequence
  derived and/or modified sequence
atggccgagaacgacgtggacaacgagctgctggactacgaggacgacgaagtggagactgcggctggaggggatggcgccgaggcaccagcgaaaaaggatgtgaaaggtagctacgtgtcgattcattcatctgggttccgggatttcctgctgaaacctgagctcttgcgcgcaatcgttgactgtgggttcgagcacccatctgaagtgcagcatgaatgtataccacaggctatactgggaatggacgttctctgtcaagccaagtctgggatggggaaaacagccgttttcgtgctcgctaccttgcagcagctggagcccgtgactgggcaggtgagtgtcctggttatgtgccacacccgagaactcgcatttcagatctccaaggagtatgagcgctttagcaagtacatgccaaacgttaaggtggctgtttttttcggaggcctcagtattaagaaggatgaagaagtactgaaaaagaattgtccccatattgtcgtgggcacgcccggacggattttggcgctggccagaaataaaagtcttaacctgaagcacattaagcacttcatcctcgacgaatgcgacaagatgctggaacaacttgacatgaggagagatgtgcaggagatcttccgaatgacccctcacgaaaaacaagtgatgatgttctcggccaccttatag

SEQ ID NO: 231845 - DNA, 1287 bp, Artificial Sequence
  derived and/or modified sequence
atggccgagaacgacgtggacaacgagctgctggactacgaggacgacgaggtagagaccgctgcaggcggggatggagctgaggctcctgccaaaaaggacgtgaagggaagttatgtgtcaatccactcctctggcttcagagattttctgctgaaaccggagctattaagagcaattgttgactgcggttttgagcacccaagtgaggtgcagcacgagtgtatacctcaggccattctcggaatggatgtgttgtgtcaagccaaaagtggaatgggcaagaccgcggtgtttgtgctggcaaccttacagcagcttgagccagttactggacaggtatctgtgctagtgatgtgtcacacacgggagctggcatttcagattagtaaggagtatgagcggttctctaaatatatgccaaatgtgaaagtagctgtcttcttcggaggcttatcaatcaaaaaggacgaggaagtcctgaaaaaaaactgccctcatatcgtcgtaggcactccaggtagaattctggctctggcacgcaacaaaagtttaaacctgaagcacataaaacatttcatcctcgacgagtgcgacaagatgctcgagcagcttgatatgcgaagagatgtgcaagaaatattcagaatgactccccatgaaaagcaggtgatgatgttcagtgccactctaagtaaggagattcgccccgtgtgccgaaagttcatgcaggatcctatggagattttcgtggatgacgaaactaagctaacactgcatgggctccagcagtattacgttaaactgaaggataatgagaaaaacagaaagttatttgatctcctggacgtcctggagttcaatcaagtggtgatttttgtgaaaagcgtccagcgctgcattgccctggcccaactgctggttgagcagaactttcctgctatcgcaattcaccgtggaatgccacaggaagaacgcctctctagataccaacagttcaaggatttccaacgccggattctagtggctacgaacctgttcggacggggtatggacatagagcgggtaaacattgctttcaattatgatatgcccgaggattctgatacttacttacacagagtggcccgagctggaagatttggtaccaagggtctagccataacgtttgtatccgatgagaacgacgctaagatcctaaatgatgtccaagaccgctttgaggtgaatatcagtgaactgccagacgagatcgacatatcgtcttacatcgagcaaacacggtag

SEQ ID NO: 231846 - DNA, 378 bp, Artificial Sequence
  derived and/or modified sequence
atggccgagaacgacgtggacaacgagctgctggactacgaggacgacgaagtggagactgccgctgggggagacggtgcagaggctcccgctaaaaaggatgttaaaggaagctatgtatcaattcattcaagtggcttccgagattttttactgaagccagagcttctgagggccatcgtcgactgcggtttcgagcatccatccgaagttcagcatgaatgcattccccaggccatcctcgggatggacgttctgtgccaggccaagagcggcatgggcaagaccgccgtgtttgtccttgccaccctgcaacagctggagccagtaaccggccaggtgtcagttctggtcatgtgtcacacgagagagttgtag

SEQ ID NO: 231847 - DNA, 294 bp, Artificial Sequence
  derived and/or modified sequence
tgagccaccctgcagcagctggagcccgtgaccggccaggtgtgcttctgcgactctcacttcccacggggggataatgaggagcttcacctcccatacgtctctgtttactttctcccaaaggtctctgttttagtaatgtgccatactcgggagctggccttccagattagcaaagagtacgaacgattctctaagtacatgcctaacgttaaggtggcagtttttttcggtggcctgtcgataaaaaaggacgaggaggtgttgaaaaagaattgcccccacatcgtgtag

SEQ ID NO: 231848 - DNA, 291 bp, Artificial Sequence
  derived and/or modified sequence
atggccgagaacgacgtggacaacgagctgctggactacgaggacgacgaggttgaaactgctgcaggcggcgacggtgccgaggcacctgctaagaaagatgtcaagggatcatatgtgtcaatccattcgtccggatttcgagatttcctactaaaacctgaacttttgcgtgctatagtcgactgcgggttcgagcatccttctgaggtccagcatgaatgtatccctcaggctatcttgggaatggacgtgttgtgccaagccaaaagcggtatgggcaaaacttag

SEQ ID NO: 231849 - DNA, 291 bp, Artificial Sequence
  derived and/or modified sequence
atggccgagaacgacgtggacaacgagctgctggactacgaggacgacgaagttgaaaccgcagcaggcggcgatggcgcagaggcccccgcaaaaaaagacgtgaagggctcatacgtctctatccacagctccggctttagagactttctactgaagcctgagctcttaagggctatagtcgattgcggattcgagcacccctcggaagttcagcacgagtgtatccctcaagccatccttggaatggatgtcctctgtcaggctaagtctggcatggggaaaacctag

SEQ ID NO: 231850 - DNA, 1287 bp, Artificial Sequence
  derived and/or modified sequence
atggccgagaacgacgtggacaacgagctgctggactacgaggacgacgaagtggagactgctgctggtggagacggtgctgaagcccccgccaagaaagacgttaaggggagttacgtctcaattcacagtagcggattcagggactttctgctgaaacctgagctgctgagggccatagtggattgcggttttgaacatcccagcgaggtgcagcatgagtgtattccccaggcaatcctaggtatggatgtgctatgtcaggctaaatcaggtatgggtaagaccgctgtttttgtgctggccacccttcagcagctcgaacccgtaaccggccaggtttctgtcctggttatgtgccacacacgggagctagcctttcagataagtaaggagtatgagcggttttcgaaatatatgccaaatgtaaaagttgcagtcttctttggcgggctgagtataaagaaggatgaggaagtgctgaagaagaattgtccacacatcgtggtgggcacaccaggaaggattttggccctggcacgaaacaaaagcttaaatttaaagcatataaagcatttcatcttagacgaatgtgataaaatgctggaacagctcgatatgagacgtgacgttcaggaaatctttcgcatgacccctcacgaaaagcaggttatgatgttttctgcaacgctgtctaaggagatcaggcctgtgtgtaggaaattcatgcaagatccaatggaaatctttgtagatgatgagactaaactgactctgcatggcctgcagcagtactacgtgaagctaaaagataatgagaagaataggaagctttttgacttacttgacgtgctggagtttaatcaggtggtaatcttcgttaaatccgtgcagaggtgtattgccctggctcagttactggtcgagcagaatttcccagcaattgccatccaccgaggaatgccccaggaggaaagactcagcagataccaacagtttaaggattttcagcgtcgcatactcgttgccaccaacctgttcggccgcggaatggacatagaacgcgtgaacatcgctttcaattacgatatgcctgaggattctgacacatacctgcacagggtggcacgagccggccgcttcggcactaaagggctggcaatcaccttcgtgtcagatgaaaacgacgccaagattctgaacgatgtgcaggatcggttcgaggtgaacatttcagagcttccagatgagattgatatatcatcctacatcgagcagactcgatag

SEQ ID NO: 231851 - DNA, 732 bp, Artificial Sequence
  derived and/or modified sequence
atgtggaccatgagcagctggaccatgaagatgatgcggtggcggcaacagctcggtgagatgggcctgcggccattgccaagacggatgtctcgggcgccaatgtcacccagtaccgccctggcttttgtgacatcctgctcatcgcaatcatgcagcggaccactttctaccgttgccctgtctatcagacaaaaggtgtctgttcttgtcatgtgccatacacgagaactggcttttcagatttcaaaagaatacgaaagattctccaagtatatgccaaatgtgaaggtagctgtgttctttgggggcctgtctattaaaaaggatgaggaggtgctcaaaaagaactgtcctcacattgttgtcggaacacccgggagaattttggctctggcacggaataagagcctgaatcttaaacacataaagcactttatactggacgaatgcgacaaaatgctggaacagttggatatgagaagggacgtgcaggagatattcagaatgacacctcatgagaaacaggtaatgatgttttcggccaccttgagcaaagagattcgcccagtatgccggaagtttatgcaggatgtcaatactctgctcccatcactccctcctctccctgccaggtgtttgcttccatttttggcactgttcttaaggctgccctgccacagttccgcaaaaaaggccgcttgcgcccagttgggcgtgatgaccccctag

SEQ ID NO: 231852 - DNA, 972 bp, Artificial Sequence
  derived and/or modified sequence
atggccgagaacgacgtggacaacgagctgctggactacgaggacgatgaggtggagacagccgcaggtggagacggagctgaggctcctgctaagaaagacgtgaaaggcagctatgtgtccatccactccagcggattcagggacttcctgttaaagcccgagctcttacgagccatcgtcgactgtgggttcgagcaccctagcgaggtgcagcacgagtgtatcccacaggcaattctcggaatggacgttctttgtcaggcaaaatctggcatggggaaaaccgccgtcttcgttctagcgactctgcagcagctcgagcctgtgacaggacaggtgtcagtgctagtgatgtgtcatacccgtgagcttgcatttcagatcagcaaggagtatgaacggttctctaagtacatgccaaacgtcaaggtcgcagtgttctttggcggcctgagcattaaaaaagatgaagaggtcctcaaaaagaactgccctcatatagttgtgggcacacctggtaggattctggctcttgctcggaacaagagtctcaatttgaaacacattaagcattttatcctggatgaatgcgacaagatgctcgagcagttagatatgcgtagggatgtgcaggagattttccggatgaccccacacgaaaaacaagtgatgatgttctcagctacattatccaaggaaatccgacccgtgtgcagaaagttcatgcaggacccaatggagatctttgttgacgacgagaccaagctgacactccatggcctgcagcagtattatgtgaaattgaaggacaatgagaagaaccggaaattgtttgacctgctggacgtgctagagttcaatcaggagatcacctgcaaatccgtgcagcggttctctacgaccaacagctgtggctaccagcctatctggccgaggcacggccatcgcgcgggagaacactgcttctag

SEQ ID NO: 231853 - DNA, 972 bp, Artificial Sequence
  derived and/or modified sequence
atggccgagaacgacgtggacaacgagctgctggactacgaggacgacgaggtggaaaccgcagctggcggagatggcgccgaagcccctgcaaagaaggacgtaaagggatcatacgtcagcattcactctagtggatttagagacttcttactcaagcccgagctcctgcgagccatcgtggactgcggattcgagcaccctagcgaggtgcaacacgagtgcattccacaggccatcttgggcatggatgtcttgtgccaggccaagtcagggatggggaaaacagccgtgtttgtgcttgcaactttgcagcagctggagcccgtcaccggacaagtgtcggtcctggtaatgtgccacacaagagagctggctttccaaatcagcaaagaatatgagcggttttcaaaatatatgcccaatgtcaaggtcgccgttttttttggtggcctgtctatcaagaaggacgaagaggttctaaagaagaactgccctcacatcgtggtaggaacgccggggaggattttggcactggcccggaataaaagtctaaacctgaaacacatcaagcatttcatcttagatgagtgcgataaaatgctggaacaactggacatgagacgcgacgtgcaggaaatcttccgtatgactccacacgagaaacaggtaatgatgtttagtgccacactcagtaaagagattcggcctgtgtgtcgaaagtttatgcaggatccaatggagattttcgtcgacgatgaaactaagctgaccctacatggcttgcagcagtattatgtgaaactaaaagataatgagaaaaatcgcaagctgttcgacctcctagacgtgttagaattcaatcaggaaataacctgtaaaagcgtgcagaggttttctaccaccaattcatgcgggtaccagccaatttggccccgacacggacatcgggcaggggaacattgcttctag

SEQ ID NO: 231854 - DNA, 1332 bp, Artificial Sequence
  derived and/or modified sequence
atggccgagaacgacgtggacaacgagctgctggactacgaggacgatgaggtcgagactgcagctggaggcgacggggccgaagcacccgccaagaaggatgtaaagggctcctacgtgagtatccatagcagcggatttagggatttcctcctcaagccggagcttctcagggcgatagtggactgcgggttcgaacatcctagcgaggtacagcatgaatgcattccccaagcaatcctaggaatggatgtcttgtgccaggccaagagcggcatggggaagactgcagtgttcgtgctcgccacactgcaacagctagaaccagtcaccggacaagtttatctgggtagggtcctcggccgtggattttggtgcgtgttcgtgagcgtgctggtgatgtgccatacacgcgagcttgcattccaaatatccaaggagtatgaaagattcagtaagtacatgccaaacgtcaaagtagcagtgtttttcggtggcctttccataaagaaagacgaagaggttcttaaaaagaattgtccgcacatcgtggttgggaccccaggacgcatcctggccttagcacgcaataagagccttaatctcaaacacatcaaacacttcatattggatgaatgtgacaaaatgctagagcagctggacatgcggcgcgatgttcaggagatttttcgcatgacaccccatgaaaagcaagtaatgatgttcagtgcaaccttatccaaggaaataagacccgtatgtagaaaatttatgcaggatcccatggagattttcgtggacgatgaaacgaagctcacactgcacggcctgcaacagtactacgttaagctaaaggataatgaaaaaaatcgtaagctttttgatctgctcgacgtgttagagtttaatcaggtggtgatttttgtgaagtccgtccaacgctgcattgccttagcccagctgctggtcgaacaaaattttccagcaatagcaattcaccgcggcatgcctcaggaggaaaggctctcccggtatcagcagttcaaagactttcaacgaaggattttggtggccacaaatctgtttggtagaggaatggacatagaacgtgttaacatcgcattcaactacgatatgccggaggacagtgatacttaccttcaccgggtggccagggccggcaggttcgggactaaggggctggctatcacctttgtttcggatgagaacgacgcgaagattttgaacgatgtccaagaccggttcgaagtgaacatcagtgagctgcccgacgagatagacattagctcctacatcgagcagacccgctag

SEQ ID NO: 231855 - DNA, 732 bp, Artificial Sequence
  derived and/or modified sequence
atgtggaccatgagcagctggaccatgaagatgatgcggtggcggcaacagctgggcgaaatgggactcagaccactcccacgccgcatgtcacgcgctcctatgagtccctccacggccctcgcctttgtgacgagctgttcttcacagtcatgcagcggccctcttagcactgttgctctaagcatccgtcagaaagtatctgtgctagtgatgtgccacacacgcgaacttgcttttcaaatctccaaggaatatgaaaggtttagtaagtacatgcccaatgtgaaagtcgccgtcttcttcggtggcctgagtatcaagaaggatgaagaggtcctgaagaaaaactgtccccacatcgtggtcggtacaccgggacgcatcctcgccctggcccgaaataagagcctaaacctgaaacatattaagcatttcatcttagacgaatgcgacaagatgctggaacagctcgacatgaggagggacgtccaggaaatctttaggatgaccccccacgaaaagcaagtaatgatgttttccgctacattgagcaaagagatccgacccgtttgccgaaagtttatgcaggatgtgaatactctactgcccagccttccgccccttccagcgcggtgccttttacctttcttagctctgttcctgcggctgccctgtcactcatccgctaagaaagcagcctgcgcccagttgggtgtgatgacaccctag

SEQ ID NO: 231856 - DNA, 1332 bp, Artificial Sequence
  derived and/or modified sequence
atggccgagaacgacgtggacaacgagctgctggactacgaggacgatgaggtcgagaccgctgctggtggagatggggctgaagcccccgctaagaaggatgtgaaggggtcttacgtttcaattcacagcagcggcttcagagactttttgctgaagccggagcttcttagggctatcgtagactgcggatttgaacatccatctgaggtccagcatgagtgcatcccacaggctatcctgggcatggacgtactgtgccaggctaagtccggcatgggcaagacagctgtcttcgttctcgctacccttcagcagctcgagcccgtcactggtcaggtctatctgggcagggtgctgggtagagggttctggtgcgtgttcgttagcgtgcttgtaatgtgtcatacccgggaactggcttttcagatctccaaagagtatgaacgtttctccaaatatatgcccaacgtgaaggtggcggtgttctttggcggactgagcataaaaaaggatgaggaagtgttgaaaaaaaactgtccacacatcgtcgtgggaacgcccggcagaatcctggccctggctcgtaacaagtcacttaacctcaagcatattaaacacttcattcttgatgaatgcgacaagatgctggaacagctcgacatgaggagagatgtccaagagatatttcggatgactcctcacgaaaaacaggttatgatgttttccgctacactctcaaaggagatcaggcccgtgtgccgcaagttcatgcaagatccaatggagatctttgttgatgacgagactaagttaactctgcacgggctccagcaatactacgtgaagttaaaggacaacgagaagaatagaaagctgttcgacttattggacgtactcgagttcaaccaggtagttatttttgttaagtccgtgcagagatgcattgctctggctcagctgctggtggaacaaaatttcccggcaatcgcaatccataggggaatgcctcaggaggaacgcctttctcgatatcagcagtttaaagactttcagcggagaatcctcgtggctactaacctgttcggccggggaatggacatcgaaagggtgaacatcgccttcaattacgatatgcctgaagactctgatacttacttgcacagagtggcccgagcaggcaggtttggaaccaaagggctggcaatcacttttgtgagcgatgaaaacgacgccaaaatccttaacgacgtgcaggacaggttcgaagttaacatcagcgagcttcctgatgaaattgatatctcaagttacatagaacagactcgatag

SEQ ID NO: 231857 - DNA, 420 bp, Artificial Sequence
  derived and/or modified sequence
atggccgagaacgacgtggacaacgagctgctggactacgaggacgatgaggtggagaccgccgcaggaggagatggagcggaagccccagctaagaaggacgtcaagggatcatacgtctctatccattcaagcggttttcgcgactttctacttaaacccgaattgttaagagccatcgtggattgcgggtttgagcacccatcagaggtccagcacgagtgtatccctcaagcaatcctggggatggatgtcctatgtcaggcaaaatctgggatgggaaaaaccgctgtgtttgtacttgcaaccttgcaacagctcgagcccgtgacaggacagagccatgagcatatgacatctgtcactctggacaacttaaccgccgttggggacgtattgtcccaagcttggggttcctag

SEQ ID NO: 231858 - DNA, 732 bp, Artificial Sequence
  derived and/or modified sequence
atgtggaccatgagcagctggaccatgaagatgatgcggtggcggcaacaactgggggagatgggcctgaggcccctgccccgcaggatgtctcgggctcccatgagcccgagcactgccttggcctttgtcacatcctgtagcagccagtcgtgctccggccctctttcaaccgtcgccctctcaattcgacagaaggtctcagtactagtgatgtgccatacaagagaactggcctttcagatttccaaagagtacgaacggttctccaaatacatgcccaacgtgaaagtagctgtgttcttcggagggctgagcattaagaaggatgaggaggtcctaaagaagaattgtccacacatcgtggtggggacaccaggaagaatcttggctcttgcccgaaataaaagccttaacctcaagcacataaaacacttcatactagatgaatgtgacaaaatgctggaacagctggacatgagacgggatgtgcaggaaatatttcggatgacaccccatgagaaacaggtgatgatgtttagtgccactctgtctaaggagatcaggccagtgtgcaggaagttcatgcaggacgttaacactctattgccaagcttgcctccccttcctgctaggtgcctacttcccttcctagccttgttccttcggctcccatgtcacagctccgcgaaaaaagcagcttgcgcgcaacttggagttatgactccgtag

SEQ ID NO: 231859 - DNA, 732 bp, Artificial Sequence
  derived and/or modified sequence
atgtggaccatgagcagctggaccatgaagatgatgcggtggcggcaacagttgggggaaatgggattaaggcccctcccaagacgcatgtctcgtgctcctatgtccccctccaccgccctggcttttgtaacctcttgcagtagccagtcttgcagcgggccccttagtaccgttgcactcagcatcagacagaaagtcagcgttttggtgatgtgtcacacccgggagcttgcgtttcagatttccaaggaatatgaaaggttctccaaatatatgccaaatgtcaaagtcgccgtcttctttggaggactcagcatcaaaaaggacgaggaggtcttaaaaaaaaactgtccgcatatcgtagtgggcacacccggtagaatcctggctctcgcccgaaataagtcccttaatctgaaacatattaaacatttcatattggacgagtgtgacaagatgcttgagcaactggatatgcggcgggacgttcaggagatattccgtatgactccccatgagaaacaggtgatgatgttttccgctacactgtccaaggagatcagacccgtctgccgaaaatttatgcaggacgttaatactttactgccatccttgccccctctgccggcacggtgcctgctgcccttcctggcacttttccttcgactgccctgccattcgagtgcaaagaaggcagcgtgcgcccagttaggtgtcatgacaccttag

SEQ ID NO: 231860 - DNA, 420 bp, Artificial Sequence
  derived and/or modified sequence
atggccgagaacgacgtggacaacgagctgctggactacgaggacgatgaagtggaaactgccgcaggcggtgatggggcagaagcccccgcaaaaaaagacgttaaaggaagctacgtgtcaattcacagtagcggatttcgtgatttcctgctgaaacccgaactgctgcgcgctattgtagattgcggatttgaacacccctcggaagttcaacacgaatgtattccacaggccatactggggatggatgtactttgccaagcaaagtctggaatgggtaagactgctgtcttcgttctggcaactcttcagcaactcgaaccggtaactgggcagtcacacgagcacatgacatccgtcactctcgacaatttaacagccgtcggggacgtcctctctcaggcatggggctcttag

SEQ ID NO: 231861 - DNA, 972 bp, Artificial Sequence
  derived and/or modified sequence
atggccgagaacgacgtggacaacgagctgctggactacgaggacgatgaggtcgagactgctgcgggaggtgatggggccgaagcacccgcaaagaaagatgtcaaggggtcttacgtgagcatccattcctcggggtttagagattttcttctgaaacctgaactgctgcgcgcaattgtggactgcggatttgagcacccctcagaagtccagcacgaatgcattccccaggcaatcctggggatggatgtcctgtgccaagctaagagtggtatgggtaaaactgctgtgtttgtgcttgccacactgcagcagctagagcctgtcactgggcaagtgagcgttcttgtaatgtgccacacaagagaactggctttccagatttccaaagagtatgagagatttagcaagtacatgcctaacgtgaaagtagcagtgttcttcgggggactgagcatcaaaaaggatgaggaggtactgaagaagaactgtccccacatagtggtgggtaccccaggacggattctggctctggctaggaacaagagcctgaacctaaagcacatcaaacactttatcctcgatgaatgtgataagatgctcgagcagctcgacatgaggagagacgtgcaggaaatcttcagaatgactcctcatgagaagcaagtgatgatgtttagtgccaccctttctaaagagattcggccagtgtgccgaaagttcatgcaggatcctatggaaatctttgtggatgacgagaccaaactgacactgcatggcctccagcagtactatgtgaagttgaaggacaacgagaaaaacaggaaactgtttgatctgctggatgttctggagttcaaccaagaaattacctgcaaatctgttcagcgattttctaccaccaactcctgcggctaccagcccatctggccccggcacggccaccgagccggcgagcattgcttttag

SEQ ID NO: 231862 - DNA, 1332 bp, Artificial Sequence
  derived and/or modified sequence
atggccgagaacgacgtggacaacgagctgctggactacgaggacgatgaggtcgaaaccgcggccggcggggatggtgccgaggccccagcaaagaaggatgtgaaaggctcctatgtctctattcactccagcgggttccgggactttctacttaagccagagctccttcgagctatcgttgactgtggattcgagcatccaagcgaagtgcagcatgagtgtatcccacaagccatcctggggatggacgtgctgtgccaggccaagagcggaatggggaaaactgcagtgttcgtgcttgcgacacttcagcagttggaacctgtcaccggccaggtctatctgggaagagttttgggacgggggttctggtgcgtgtttgtttcagtccttgtgatgtgccatacccgagaactggcatttcaaatatccaaagagtatgagcgtttcagcaagtacatgcccaacgtaaaagttgcagtctttttcggtggcctcagtatcaaaaaagatgaagaagttttgaaaaaaaattgtcctcacatcgtggtggggacacctggtaggatcttggctcttgcgcgtaacaagtcattaaatcttaaacacatcaaacactttatcttagacgagtgtgacaaaatgctggaacaactggacatgcgaagagacgtccaggagatatttaggatgacaccccacgagaagcaggttatgatgttttctgccacgctgagtaaggaaattagacccgtgtgccgcaaattcatgcaggatcccatggagatctttgtggacgacgagaccaagttaactcttcacggtcttcaacaatattatgtgaagctcaaagataatgagaaaaaccgcaaactctttgacctgctggatgtgctggaatttaatcaggtggtcattttcgtgaaaagtgtacagagatgcatcgcactggctcagctcttggtcgaacagaacttcccggcaattgctatacatagaggtatgccccaggaggaaaggctctctcgctatcagcaattcaaggactttcaaagacggatcttagttgcaacgaacctgtttggtcgaggcatggacatcgaaagagtgaacatcgcctttaactacgatatgcccgaggattctgatacctatctgcacagggtcgctcgcgccggtaggtttggaactaaaggcctagcaatcacgttcgtatcagacgagaacgatgctaaaatcttaaacgatgtgcaggatcgattcgaggttaatatctccgaactccccgatgagatcgatattagctcttatatcgaacagacacgatag

SEQ ID NO: 231863 - DNA, 732 bp, Artificial Sequence
  derived and/or modified sequence
atgtggaccatgagcagctggaccatgaagatgatgcggtggcggcaacagttaggagagatgggacttaggccattgccacgaagaatgtccagggcccccatgagtccctctacagcactcgcttttgtcacgagttgcagctcgcagtcctgttctggacctctgagtactgtggcactatcaattcgccagaaggtgtctgtcttagtcatgtgtcacacccgcgaactcgccttccaaataagtaaagagtatgagagattctcaaaatatatgcccaatgttaaagtggccgtatttttcgggggactttccattaagaaagacgaggaggttcttaaaaagaattgccctcatattgtggtcgggacccccggccgaatcttggcactcgcccgaaacaaatctctgaatctcaagcacatcaaacactttattcttgatgaatgcgacaagatgctcgaacagttggacatgcgacgcgatgtgcaagagatattccgcatgaccccacatgaaaagcaggtgatgatgttctccgcgaccctttccaaggagattaggcccgtgtgtaggaagttcatgcaggacgtaaacaccttactgccgtcactgccacctttgcccgcccgatgtctgctcccattcttggctctgttcctacgcttgccctgccattctagcgcaaagaaggcagcgtgcgcccagctcggagtgatgacaccttag

SEQ ID NO: 231864 - DNA, 1053 bp, Artificial Sequence
  derived and/or modified sequence
atgtggaccatgagcagctggaccatgaagatgatgcggtggcggcagcaactcggcgaaatgggcctccgaccactgcctcgccggatgagccgcgcgcccatgagtccttcaacagcgctggcctttgttacaagttgcagcagtcagtcatgttcaggaccgctgagcaccgttgcgctgtccattcgccagaaggtcgctgtgttctttggaggcttgtcaatcaagaaagatgaagaggttttgaaaaaaaactgtccacacatcgttgtgggcacccccggtcgaatacttgccctggcacgaaacaagtcactgaacctgaaacacattaaacactttattctggacgagtgtgacaaaatgctggaacagctggacatgcgaagggacgttcaggagatattcagaatgacaccacacgagaaacaggtcatgatgtttagcgccactctatcgaaggagattcggccggtttgtcgcaaatttatgcaggacccaatggagatatttgtcgacgacgagaccaagctgaccctgcatgggctgcagcagtactatgtcaagttgaaggataacgaaaagaatcgtaagctcttcgaccttttggacgtgctggagttcaatcaagtggtgatcttcgttaagtctgttcaaagatgtatcgctctcgctcagctgctagtggagcagaatttcccagctatcgcaatccatcggggcatgccccaggaggagcggctgagtcgctatcagcagttcaaggacttccaacgtcgtatattagtcgccaccaatctgtttgggcgagggatggatatagaaagggtgaacatcgcttttaattacgacatgccggaggattctgacacatacttgcaccgagtcgccagagccgggaggttcggaaccaaaggcctcgcaatcactttcgtgtccgatgagaatgacgcaaagattttaaatgatgtgcaagacaggttcgaagtgaacatctccgagctgcctgacgagattgacatctcctcctatattgagcagactcgctag

SEQ ID NO: 231865 - DNA, 1332 bp, Artificial Sequence
  derived and/or modified sequence
atggccgagaacgacgtggacaacgagctgctggactacgaggacgatgaggtagaaacggcagctggaggcgacggggccgaggctcccgccaagaaggacgtcaagggaagctatgtgagtattcattcttccgggtttagggactttctgttgaaaccagaactgctgcgtgccatcgtggattgcggattcgaacaccccagcgaggttcagcatgagtgcatacctcaagctatcttggggatggacgtcctatgtcaggccaaatctggcatggggaagaccgccgtctttgtgttagccacgctgcagcagctggaacccgtaaccggtcaggtgtatttgggaagggttctcgggcggggattctggtgtgtgttcgtttccgtgctggttatgtgccacactagagaactcgccttccaaatcagcaaagagtatgaaaggttttccaagtatatgccgaacgtaaaagtggcagtcttcttcggagggttgtccatcaaaaaggatgaggaggtactaaaaaagaattgccctcatatcgtggtggggactccaggtcggatccttgccctagccaggaataagtctcttaacttgaaacatatcaagcattttatactggacgaatgtgataaaatgctagagcagctcgacatgaggcgcgatgtgcaggagatattccggatgaccccccacgagaaacaggtgatgatgttctctgccactcttagcaaggagattaggcctgtgtgccgtaagtttatgcaagatcctatggaaattttcgtcgatgatgagacaaagttgaccttacacggtctgcaacaatattacgtaaagctcaaagataatgagaagaaccgcaagcttttcgacttattggatgtcttagagttcaatcaagtggtgattttcgtgaagtccgtacagcgctgtattgcccttgcccaactgctcgtggaacagaacttccccgccattgccatccacaggggcatgccccaagaggagcgtctgtccagataccagcaatttaaggattttcaacgtcgtattctggtagccactaacctgttcggacgagggatggacattgagcgcgtgaacattgccttcaattacgatatgcctgaagatagcgacacctacctccatagagtcgccagagccggacggttcggcacgaagggcctcgccatcacctttgtgtcagatgaaaacgacgctaagatcctcaatgatgtccaggatcgcttcgaggtgaacatcagcgagctgccagatgaaatcgacatctctagttacatagaacagaccaggtag

SEQ ID NO: 231866 - DNA, 1053 bp, Artificial Sequence
  derived and/or modified sequence
atgtggaccatgagcagctggaccatgaagatgatgcggtggcggcagcaactgggagagatgggcttaaggcctctgccaagacgtatgtctagggcacctatgagcccgagtaccgccctcgcctttgttacgtcctgctcttcacagtcatgttccggccccctgagtactgtggccctcagcatcaggcagaaggttgccgttttcttcggagggttgagtattaaaaaggatgaagaggtgcttaaaaagaattgtccgcatatcgtggtggggactcctggtcgaattctggccctggcccgcaacaagtcactcaatctaaaacatatcaagcatttcattctcgacgagtgtgataaaatgttggagcagctagatatgcggagggatgtgcaggaaattttccgaatgaccccccacgaaaaacaggtgatgatgttctctgctaccctgtctaaggagatcaggcccgtttgtagaaagtttatgcaggaccctatggaaatcttcgtggacgacgagaccaaattgactcttcacggcctccagcagtattatgtaaagctcaaggataacgagaagaaccggaagctgttcgacctcctcgacgttctcgagttcaaccaggtggtcatttttgtgaagtccgtgcagcggtgtatcgcgctcgcccaactcctagtagagcagaacttccctgccatcgccatccacagggggatgccccaggaggaacgactatcccgctaccagcagtttaaagattttcaacggcggatacttgttgccaccaacctattcggcaggggtatggatatagagagagtgaacattgccttcaattacgacatgcctgaggactctgacacctacttgcatcgtgtagccagagctggccgcttcggtacaaagggattggcaattacctttgtgtcagacgagaatgacgctaagatactgaatgatgtgcaggatcgcttcgaggtgaacatcagtgagcttcccgacgagattgatatcagttcttacatcgagcagacacgttag

SEQ ID NO: 231867 - DNA, 732 bp, Artificial Sequence
  derived and/or modified sequence
atgtggaccatgagcagctggaccatgaagatgatgcggtggcggcaacaattaggggagatgggattgagaccattaccgcggcgcatgtcacgagcgccaatgtcgccatccaccgctctggcattcgtcactagctgtagcagccagagctgtagcggaccgctatctactgtggccctttcaattcgccagaaggtgagcgtactggtgatgtgtcataccagagagctcgctttccagattagcaaggagtatgagcgattctcgaagtacatgccgaacgtgaaagtagcagtcttcttcggtggattatctattaaaaaggatgaagaggtgcttaaaaagaactgcccacatatcgtcgtgggaacccctggcaggattctggcgctggccaggaataaaagtctaaacctgaaacacatcaagcatttcatcctggatgaatgcgacaagatgctggagcagctggacatgcgccgggatgttcaggaaatttttagaatgaccccccatgagaagcaggtgatgatgttttccgcaacgctcagcaaggagattagaccagtgtgtcgtaaatttatgcaagatgtgaacactttgctgccctcattaccacccctgccggcccgctgtctgctgccattcctggcccttttcctgcggctcccctgtcattcctctgcaaaaaaagccgcctgtgcccaactaggggtgatgactccatag

SEQ ID NO: 231868 - DNA, 420 bp, Artificial Sequence
  derived and/or modified sequence
atggccgagaacgacgtggacaacgagctgctggactacgaggacgacgaagtggagactgcagcagggggcgacggcgccgaagcgcccgcaaagaaggacgtgaagggcagttatgtcagtatccactcaagtgggttccgtgactttttgctcaagcccgagctcctgcgcgccattgtcgactgcggcttcgaacacccttctgaggtccagcatgaatgcatcccacaggcgattctcgggatggacgtcctatgccaagccaagtccggtatgggtaagacagccgtttttgtgctggcgaccctccaacagctggaacctgtgacggggcaatctcacgaacatatgactagcgtgactctggacaacctgactgccgtgggagacgtgctgagtcaggcgtgggggtcctag

SEQ ID NO: 231869 - DNA, 1053 bp, Artificial Sequence
  derived and/or modified sequence
atgtggaccatgagcagctggaccatgaagatgatgcggtggcggcagcagctgggggagatggggctgcggccccttcccaggcgcatgtccagggcaccaatgtcaccctctacggccctcgcctttgtgacttcttgcagctcccagagctgctctgggccactctctacagtggccttgtcaattcgccagaaagtagcagtcttttttggggggctgtcaattaagaaagacgaggaggtattaaaaaagaattgtccacacatcgtcgtgggaacccccggcaggatactggctttagccaggaacaagtcattgaatctgaaacatattaagcacttcatcctcgatgagtgtgacaaaatgcttgagcaactggacatgcggagggacgtccaggagatctttaggatgactccgcatgagaaacaggtcatgatgttctctgcaaccctctcgaaggagatccgtccggtctgtcgcaaatttatgcaggatccgatggaaatcttcgtagacgacgagactaagctgacactccacggactgcagcagtactacgtaaaactgaaagacaacgagaaaaacagaaagctgttcgacctgctggatgtgctggagtttaaccaggtggtgatattcgtcaaatcggtccagcgatgcatagctctcgcccaactgctggtcgaacagaattttccagcgatagccatccacagaggaatgcctcaagaggagagactgagtcggtatcagcagttcaaggacttccagagacgaatcttggtcgcaactaatttattcggacggggcatggatattgagcgggtgaatattgctttcaactatgacatgcctgaagattcagacacctacctgcaccgcgtggctcgagccggccggtttggcaccaaaggactggcaattactttcgtgagtgatgaaaatgatgctaagatccttaacgacgtccaagatcgtttcgaggtcaatatttccgagctcccggatgagattgacatcagcagttatatcgagcagacacgctag

SEQ ID NO: 231870 - DNA, 972 bp, Artificial Sequence
  derived and/or modified sequence
atggccgagaacgacgtggacaacgagctgctggactacgaggacgacgaggtggaaacagccgccggaggggatggggcagaggcacccgcgaagaaagatgtgaaaggatcctatgttagcatccattcatcagggttcagagactttctgctcaaaccagaactactgcgcgcaattgtcgactgtgggtttgaacatccgtctgaagtgcagcatgagtgcatcccacaagctatcctggggatggatgtgctctgccaggccaagtccgggatgggcaagacagcagtttttgtactggccaccttgcagcagttggagccagttactggtcaggtgtccgtcctggtcatgtgtcataccagggagctggcattccagatctcaaaggagtacgagaggttctcaaagtacatgccaaatgtgaaggtcgccgtcttttttggtggcctgagcattaaaaaggacgaggaggtgcttaagaaaaactgcccacacatcgtggtggggacaccaggccggattctcgccctggccagaaacaagtccttgaatctgaagcatattaaacactttatcctggacgaatgtgataaaatgctggaacaattagatatgcgacgggatgtgcaggagatttttcggatgacgccccacgaaaagcaagtaatgatgttttcagctactctctccaaagagataagaccggtctgcagaaaattcatgcaggatcccatggagatttttgtagacgacgagactaaactgaccctccatgggctccagcagtattatgtcaagcttaaggacaatgagaaaaatagaaagctttttgacctactcgacgttttagagttcaaccaggagattacatgcaaaagcgtgcagcgattctccacaaccaacagttgcgggtatcagccaatttggccgcgacacgggcacagggctggcgagcactgtttttag

SEQ ID NO: 231871 - DNA, 1053 bp, Artificial Sequence
  derived and/or modified sequence
atgtggaccatgagcagctggaccatgaagatgatgcggtggcggcagcagctgggcgagatgggtctgagacctctacctcgcaggatgagcagagcgcccatgtccccaagcaccgcactagccttcgtgacttcctgctcatcacaatcctgtagtgggccattgagcacagtggcccttagcattcgacagaaggttgctgtctttttcggcgggctgagcatcaagaaggacgaagaggtcctgaaaaaaaattgtccgcatatcgtggtggggaccccaggtagaatccttgctctcgcacggaataagtcccttaatctgaagcatatcaaacacttcatactcgatgagtgtgacaagatgttagaacagttagatatgaggcgtgacgtgcaggagatatttcgcatgactcctcacgagaaacaagttatgatgttctcggcaaccctgtctaaagagataagacctgtgtgcagaaagttcatgcaggacccaatggaaatattcgtggacgacgagactaagctgactctacatggcttgcagcagtactacgttaagctgaaggacaatgagaagaaccgcaagctgttcgacctcctggacgtcctggagtttaaccaagtggtgatattcgtaaaaagtgtgcagcggtgcatcgctttggcccaacttctggtggagcagaatttcccagccatcgccatacatagggggatgccccaggaagagcgcctgtcacggtaccagcagtttaaagatttccaaagacgcattctggtggcaacgaacctgtttggacgtgggatggatattgagcgcgtgaatatcgcattcaactacgacatgccagaggatagcgatacctatttgcatcgggtggctcgggccgggagatttggaacaaagggacttgctatcactttcgtctccgacgagaatgacgccaaaatcttaaatgatgttcaggatagatttgaggtgaacatcagcgaactcccagatgagattgacattagcagttacatagagcagaccaggtag

SEQ ID NO: 231872 - DNA, 420 bp, Artificial Sequence
  derived and/or modified sequence
atggccgagaacgacgtggacaacgagctgctggactacgaggacgacgaggtggagacggctgccggaggcgatggagcagaagccccagctaagaaggatgtgaagggttcgtatgtgtccatacattcctctggcttcagagactttctcttgaaacctgaactgctccgggcaatagtggactgcggcttcgagcatcccagtgaagtgcagcacgagtgtatacctcaagcaatcctgggcatggatgtcctttgccaggctaagtcaggcatgggaaagactgcagtatttgtgctagccaccttgcaacagctcgagcctgtgacgggtcagtctcacgaacatatgacatcagtgacccttgacaatctcactgccgttggggacgtgctttcacaggcttggggatcttag

SEQ ID NO: 231873 - DNA, 1332 bp, Artificial Sequence
  derived and/or modified sequence
atggccgagaacgacgtggacaacgagctgctggactacgaggacgatgaagtggaaactgccgcggggggggatggcgcggaggctcctgccaagaaggacgtcaagggatcctacgtttctattcacagctcgggcttcagagacttcctactcaaacctgaactccttagggccatcgtggactgtggtttcgaacacccatccgaagtgcagcatgagtgcattccccaggcaatcttaggcatggacgtgctttgccaggcgaagtccgggatgggaaaaacagcagtctttgtgttagcaactctgcagcagctggaacccgtaactggacaggtatatctaggtcgcgtgctcggcaggggcttctggtgcgtcttcgtctctgtgctggtcatgtgccacacccgggagctggctttccagatttcaaaagagtacgaaaggttttctaagtatatgcccaacgtgaaagtcgccgtgttttttggaggccttagcattaagaaagacgaagaggttctaaagaagaattgccctcacatcgtggtgggtacacctggacgcatcctggcactggccaggaacaaaagtttgaatctcaaacatattaagcatttcatcctcgacgaatgcgataaaatgctggaacagctggacatgaggagagacgtgcaggaaatctttcgcatgactcctcacgaaaagcaggtgatgatgttcagtgccacactgtctaaggaaatccgccctgtctgccgaaaattcatgcaagatcccatggagatatttgttgacgatgaaactaagctgactctgcatggcctccagcagtactacgtgaaactgaaggacaacgagaagaaccgcaaactttttgacctgttggatgtgctagagttcaaccaggtggtgatttttgtgaaatccgtccagcgttgcattgctctggcacagctattggttgagcagaactttcctgcaatcgccattcacagagggatgcctcaagaggagcggctgagccggtatcaacagtttaaagatttccagcgccgtatcctcgtggccacaaatttgtttgggcgcggcatggatatcgagcgcgtcaacatagccttcaattatgacatgccggaggattctgacacctacctgcaccgagtggcccgcgccgggcgatttggcacaaaaggtttggccattaccttcgtgtctgacgagaacgatgctaaaatcctcaacgacgtgcaggatcggtttgaggtcaatatctccgagctacccgatgaaatcgatatcagctcttatattgaacaaacacgctag

SEQ ID NO: 231874 - DNA, 972 bp, Artificial Sequence
  derived and/or modified sequence
atggccgagaacgacgtggacaacgagctgctggactacgaggacgatgaggtggaaacagcggcgggaggagacggggcggaggcccctgccaagaaagacgtgaagggatcttacgtctccattcattcaagcgggtttagggatttcctcctcaaaccagagttgttacgggccatcgttgattgtggattcgagcatccctccgaagtccagcacgagtgcatacctcaagccatccttgggatggatgttctatgtcaggctaagagcggcatgggcaagactgccgtgttcgttctcgccacactccagcaactggagcctgtgactggccaagtgagcgttctagtcatgtgtcacacacgcgagctggcttttcagatttcaaaagagtacgagagattttccaagtacatgcctaatgttaaagtggccgtttttttcgggggattatctataaaaaaggacgaggaggttttgaagaaaaattgcccccacatcgtcgttggcactcccggtcgcatcctagccctggccaggaacaaaagcctaaatctgaagcacataaagcattttatcctcgatgagtgcgataaaatgctcgagcagctggacatgcgacgagatgtgcaggaaattttcagaatgacgccacacgagaagcaagtcatgatgtttagcgccaccctgtccaaggagatccgacctgtttgtcgaaaattcatgcaagaccctatggagattttcgttgatgatgagacaaagcttacactgcacggtcttcagcagtactacgttaagctgaaggataacgaaaagaaccgtaaacttttcgacttgctggacgtgctagagtttaaccaagagatcacatgtaaatcggtacagaggttctccacaaccaacagctgtggataccagcccatttggccacgccacggtcatcgtgcaggggagcactgtttttag

SEQ ID NO: 231875 - DNA, 972 bp, Artificial Sequence
  derived and/or modified sequence
atggccgagaacgacgtggacaacgagctgctggactacgaggacgacgaggtggagactgccgccggcggtgatggggcagaagctccagccaagaaggacgtgaagggaagctatgtgtccatccactcgtccggtttcagagattttctcctgaaacctgaactactgagggctatcgtggactgtggctttgagcatccaagtgaagtgcagcatgaatgcattccccaggccatcttgggtatggacgtgctctgtcaggctaaaagcggcatgggaaagaccgccgtcttcgttctggcaacattgcagcagctggagccagtgaccggccaagtctctgtattggtgatgtgtcacaccagggagttagctttccaaatctcaaaagagtacgagaggttctccaagtacatgccaaacgtgaaggtcgccgtgttttttgggggactgtcgattaaaaaggacgaagaagtgttaaaaaagaactgccctcatatcgtagtcgggacccccggtcgcattcttgctctggcccggaataagtcactgaatttgaagcatatcaagcacttcattctggatgagtgcgataaaatgctagagcaactagacatgcgacgggacgtccaggaaatttttagaatgaccccccacgagaagcaggtcatgatgttttcagcaaccctctccaaagagatccgacccgtgtgcagaaaatttatgcaggatcccatggagatcttcgtcgatgacgagacgaaattgaccctccacggattgcagcagtattatgtgaagctgaaggacaacgagaaaaaccggaagctgtttgacctcttagatgtactggagttcaaccaggaaatcacgtgcaagtcagttcaaagattttcaacaactaatagctgtggctaccaacccatttggcccaggcatgggcacagggcaggcgagcactgcttttag

SEQ ID NO: 231876 - DNA, 1053 bp, Artificial Sequence
  derived and/or modified sequence
atgtggaccatgagcagctggaccatgaagatgatgcggtggcggcagcaactcggcgagatgggcctacgtcctctcccgcgacgcatgtcccgggctccaatgagccctagcaccgccttggctttcgtgaccagctgcagcagtcagtcctgcagcggccctttgagcaccgtcgccctgtcaatccgacaaaaagttgctgtgttcttcgggggattgagcattaaaaaagatgaggaggtgctgaagaagaactgtccacatatcgttgttggtaccccagggcggatcctggccctcgcacggaacaaaagtttgaatctaaaacacatcaagcacttcatactcgacgaatgtgacaaaatgctcgaacagctcgacatgcgtcgagatgtgcaggaaatctttaggatgaccccgcatgaaaagcaagtgatgatgtttagcgctacattgagtaaggagatcagacctgtgtgtcgtaagtttatgcaggaccccatggagatctttgtggatgacgaaacaaagctgaccctacatggtctgcaacaatactacgtgaaattgaaggataacgaaaagaatcgcaaactgttcgacctattggacgtccttgaattcaatcaggtggtgatctttgtcaaatctgtccagcgatgtatagctcttgctcagctgttggtggagcagaatttccccgccatagctatccaccgaggcatgccccaggaagaaagacttagtagataccagcaattcaaggatttccagaggaggatcttggttgctaccaacttatttgggagggggatggatattgaacgggtaaacatcgcgtttaattacgacatgccagaagactctgacacatacctgcaccgggtggctagagcagggcggttcgggacaaaagggctggccataaccttcgtcagcgacgagaatgatgcgaagatactcaacgatgtgcaggatagatttgaagtgaatatctctgagttgcccgatgaaatcgatattagctcatacatcgaacagacacgatag

SEQ ID NO: 231877 - DNA, 420 bp, Artificial Sequence
  derived and/or modified sequence
atggccgagaacgacgtggacaacgagctgctggactacgaggacgacgaggtcgagacagcagccggaggggacggcgcggaggcgccagctaaaaaggacgtaaagggatcctacgtgtcgattcattctagtggcttccgcgactttctgttaaaacccgaacttttgagggccattgttgattgcggatttgagcaccccagtgaagtgcagcatgaatgcattcctcaggctatattaggcatggacgtcctttgccaagcgaaatcgggcatgggaaagactgccgttttcgtgttagcaaccttgcagcagctggaacctgttacgggccaatcccacgaacacatgacgagcgtcacattggacaacctgacggctgtgggtgacgtcttgtcgcaggcctgggggagttag

SEQ ID NO: 231878 - DNA, 1053 bp, Artificial Sequence
  derived and/or modified sequence
atgtggaccatgagcagctggaccatgaagatgatgcggtggcggcagcaactaggcgagatgggcctcaggccacttccaagacgcatgagccgtgccccgatgtcaccaagcacagcgctcgcctttgtgacctcatgctcttcccagtcttgcagcggcccactctccaccgtggccctgtccattagacagaaggtggcagtcttctttgggggcttgagcattaagaaggatgaagaggttctgaagaagaactgcccgcatattgtggtgggtactcccggccgtattctggctctggccagaaataaatctctgaaccttaagcacatcaagcattttattcttgatgaatgtgataagatgctggagcagctggacatgcgccgcgacgtgcaggaaatattccggatgacaccacatgagaagcaagtcatgatgttctcggcgacactttcaaaagagattcgccctgtgtgtcggaaatttatgcaagatccgatggagattttcgtggacgatgagaccaagctcacgctacacggtctgcagcagtattatgttaaattgaaagataatgagaagaacagaaaacttttcgatttgcttgatgtgctcgaattcaaccaggttgtgatttttgtcaagagcgtgcagcgatgcattgctctggcccagctgctagttgagcagaatttcccggctatcgcgatccaccgcgggatgccacaggaggagaggctgtccaggtaccaacagttcaaggacttccagaggcggattctggtcgctaccaatctcttcggacgggggatggacattgagcgtgttaatattgcattcaactacgacatgccggaagactctgatacttacctgcaccgcgtcgcgcgggccggaaggttcggaaccaaggggctcgctattacttttgtatccgatgaaaatgatgcaaagatcctcaacgatgtgcaggatcgcttcgaagtcaacattagtgaactgccagacgagatcgatatcagttcttacatcgaacagacacgctag

SEQ ID NO: 231879 - DNA, 420 bp, Artificial Sequence
  derived and/or modified sequence
atggccgagaacgacgtggacaacgagctgctggactacgaggacgatgaggtggaaacggccgcgggcggtgacggcgccgaggctcctgccaaaaaggacgtaaagggaagctatgtcagcatccattcttctggttttcgcgactttctgctaaagcctgaattgctgagggccatagtggattgtgggttcgaacacccatctgaagtgcagcacgaatgtatcccacaggctattctggggatggatgtgctatgtcaggcgaagtccggtatggggaagactgccgtgttcgtgctggccactctgcagcagctggagccagtcacaggtcagtcccacgagcacatgacaagcgttactctggataacctgaccgcggtgggcgacgtattatcacaggcttggggatcgtag

SEQ ID NO: 231880 - DNA, 1332 bp, Artificial Sequence
  derived and/or modified sequence
atggccgagaacgacgtggacaacgagctgctggactacgaggacgacgaagtggagactgccgccggaggagatggggccgaagctcctgctaagaaggacgttaaaggctcctatgtatcgattcatagctctggattcagagactttcttcttaagcctgagctgctgcgcgccatcgtggactgcggcttcgagcacccttctgaagtccaacatgagtgcatcccacaggcaatcttaggaatggatgttctgtgtcaggccaagtcagggatgggcaagaccgcagtctttgtgcttgctaccttgcaacagctggaacctgtcacaggccaggtatacctgggaagagtgctcgggcgtgggttctggtgcgtgtttgtgagtgttttagtgatgtgccacacacgagaactggcattccagattagtaaggagtacgagaggttcagcaaatacatgcctaatgtgaaagtcgccgtcttcttcggagggctctccataaaaaaggacgaggaagtgctcaagaaaaactgcccacacattgtggtgggtacacccggccgcatcctcgctctggcccgaaacaagagcctaaacctgaagcacattaaacacttcattcttgatgagtgtgacaaaatgctggaacagttggatatgcgacgggatgtgcaggagatcttccgcatgacccctcacgaaaagcaggtgatgatgtttagcgccacactctccaaagaaatccggccggtgtgtagaaagttcatgcaagatccaatggagatcttcgtcgacgatgaaaccaagctcactttacacggcctgcaacagtattatgtaaaattgaaggacaatgagaaaaatcgaaagctgtttgacctgctcgacgtgctggaattcaatcaagtggtgattttcgtcaagtcggtacagaggtgtatcgcgctggcccagctgctcgtggagcagaatttccccgccatcgccattcataggggcatgcctcaggaggaaagactgtcgcggtaccaacaatttaaagattttcagcgaagaatattagtcgcaaccaatcttttcggaaggggaatggacatagaaagagttaatatcgccttcaactacgacatgcctgaggactccgacacttatctgcatcgggtcgcccgcgcgggacggttcggaacgaagggactggccatcacctttgtgtccgacgagaacgatgccaagatcctcaatgatgttcaggatagattcgaggtgaacatctccgaactgcctgacgagatagacatcagcagttacatcgagcagactaggtag

SEQ ID NO: 231881 - DNA, 552 bp, Artificial Sequence
  derived and/or modified sequence
atggagatcttcgtggacgacgagaccaagctgaccctgcacggcctgcagcagtactatgttaagctgaaggataacgaaaagaatagaaaactgttcgacttgcttgacgtgctggagttcaaccaagtggtcattttcgtgaagagcgtccaacgatgcatcgcactcgcccagctgctggtggaacagaactttccagccatcgcaatacaccgtggcatgccccaggaagagaggtggttgagcagataccagcagtttaaagatttccagcgacgtatcctcgtcgcaacaaacttattcggacggggtatggacatagaaagggtcaatattgctttcaactacgacatgcctgaagactccgacacctatctgcatagggtggctcgggccgggagattcggtactaagggactggcaattacttttgtcagcgatgagaacgatgccaaaatcttgaatgacgtgcaggaccggttcgaagttaatatctccgagcttcccgacgagattgatatatcatcctatattgagcagacccggtag

SEQ ID NO: 231882 - DNA, 1278 bp, Artificial Sequence
  derived and/or modified sequence
atggcagagaatgatgtggacaacgaacttctagactatgaagacgatgaagtcgagactgccgctggaggtgatggggctgaggcaccagctaaaaaagatgtgaaaggctcctacgtttccatccacagctcagggttccgagatttcctgctaaaacccgaacttttgcgcgctattgttgactgcgggtttgaacatccttcagaggtccagcatgaatgtatcccacaggctatcctgggcatggacgtcttgtgtcaggccaaaagcggtatgggaaaaaccgcagtgttcgtgctggccacgctgcagcagctcgagccagtcactggccaggttagcgtactagtcatgtgccatacacgcgagctcgctttccagattagcaaagaatatgagagattctctaagtatatgcccaatgtcaaagtagcggtattttttgggggtctgtctattaagaaggatgaggaagtgctgaaaaagaattgccctcatatagtagtgggcaccccaggtcgaatccttgcactcgcgaggaataaaagcttaaatcttaaacacattaaacacttcatccttgacgaatgtgataagatgctggaacagttagacatgagaagggacgtgcaagaaatctttaggatgacaccccatgaaaagcaagtgatgatgttcagcgcgactctcagcaaggaaataaggccagtatgcagaaaatttatgcaggatcctatggagattttcgtggacgatgagacaaagctcactctccacggacttcaacagtattacgtgaaactcaaggacaatgagaaaaatcgaaagctgtttgatctgctggacgtacttgaattcaatcaagtcgtgatctttgttaaaagtgtgcagcgttgcatcgccctcgctcagctgctggtggagcagaattttcctgcgattgcaatccaccgcggaatgccccaggaagagagactcagtcggtaccagcagttcaaagatttccaacgtaggattttggtggctacaaacctgtttggcagagggatggatatcgaacgggtgaacatcgctttcaactatgatatgcctgaagacagcgatacctacctgcacagatgttatcctctgtcacccagcaggtggcctgaacaggctggcctggccccacgggcttggctcagccacctgtgtcctatgcgaatgatgccaaggagcagcatgatgtgtcgcattgctcttaggtccatccttgtgtcatgtcttatgcggtag

SEQ ID NO: 231883 - DNA, 1287 bp, Artificial Sequence
  derived and/or modified sequence
atggccgaaaacgatgttgacaacgaactcctcgactacgaagatgatgaggtggagactgcagctgggggtgatggcgctgaggcccctgctaagaaggatgtaaagggcagctacgttagcatccactcctccgggttccgcgatttcttattgaagcccgagcttcttcgcgctatcgtggactgcggcttcgagcatccttcagaggtgcaacatgaatgcatcccccaggccatcctgggaatggatgtcctgtgccaggccaagagtggcatgggcaaaacagccgtgtttgtattggccaccttgcagcaactcgaacctgtgacaggacaggtatcagtactcgtcatgtgtcacacccgggaattggcatttcagatatccaaggagtatgaaagattttctaagtacatgcccaatgtcaaggtcgcagtctttttcggaggcctgtcaatcaaaaaagacgaggaagtcctgaagaagaactgtcctcatattgtggtgggtactccaggaaggattctggccctggcgaggaataagtccctaaacctgaagcacattaagcatttcatcctggacgaatgtgacaagatgctggagcagctcgacatgcgtcgcgacgtccaagagatattccgcatgactccccacgaaaagcaggttatgatgttcagcgctaccctaagcaaagagatcaggcccgtttgtagaaagttcatgcaggatcctatggagattttcgtagatgacgagactaaactgaccctgcacggccttcaacagtattatgtcaagcttaaggataacgagaagaaccggaaattgtttgatctgctcgatgtcctagaattcaaccaggtggtgattttcgtgaaaagtgtccagagatgcatcgccctcgcacagctactcgtggaacaaaatttccctgccattgccattcaccgcggaatgccacaagaggaacgacttagccgctaccagcagttcaaagatttccagaggcgcatcctggttgctaccaacttatttggacgcggaatggacatagagagggtgaatattgctttcaactacgacatgcccgaagattctgatacctacctccatagagttgcacgcgctggacgattcgggaccaaaggcctggccatcacttttgtgtccgatgagaacgatgcaaagatcctgaacgacgttcaagataggtttgaggttaatatctcagagttacctgatgaaattgatatcagtagttatatagagcaaacccgctag

SEQ ID NO: 231884 - DNA, 1287 bp, Artificial Sequence
  derived and/or modified sequence
atggcagagaacgatgtggataatgaactattagattacgaggatgacgaggtcgagacggcagccggaggcgatggtgccgaagctccagcaaagaaggatgtgaagggatcctacgtttccattcattcctccggtttcagagactttcttctgaaacccgagctgctacgggctatcgtggactgtggctttgagcatccctctgaggtgcaacacgaatgcatcccacaggcaatcctaggcatggacgtcctctgtcaggccaagtcaggcatgggaaaaaccgcagtgttcgtgctcgcaacccttcagcaactagaaccggtgactggccaggtttctgtcctggtcatgtgtcacaccagagagcttgccttccagatcagcaaagagtatgaacgattttctaagtatatgcccaatgtgaaggtggccgtcttcttcgggggtctgagcatcaagaaggacgaagaggtcctgaaaaaaaactgccctcacattgtggtagggacacctggtcgtatcctcgcccttgctaggaacaagagtctgaacctgaagcacatcaagcatttcatccttgacgaatgcgataagatgcttgagcaattggatatgcgccgagacgtgcaggaaatattcaggatgaccccccatgaaaagcaagtgatgatgtttagcgccactctctccaaggagatccgacccgtttgcaggaaattcatgcaggaccctatggagatcttcgtcgacgacgaaactaaactcactctgcacggcctgcagcagtattacgtgaaactgaaggataacgagaagaacagaaaactattcgatctgttggatgtcctggagtttaaccaggtagttatcttcgtgaaatccgtccagcggtgtatagcactggctcagttactggtcgaacaaaacttcccagccattgctatccaccgcggaatgccacaggaagaacgactcagccgctatcaacagttcaaagattttcaacgcaggatactggttgctactaacttatttggacgcggtatggatattgaacgcgtgaacatagcattcaattatgacatgcctgaggactccgatacctaccttcacagagtggctagagccggaaggtttggtaccaaaggtctggccatcacttttgtgagcgatgagaacgacgctaaaatccttaatgacgtgcaggaccggttcgaagtaaacatcagcgaattgcccgacgagatcgatatctcgtcttacattgagcagacacggtag

SEQ ID NO: 231885 - DNA, 1278 bp, Artificial Sequence
  derived and/or modified sequence
atggctgagaatgatgtcgataatgagcttcttgactatgaagacgatgaggtcgagacagcagctggcggagacggcgctgaggctcccgcaaagaaggatgttaaggggtcctatgtgagtatccactcctcagggtttcgcgactttctcctcaagcccgagctactgagagcgatcgttgattgcggtttcgaacatccctcagaggtgcagcacgaatgcattcctcaggccatcttgggtatggatgtcctctgccaggctaaatctggaatggggaagacagccgtttttgttctcgccactcttcagcagttggagccggtcaccgggcaagttagcgtcttggtaatgtgtcatacacgagaattagccttccagatatccaaggaatacgagcgcttttccaagtacatgcccaacgtcaaggtagcagttttctttgggggactctctataaaaaaagacgaggaggtattgaagaagaattgcccacatatcgtggttgggaccccaggccgtattctggcactggcccgaaataaaagcctcaacctaaaacacattaagcactttattttagacgagtgcgataagatgctcgagcaactcgatatgcgcagagacgttcaggagatatttcgtatgacgccccacgagaaacaggtgatgatgttttccgctaccctgagcaaggagattaggccagtatgtagaaaatttatgcaggatcccatggaaatttttgtggacgacgagacgaaactgactctgcacgggctgcaacaatactacgtgaaattaaaggataacgagaagaatagaaaattgttcgatctgttggacgttctggaattcaaccaggtcgtgatatttgttaaaagtgttcagaggtgtatagcgttggcccagctgttagtagaacagaatttccctgcgatcgccattcatcggggaatgccacaggaggaacggctttctcgctatcaacagtttaaagattttcagagacggatattggtcgccacaaacctatttgggagggggatggatattgagagagtcaatatcgcctttaactatgacatgcctgaagacagcgatacgtatttgcaccgctgttatcccctgagcccatcacggtggcctgaacaggcgggtcttgcgcctcgtgcctggctgagccatctgtgccctatgcggatgatgccgaggtcaagcatgatgtgccggatcgccctgagaagtatccttgtgagctgcctgatgcgatag

SEQ ID NO: 231886 - DNA, 1287 bp, Artificial Sequence
  derived and/or modified sequence
atggctgagaacgacgtggataatgaacttttagattatgaagatgatgaggtggaaacagcagctgggggagacggcgcagaggctcctgcaaagaaagacgtgaagggctcttatgtatccattcactcaagtgggttccgagactttttacttaagcctgagcttctccgggcaattgttgactgtgggttcgagcacccatctgaggttcagcacgaatgcatccctcaggcgatactgggcatggacgtgttgtgccaggctaagagcgggatgggcaaaacggccgtgttcgtcctggccaccctgcagcaactcgagccggtgacaggccaggtatcagtgctcgtgatgtgtcatacccgcgaacttgcttttcagataagtaaggagtatgaaaggttcagcaagtacatgccgaatgtgaaagtagccgtgttctttggcggattgtccatcaaaaaggatgaggaagtgttaaaaaagaactgccctcacatagtggtgggaacccccggacgcatactggcactggctcggaacaagtccctgaatctgaagcatataaagcattttatcctggatgagtgtgataagatgctagaacagctggacatgcggcgagatgtgcaggaaatattcagaatgacaccgcacgaaaagcaggtcatgatgttttcagcaaccctgagcaaggaaattcgccctgtatgtagaaaattcatgcaggaccccatggaaatctttgtggatgacgaaaccaaactgacactgcacggactgcagcagtattacgtgaaactgaaagataacgagaaaaaccggaagctgttcgatctgttagacgtcctcgagttcaaccaggtcgtgatctttgtgaagtctgtgcagcgctgtattgccttagcacaactgctggtggagcagaattttcccgctatagcaattcataggggtatgcctcaggaggagcggctgtccaggtaccagcagttcaaggattttcagcggcgaatcctggtggcaaccaacttgtttggaagaggtatggacatagaacgagtgaatatcgcttttaattatgacatgcctgaggattctgatacatatttgcaccgggtggcacgcgcagggaggttcggaactaagggactggccatcacgtttgtgagcgatgaaaacgacgccaagatccttaacgatgtccaggaccgctttgaggtcaatataagtgagctccctgatgagattgacatctctagctatatcgaacagactaggtag

SEQ ID NO: 231887 - DNA, 1287 bp, Artificial Sequence
  derived and/or modified sequence
atggcagaaaacgacgttgacaatgaacttctggattacgaggacgatgaggtggaaactgccgctggtggggacggagctgaggcccctgccaaaaaggacgttaagggaagctatgtcagcatccattctagcgggtttagagactttctcttgaagccagaactgctacgggcaatagtagattgcggttttgaacatccatctgaggtgcaacacgaatgcatcccccaagccatactcggtatggatgtgctctgccaggctaagtccggaatgggtaagaccgccgtgtttgtgctggccacactgcagcagctggagccagtaactggccaggtgtccgtgcttgtcatgtgccacactcgggagctggcttttcagatttctaaagagtacgaacgtttcagcaaatacatgcctaatgtgaaggtggccgtgtttttcgggggactctccattaagaaggatgaggaggttctcaaaaaaaattgcccccacatagtggttggtacaccagggaggatcctggcgcttgctcgcaacaagtctctgaaccttaaacatattaagcacttcattctggacgagtgtgacaagatgttggagcagctcgatatgcgcagagatgtgcaggaaattttccgcatgacaccccacgagaaacaagttatgatgtttagtgcaacgctttctaaagagatcagaccggtgtgtaggaaattcatgcaggatccaatggaaattttcgttgatgatgaaacgaagctgactcttcatggtctgcagcagtactacgtgaagttaaaggacaacgagaagaatcggaagttattcgacctactcgatgtactggagttcaaccaggtcgtgatctttgtcaaaagcgtgcagaggtgcatcgctctggcccagctactggttgaacagaatttcccggcaatcgcaatacatcgcggaatgccccaagaagagaggctttcacggtatcaacagtttaaggatttccaacgcaggattctggtcgcaacaaacctgtttggtcgtgggatggatatcgagcgagttaatatcgcattcaactacgacatgcctgaggacagtgacacgtacctgcaccgcgtggcgagggcagggaggtttggaacgaaaggcttggccatcacctttgtgtctgatgagaacgacgccaaaatcctgaacgacgttcaggacaggttcgaggtcaacatttcagaacttccggacgaaatcgatattagttcctatattgagcagactcggtag

SEQ ID NO: 231888 - DNA, 564 bp, Artificial Sequence
  derived and/or modified sequence
atgggatcctcacatattgggggactgtccatcaacgagcgcagatgtagcgcaagcttgggactggtaatggctgaaaatgatgtggacaatgaattacttgactatgaagatgatgaagtggagaccgccgctgggggagatggagccgaagcaccagcaaagaaagacgtgaagggctcctatgtgtccatacatagctcagggttcagggactttctgcttaagcccgagttactgcgtgctatcgtagactgcgggtttgagcatcccagcgaggtccagcacgagtgtatccctcaagccatcctgggcatggacgtgctgtgtcaagccaagtctggcatgggaaagaccgcagtcttcgtcttggccacccttcagcaactagagcccgtgaccgggcaagtatctgtactggtgatgtgtcacacgagggagctcgccttccaaattagcaaagaatatgaaagattcagcaagtacatgcctaacgtcaaggtcgccgtgttctttggaggactatctataaaaaaggatgaggaggtgcttaagaagaattag

SEQ ID NO: 231889 - DNA, 1287 bp, Artificial Sequence
  derived and/or modified sequence
atggctgagaatgatgtcgacaatgaactcttggattacgaagatgatgaagtagagacggccgcagggggtgatggagctgaggccccagccaagaaggatgtgaaaggtagctacgtgtctatccactcgagtggtttccgggattttctgcttaaaccagagcttcttcgcgctatcgttgactgtggattcgaacatccttcagaagtgcaacatgagtgcatcccacaagctatcttgggcatggacgtactctgtcaggctaaatcaggcatgggaaagacagcagtgttcgtcttagccaccctccagcagctggaacccgttaccggtcaagtgagcgtgctggtgatgtgtcatacacgcgaactggccttccagatctcgaaggaatatgaaaggttttctaagtatatgccaaatgtgaaggtcgccgtgttcttcggcggattgtctattaagaaagatgaagaggtcctgaagaaaaactgcccacacatcgtggtaggaacccccggtcggattttggcccttgctcgcaataagtcgctaaatctgaagcatattaagcatttcattttagatgaatgcgacaagatgcttgaacagctcgatatgagacgagacgtacaggaaatttttaggatgacgccccatgaaaaacaggtgatgatgtttagcgctaccttatcaaaggagatccggcctgtgtgcaggaagtttatgcaggacccgatggagattttcgtggacgacgaaaccaagctgaccctccacggcctgcagcagtattatgtaaagcttaaggataacgagaaaaaccgcaagctgtttgacttgctcgacgtgctggagtttaatcaggtcgtgatttttgtcaaatctgtgcagcggtgtattgccctcgcccaattgcttgtcgaacagaacttcccagcgatcgccatccataggggaatgccccaggaggagcggctcagtcgttaccaacaatttaaggactttcagcggcgtattctggtcgctacgaatctgttcggacgaggcatggacatcgagagggtaaatatagcctttaactatgatatgcccgaggactctgacacctatcttcaccgcgtggcacgggcagggagattcgggactaaaggcctggctatcacttttgtcagtgatgagaatgatgccaaaattttaaacgatgttcaggatcgattcgaggttaatattagcgagctgcctgacgaaatagacattagtagttacatagagcagactcgctag

SEQ ID NO: 231890 - DNA, 378 bp, Artificial Sequence
  derived and/or modified sequence
atggcggaaaacgatgtggataatgaactgctggactacgaagacgatgaagtggagaccgctgctggcggagacggggctgaagccccagccaaaaaggatgtaaagggctcgtacgtgtccattcattccagtggctttagagattttcttctgaagcctgagctcctgcgggcaatcgtcgactgcgggtttgagcacccatccgaggttcaacacgaatgcattccgcaggcaattctcgggatggacgttctgtgccaagcaaagagtgggatgggcaagacggccgtgtttgtcctggctaccctgcagcagcttgaacccgtgaccggccaggttagcgtcctggtgatgtgccacaccagggagttgtag

SEQ ID NO: 231891 - DNA, 1287 bp, Artificial Sequence
  derived and/or modified sequence
atggctgaaaatgacgtggacaacgagttgctcgactacgaagatgacgaggtagaaactgctgccggaggcgacggcgcagaggcccctgccaaaaaggacgttaagggaagttatgtatcaatacactctagtgggttcagggacttcctcctgaaaccagaactgctacgtgctattgttgattgtgggtttgagcacccctcggaggtgcagcatgagtgtatacctcaggctatcctcggtatggacgtgctgtgccaagccaagagcggcatgggaaaaaccgccgtgtttgtgttagcaacacttcaacagctggaacccgtcacagggcaggtctccgtgctggtgatgtgccatacaagagagctcgccttccaaattagcaaggaatacgagagattttctaagtatatgcctaatgtaaaggtcgctgtgttcttcggcggattgagcataaagaaggacgaggaggtgttaaaaaaaaactgcccgcatattgttgtgggtacaccaggcagaattctcgctctcgccaggaacaagagtctgaacttaaaacatattaaacactttatccttgacgagtgtgataagatgctggaacagctcgacatgcgcagggatgttcaagagatctttaggatgactcctcacgaaaagcaggtgatgatgttttctgctacgctctcaaaagaaattcggcctgtgtgcaggaaatttatgcaggaccctatggagatctttgttgatgacgagactaaactgactttgcatgggctgcaacagtactatgtgaagctgaaagataatgaaaagaatcggaagttgttcgatttactcgatgtactcgaatttaaccaggtggtgatctttgttaaatctgtccagagatgtatagccttggctcagctcctggttgaacaaaactttcctgcaatagccattcacaggggtatgcctcaggaggagcgactgtcaaggtatcagcagttcaaggacttccagagacgcatcctggtagccacaaatctttttgggcgtggaatggatatcgaacgggtcaacatagcattcaactacgacatgcctgaagatagtgatacctacttgcacagggtggcccgtgccggacggttcggaaccaaaggtctggcaatcacattcgtctctgatgaaaatgatgccaaaattcttaatgatgtacaggaccgtttcgaagtgaacatctccgagttgcctgacgaaattgatataagtagctatattgaacaaacccgctag

SEQ ID NO: 231892 - DNA, 564 bp, Artificial Sequence
  derived and/or modified sequence
taatccgaagaaagggatattggcaaacctatggagattttcgtggacgatgagacaaaattgaccttgcatggactgcaacaatattatgtgaagctgaaggacaatgaaaaaaatcgaaagttgttcgatttgctggacgtgctggagttcaaccaggtggtgatattcgtgaagagtgtccaacggtgcatcgcactcgctcaattgctcgtggagcagaattttcccgcaattgcgatccacagggggatgccccaggaggaacgcctgtcaaggtaccagcagtttaaggatttccagaggcgaattttagtggcaaccaatctcttcggcaggggcatggacatcgagcgggtaaatatagctttcaattatgatatgccagaagatagtgatacctacctccaccgtgtggcgcgagccggaaggtttgggactaagggcctcgctattacgtttgtgtcagatgagaacgatgcgaagattctgaatgacgttcaggatcggtttgaagtcaatatcagcgagctcccagatgagattgatataagctcatattag

SEQ ID NO: 231893 - DNA, 378 bp, Artificial Sequence
  derived and/or modified sequence
atggcggaaaacgacgtggacaatgaactgctggattacgaagatgacgaagttgaaacagccgcaggcggtgacggtgctgaggccccagctaagaaagatgtgaagggtagttacgtgtccatccattcatcagggttccgtgactttttactgaaacccgaactgcttcgggctattgtggattgcgggtttgagcaccctagcgaagtgcagcacgagtgtatacctcaggcgatactcggcatggacgttctctgccaggcaaaatccggtatgggtaagactgccgtttttgtgctggctacgctgcagcagcttgagccagtgacaggacaggtgtccgtgcttgtgatgtgtcatacacgagagctgtag

SEQ ID NO: 231894 - DNA, 1287 bp, Artificial Sequence
  derived and/or modified sequence
atggcagagaatgacgtcgataacgaactccttgattacgaggacgatgaagtagagacagcggctggtggcgacggcgctgaggcaccagcaaagaaagatgtcaaggggtcgtatgtaagcattcacagtagtgggttccgggactttctactgaaaccagagctcctgagggccattgtcgattgtggcttcgagcaccctagcgaagtgcagcacgagtgcatccctcaggcaatcctgggaatggatgtgctgtgtcaggccaagagcggcatggggaagacggctgtgtttgtgctcgcaaccctgcagcagctggaacctgtgaccggacaggtttctgtcttggtcatgtgccacactagggaacttgcattccagatttctaaagaatatgagcggtttagtaagtacatgcccaatgttaaagtagcagtttttttcgggggattgtccatcaaaaaggatgaagaagttcttaagaagaattgcccccacatcgtggtgggcacacccggaagaatcctcgctttggcaagaaacaagagtctgaacctgaagcacatcaagcattttatcctggacgagtgtgacaagatgctggagcagcttgacatgcgacgggatgtgcaagagattttcaggatgactccacacgaaaagcaggtgatgatgttttccgcaaccctgtctaaagagatacgccctgtctgtcggaaatttatgcaggaccctatggaaatcttcgttgacgacgagactaagctgacactgcatggactccaacagtactacgtcaaactcaaagataacgagaaaaatcgtaagcttttcgatctgctggatgtactggagttcaaccaggtcgtgatttttgtaaagtcagtacaacggtgcattgccttggctcaactgctagtcgagcagaacttcccagcaattgcaatccatagaggcatgccccaggaggagagacttagccggtatcagcaattcaaggactttcagaggcgaatcctcgtcgccaccaacttgtttgggagagggatggacatagaaagggtgaatatcgcgtttaattacgacatgcccgaggactcagacacgtatctccaccgggtcgctagggccggacggtttggcacaaaggggctggctatcacgtttgttagtgatgagaacgacgcaaaaattctcaacgacgtccaagacagattcgaagtgaacatttctgagcttcctgatgagattgacatatcttcgtatatcgagcagacaagatag

SEQ ID NO: 231895 - DNA, 870 bp, Artificial Sequence
  derived and/or modified sequence
atggccgaaaacgacgtggacaacgaactgctggactatgaggacgatgaggtagagaccgccgctgggggtgatggggctgaagctccggcaaaaaaagacgtgaaagggagctacgtgagtattcatagtagcggtttccgggactttcttctcaagccggaactgttgagggctattgtcgattgtggttttgaacatccgagcgaggttcagcacgagtgtatcccccaggccatcctgggaatggacgtgctgtgccaggccaaatctggcatgggtaagacagccgtgtttgttctggcaacactccaacagctagaacccgtgacagggcaggtgagcgtgctggtcatgtgtcatactagggagctggcattccagatctctaaagagtacgagcgcttttcgaaatatatgccaaatgtcaaggtggctgtgtttttcgggggtttgtcgataaaaaaggatgaggaagtgctgaaaaaaaattgcccacacatagttgtggggacaccgggtcgaatcctcgctctcgccagaaataagagcttgaaccttaaacacatcaagcacttcatcttagacgagtgtgataaaatgctcgagcagctggacatgagacgagatgtgcaggaaattttcagaatgacaccccacgagaagcaagtgatgatgtttagtgccaccctgagcaaggagatcaggccggtgtgtcggaaattcatgcaggacccaatggaaatctttgtggatgacgaaacaaaactaacccttcatggacttcaacaatactacgtgaaattaaaggataacgaaaaaaaccggaagttgttcgatttacttgatgtgctcgagtttaaccagtag

SEQ ID NO: 231896 - DNA, 1287 bp, Artificial Sequence
  derived and/or modified sequence
atggccgaaaatgacgtagacaatgaactcctcgactatgaggatgacgaggtcgagacggctgccggaggggatggggctgaagctcccgctaaaaaggacgtgaaggggagttacgtgtctatacactcgagcggcttcagagacttcctgttaaaacccgagctgttacgcgcaatcgtcgattgtgggtttgagcaccccagcgaggtgcagcacgaatgcatccctcaggcgatcctcggcatggacgtgctgtgtcaggccaaatcagggatgggaaagactgcggtttttgtgcttgccacattacagcagttggaacccgttacagggcaagtgtctgtgctggtgatgtgtcatacaagggagctggcatttcagattagcaaggaatatgagcgcttttccaaatacatgccgaacgtcaaggttgcagtattctttggcggactctccatcaaaaaggatgaagaggtgctgaagaagaattgtcctcatatagtcgttggaacgccagggaggattctggccctagcgcgtaataaatctctgaacctgaaacacatcaaacatttcatcctggacgagtgcgacaaaatgctggagcagctggacatgcggagggacgtccaggaaatatttcggatgaccccccatgaaaaacaagtcatgatgttcagcgcaactctcagcaaagagatcaggcccgtctgcagaaaattcatgcaagatcccatggagattttcgtcgacgacgaaacaaagttaacacttcatggcctccagcagtactacgtcaagctcaaagataacgaaaaaaaccggaagctgttcgatttactcgatgtgttagagttcaaccaggttgttatattcgtcaagtccgtgcagagatgtattgccttagcgcagctgctggttgagcagaattttcccgctatcgctatccaccggggtatgcctcaggaggaacggctctctaggtaccaacagtttaaggattttcagcgtcgcatcctcgtggccaccaacttgttcggcagagggatggacatcgagcgagttaatatagcgttcaactatgatatgcctgaggacagcgacacctaccttcatagggttgcgagagcaggccgttttggcaccaagggccttgccatcacttttgtgtctgacgagaacgatgctaagatactcaatgatgtgcaagatcgatttgaggtgaacatttcggagttgcccgatgagatagatattagcagttatatagagcagaccagatag

SEQ ID NO: 231897 - DNA, 291 bp, Artificial Sequence
  derived and/or modified sequence
atggcagaaaatgacgtggacaatgagttgttagattatgaagacgatgaggttgaaacagctgctggaggggatggagcagaggcacctgcaaaaaaggacgtgaaaggtagctacgtttctatccactcctcaggatttcgggactttttgttgaaaccagagctgctgcgggctattgttgattgcggtttcgaacacccctctgaggtccagcacgagtgtatcccccaggcgattctcggcatggatgtcctttgccaggctaaatccgggatgggaaagacgtag

SEQ ID NO: 231898 - DNA, 378 bp, Artificial Sequence
  derived and/or modified sequence
atggccgagaacgacgtcgataacgagctgcttgactacgaagatgacgaggtggagaccgccgctggcggtgacggagctgaggctcctgcaaaaaaggacgtaaaaggctcatacgtatctattcactcctctgggttccgggacttcctgttaaaacccgagcttttacgcgcaatcgtggattgcggttttgagcaccctagcgaggttcaacacgagtgcatacctcaggctatattgggaatggatgtactatgtcaggctaagtccgggatgggtaagaccgctgtattcgtgctggccaccttgcagcagcttgagccggtcaccggccaagtgtcagttctagtcatgtgccatacccgagaactctag

SEQ ID NO: 231899 - DNA, 696 bp, Artificial Sequence
  derived and/or modified sequence
atggcggagaatgacgtcgataacgaactgctggactatgaggacgacgaggtcgagaccgctgccggaggcgatggtgctgaggcacctgctaagaaggacgtgaagggctcctatgtgtctattcacagctcagggttcagagatttcctgcttaaaccagagttgctcagagccatagtcgattgcggcttcgaacatccatcggaggttcagcatgaatgcattcctcaggccatcctcgggatggacgtactgtgtcaagctaagagcgggatgggcaaaacagcagtgtttgtcttggctaccttacagcagctagaacctgtgaccggccaggtctccgtgctggtgatgtgccacacccgcgagctcgcctttcaaatcagcaaggagtacgagcgatttagcaaatacatgccaaacgtcaaggtggctgtgttcttcggtggcttaagcatcaagaaggatgaggaggtgctgaaaaagaattgtccacacatcgttgtgggcacacccggacggattctggctctagcacgaaacaagagtctcaatttgaagcatatcaaacactttattttggatgagtgcgataagatgctggagcagcttgatatgcgcagggatgtacaggagatctttagaatgacccctcatgaaaaacaagtcatgatgtttagcgcgacattgtag

SEQ ID NO: 231900 - DNA, 399 bp, Artificial Sequence
  derived and/or modified sequence
atggccgagaatgatgtcgacaatgagctcctagactacgaggatgacgaggtggaaaccgccgctggaggtgatggcgcagaggcaccggcaaagaaggatgtgaaagggtcctatgtctctatccatagctcaggcttccgggattttttactgaagcccgagctgctcagagctattgtagactgcggtttcgaacatccttcggaagtgcaacacgaatgtatccctcaggccattctaggaatggatgtcctctgccaggcaaaatctgggatgggtaagacggcagtgtttgtcctggcaaccctccagcagctcgagccggttacaggacaggtgtgcttttgcgatagccacttcccaagaggggataatgaagagttacacctaccctag

SEQ ID NO: 231901 - DNA, 1053 bp, Artificial Sequence
  derived and/or modified sequence
atgtggaccatgtcatcctggacaatgaaaatgatgcgatggcggcagcagctaggcgaaatgggattacgccctcttccacgtcgcatgtcacgcgcaccaatgagtccatctacagcgctcgcctttgtgacttcgtgctcctctcagagttgtagcggcccactgagtacagtggccctctctattcggcagaaagtggctgtctttttcgggggactgtctatcaagaaggacgaggaagtgctcaagaagaactgcccgcatatcgtggtcgggacccccggtcggatcttggccctggctcggaataagagtctgaatctcaagcacatcaagcactttattttagatgaatgtgataagatgttggaacagttagacatgaggcgagatgtgcaagagatctttaggatgacaccacacgaaaagcaagtgatgatgtttagcgctactttgagcaaggaaatcaggcccgtatgccgcaagttcatgcaggatccaatggagattttcgttgatgatgagaccaagctgactctgcatggcctgcagcagtactacgtgaagttgaaggacaacgagaaaaatagaaaacttttcgatctgctcgatgtattagagttcaatcaagtggtaatctttgtgaagtcagtccagcgctgtatcgctctggcgcagcttttggtcgaacagaacttcccagccatcgccatccatcgaggcatgccccaagaggaaagactctcgaggtaccagcagtttaaggactttcagaggagaatcctcgtggccacaaacctgtttggcagagggatggacatcgagagggtaaacatagcttttaattacgatatgccagaggactccgatacatatctgcatagggtggcaagggccggaaggtttgggacgaaaggcttggccataacttttgtctccgacgaaaatgatgccaagatcctgaatgatgtccaggacaggtttgaggtgaatatctctgaattaccagacgagatcgatatatcatcttacattgaacagacacgatag

SEQ ID NO: 231902 - DNA, 738 bp, Artificial Sequence
  derived and/or modified sequence
atgtggactatgagctcctggaccatgaagatgatgcggtggaggcagcaattgggtgagatggggctccgccctctacctagacgcatgagtagagccccaatgtcaccatcaaccgctctggcctttgttacttcatgcagctcacagtcatgctccgggcctttaagcactgtcgcactatcaattcgacagaaagtcgccgtatttttcggaggactcagcatcaaaaaagatgaagaggtgctgaaaaaaaactgcccacacatcgttgtggggacccctggaaggatcctggccctcgcgcgtaataagagccttaaccttaagcacattaaacacttcatactggacgagtgcgataagatgctggagcagctcgatatgcggagagatgtccaggagatcttccgaatgactccgcatgaaaaacaagtgatgatgttctctgctaccctgagcaaggaaattaggcccgtctgcaggaagtttatgcaggaccccatggaaatcttcgtggacgacgagactaagttgaccctccacggattgcaacagtattatgtgaagctcaaggacaacgaaaagaatcgaaaactgttcgatttattggacgtactcgaattcaaccaggttgtgatctttgtgaagtctgtgcagagatgcatcgccttggcacagctcctagtggagcagaatttcccggcaattgctattcacagaggtatgccacagtag

SEQ ID NO: 231903 - DNA, 411 bp, Artificial Sequence
  derived and/or modified sequence
atgggcggtggcaggcgaccctacgatgtcttcttctccaaagtgatggctgagaatgacgtggacaacgagcttctggattacgaggacgacgaggttgagaccgcggctggcggagacggagccgaagccccagccaagaaggatgttaaaggctcctacgtcagtatccacagtagcggctttagagacttcctcttaaagcccgagctgctccgtgcaatcgtcgactgtggcttcgagcacccatcagaagtccagcacgaatgcatcccccaggctattctgggtatggacgtattgtgtcaagccaagagcgggatgggaaagactgcagtgtttgtacttgcgaccctgcagcagttggagcctgttaccgggcaagtgtctgttctggtgatgtgccattag

SEQ ID NO: 231904 - DNA, 1287 bp, Artificial Sequence
  derived and/or modified sequence
atggccgaaaatgatgtcgataacgagctactcgactacgaagacgatgaggtggaaacagcggctggtggagacggggcagaagcgccagcgaagaaagacgtgaagggttcttacgtgtccatacattctagcgggtttagagactttcttttaaaacccgagctgctgcgagctattgtggactgtggctttgaacacccctccgaagtgcaacacgagtgcatccctcaagcaatattggggatggacgtgctatgtcaagctaaatccggtatggggaaaacggctgtgttcgttctcgctacgcttcagcagctcgagcctgtgactggacaagtgtcagtgctcgtgatgtgtcacacccgagaactggccttccaaatttccaaagagtatgaacggttctctaagtacatgccaaatgtaaaagtggccgtttttttcggtgggctgagcataaaaaaggacgaggaagtgttaaaaaagaactgtcctcatattgtcgtggggactcccggtaggatcctggccctagcgagaaacaagagcctgaacctcaagcacattaagcactttattcttgacgagtgtgacaagatgcttgaacagctggacatgaggagagacgttcaggagatttttcggatgacgccccacgaaaagcaagtgatgatgtttagcgccactctaagcaaggagatcaggccagtatgcagaaaatttatgcaggatcctatggagatttttgtggacgacgaaactaaactcacgcttcacggcttgcagcagtattatgtaaaactgaaggataacgagaaaaacagaaagctcttcgacctgctagacgtgctcgaatttaatcaagtagtcatatttgttaagtcagtgcagaggtgtatcgctctggcccagctactcgtagaacagaacttcccggctatcgccattcaccggggtatgcctcaggaggaacgccttagtcgctatcagcaattcaaggacttccaacgcaggattctcgtggccaccaacctgttcgggaggggcatggatatcgagcgggttaatatagccttcaattacgatatgccagaagattccgatacgtacctccacagagtggcgagggcagggagattcggcacaaagggcttggcaattaccttcgtcagcgatgagaacgatgccaagatactgaacgatgtgcaggataggtttgaggtgaacattagcgagctccccgacgaaatcgacatttcatcctatattgagcaaacccgatag

SEQ ID NO: 231905 - DNA, 594 bp, Artificial Sequence
  derived and/or modified sequence
atggctgagaacgacgtcgataacgaactgctggactacgaggacgatgaagtggaaacggccgcaggaggggacggggcagaggcgcctgctaagaaagacgtgaagggtagctacgtcagtattcactccagtggctttcgagatttcctgcttaaaccagagctgttaagagcaattgtggactgcggattcgagcatccatcggaagttcagcatgagtgtatcccacaagccattttaggaatggatgttctttgtcaagccaaatctggcatgggtaagacagctgtattcgtactcgcaaccctgcagcagctggagcccgtgacaggtcaggtctgcttctgtgacagtcactttcccagaggtgataacgaggagctgcatctgccctacgtcagcgtatactttctccctaaggtgtccgttcttgtaatgtgtcacacacgggaacttgccttccagatttcaaaggaatacgagcggttctctaaatatatgcccaatgttaaggtggctgtttttttcggcggattaagcataaagaaggacgaggaagtgcttaagaaaaattgcccccacattgtgtag

SEQ ID NO: 231906 - DNA, 570 bp, Artificial Sequence
  derived and/or modified sequence
taggctaccttacagcagctcgagcccgtgacgggtcaggtcagcgtcctggtcatgtgtcacacaagggagcttgcctttcaaatctctaaggaatacgagcggttctcaaaatacatgcctaatgtgaaagtagccgtgttttttggcggattgagtatcaaaaaggatgaggaagtgctgaagaagaattgtccccacatcgttgtgggcactcctggccgaattctggctctggccaggaacaaaagtctgaacctgaagcatataaaacatttcattctggatgagtgcgacaaaatgcttgagcagctggacatgcgaagggatgtgcaagaaattttccggatgacgcctcacgagaagcaggttatgatgtttagtgccacactctccaaagagatccgtccagtctgccgcaaattcatgcaggaccccatggaaatcttcgttgatgatgagaccaagctcaccctccatggtctgcagcagtattatgttaagctcaaggacaatgaaaagaatagaaaactcttcgacttgctcgacgtgctggagtttaaccagtag

SEQ ID NO: 231907 - DNA, 1287 bp, Artificial Sequence
  derived and/or modified sequence
atggccgaaaatgacgtggacaatgaactgctggactacgaggacgacgaagtggagactgccgctgggggtgatggcgctgaggctcctgcaaaaaaggacgtcaagggcagctacgtgagtatccattcctccggattccgggacttccttctcaagcccgagctgctgcgggctattgtggattgcggcttcgagcacccatccgaggtgcagcacgaatgtatcccacaggccattctagggatggatgtgctgtgtcaagcaaaatctggaatgggaaagacagccgtattcgttctcgcgaccctgcaacaactggagccagttacggggcaggtctcagtgctcgtgatgtgtcataccagagagctggcctttcagatatccaaagagtacgagcgcttcagcaagtacatgcccaatgtgaaggtggctgtgttcttcggtggcctgtctatcaaaaaggacgaagaagtactaaagaaaaattgcccacacatagtggttgggactcctggcagaatcctagccttagccagaaacaagtccctgaatcttaaacacattaaacacttcattctggacgagtgcgataagatgctcgagcagctagatatgcgcagagatgtgcaggagatctttcgcatgactccacatgagaaacaggtgatgatgttttcggcaaccctgtcaaaggaaatcaggcccgtttgtcggaagttcatgcaagacccaatggaaatcttcgtggacgacgagacaaagttaactctacacggcctacagcagtactacgtaaagctaaaggacaatgagaaaaatagaaaactcttcgacctgttggatgtgttagaattcaatcaggtcgtgatctttgtgaagagcgtgcagagatgcatcgcattagcccaattgttggtggaacaaaacttccctgccatcgcgatccatagaggcatgccacaggaagagaggttgtctagataccaacagttcaaagactttcaacggagaatcctagttgccactaacctcttcggtcggggtatggacatcgaacgggtgaacattgcattcaattacgacatgccggaagattccgacacctacctgcacagagtggctagagccggtcgtttcgggactaagggactagctatcaccttcgtttccgacgaaaacgacgccaaaatcctgaatgatgtgcaggacaggttcgaagtgaatatcagcgagctgccagatgagatcgacatctcaagctatattgaacagacccgctag

SEQ ID NO: 231908 - DNA, 711 bp, Artificial Sequence
  derived and/or modified sequence
atggctgaaaatgacgttgacaatgaactcttggactatgaggacgatgaagttgagacagcagctggtggtgatggagcagaggcccctgcaaaaaaggacgtcaaaggcagttacgtttccatccactcgtcgggctttagagattttctcctcaaacctgaacttctgcgtgctatcgtggactgtggattcgaacacccttcagaggttcaacacgaatgtattccacaagcgatcctcggcatggatgttttatgccaggccaagtcgggaatgggcaaaacggccgtgttcgtcctcgccacacttcagcagctggagccggtaaccgggcaagttagtgtgttggtcatgtgccacacacgcgagctggcattccagattagtaaagaatacgaacggtttagcaaatatatgccgaacgtgaaggtggccgttttctttggcggattgagtatcaagaaagacgaggaagtgctcaaaaagaactgtccacatatagtcgtggggactcctggaagaatcttagccctcgccagaaataaatcgctcaacttaaagcacattaagcactttattttggatgaatgcgataagatgctcgagcagctggacatgcgcagagacgttcaggaaatattccggatgactccacatgaaaagcaagtcatgatgttcagcgccacattatcgaaagagatccggtag

SEQ ID NO: 231909 - DNA, 564 bp, Artificial Sequence
  derived and/or modified sequence
atgggttcctcacatatcggtggactatcaatcaatgagaggcgacggagtgcctctcttggtctggtaatggccgagaatgacgtcgataatgaactgctggattatgaggacgatgaagtagagacggccgcaggaggagatggagcggaagcgcctgctaaaaaggacgtcaaaggatcctatgtttccatccattcctctggcttccgtgacttcctcttaaagccggagctgttgagagctattgtggactgcggattcgaacacccgagtgaggtgcaacacgagtgcataccccaagccatcctcgggatggatgtgctctgccaagcgaagagcggcatggggaagaccgccgtgtttgtcttggccacgttacagcagctggagcccgtgaccggacaggtgagcgtactggttatgtgccatacaagagagttggctttccaaatcagtaaagagtatgaacggttcagcaaatacatgcccaatgtgaaggttgcagtcttctttgggggactgtccatcaagaaagacgaggaggtgctgaagaaaaattag

SEQ ID NO: 231910 - DNA, 399 bp, Artificial Sequence
  derived and/or modified sequence
atggcggagaatgacgtggacaacgaattgctcgactatgaggacgacgaggtggaaacggctgctggcggagacggagccgaggccccagccaagaaggacgtgaaagggtcatatgtgagcatacactcttcaggctttagagacttcctactgaagcccgagctgctacgtgccatagttgattgcggcttcgagcacccgagcgaggtgcaacacgagtgcatccctcaagccatcctcggaatggatgtgttgtgccaggctaagagtgggatgggcaagacagccgttttcgtgttggccacacttcagcaactggaaccagtgactggccaagtgtgcttttgcgacagtcactttcctcgcggagacaacgaggagctccatctgccatag

SEQ ID NO: 231911 - DNA, 1332 bp, Artificial Sequence
  derived and/or modified sequence
atggcggaaaacgacgtagacaacgagttgctggattacgaggacgatgaagtggagactgccgctggcggtgacggtgccgaggcccctgcgaagaaggatgtgaaagggtcttacgtctcaatccacagcagtggatttcgagactttctgctgaagccagagctgcttagggccattgttgactgcggcttcgagcacccttctgaagttcagcacgagtgcataccgcaggcaatcttagggatggacgtcctgtgtcaggcaaaatcaggaatgggcaagacggctgtctttgtcctggccaccctccaacagttggagcctgtaacagggcaggtgtacctcggtcgagtccttgggcgtggattctggtgcgtgtttgtgagcgtgttggtgatgtgtcatacgagagaactggcgttccagatctcaaaagagtatgagcggttctctaaatatatgccaaacgtgaaggtggcagtttttttcggcggattgagcatcaagaaagacgaggaggtgttgaaaaaaaattgccctcacattgtggtcggaacacctgggagaatcctggccctagccagaaataaaagcctcaatctcaagcacataaagcacttcattctggatgaatgcgataaaatgctggaacagctcgacatgaggagggatgtccaggaaatcttccgcatgactccccacgagaagcaggttatgatgttcagcgcaactctcagcaaggagatccgacccgtgtgccggaagtttatgcaagatcctatggagatattcgtggacgacgaaacaaagctgactctgcatgggctgcaacagtactatgtcaagctgaaagataacgaaaagaaccgcaaactgtttgatctcctggacgtgttagagtttaaccaggtcgttatttttgttaaaagcgtgcagaggtgcatcgccctcgcccagctcctagtggagcaaaactttcccgctatcgctatccatcggggaatgccccaggaggaacgcctttctcgctaccagcagtttaaggactttcagagaagaattctcgtggccactaatttattcggacggggtatggacattgaacgggtgaacattgccttcaactacgatatgccggaagatagtgacacctatctacaccgcgtcgcaagagcagggaggtttgggactaaggggctagcaataacttttgtttccgatgaaaatgacgccaaaatcctgaatgacgtgcaggataggtttgaggtgaacataagtgaacttcccgatgagattgacatctcaagctatatcgagcagactcgctag

SEQ ID NO: 231912 - DNA, 870 bp, Artificial Sequence
  derived and/or modified sequence
atggccgagaatgatgttgacaacgagctgttagattacgaggacgacgaggttgagaccgctgccggaggcgatggggcagaggcaccggctaagaaggatgtcaaaggatcttatgtgtccatccacagctcgggtttcagggatttcctgctgaagccagagctactccgggctatagtggattgcgggtttgagcacccatcggaagtacagcacgagtgcatacctcaggcaattctgggaatggatgtgctttgccaggccaaatccgggatggggaagaccgcagtttttgttcttgccactctccagcagttggagccagtgaccgggcaggtctcagtgctggtgatgtgtcatacccgtgagctcgcttttcagatatccaaggaatacgaaagatttagcaagtacatgccaaatgtcaaagtcgcagtcttttttggaggcttgtccattaagaaggatgaagaagtgttaaagaaaaattgcccacatatcgtggtgggaacgcctgggcgaatcctagcgctcgcccgtaataagtctctgaatctgaagcatataaagcacttcattctggatgaatgcgacaaaatgctggaacaattagatatgaggcgtgacgttcaggagattttcaggatgaccccccatgaaaaacaggtgatgatgttctccgcgacactatcaaaagaaatacgccctgtgtgtaggaagtttatgcaagatcccatggagatcttcgtcgatgacgaaaccaaactcactctgcacgggctgcagcagtactacgtgaaactcaaggacaacgagaagaatagaaagctctttgacctgttggatgtgcttgagttcaaccagtag

SEQ ID NO: 231913 - DNA, 564 bp, Artificial Sequence
  derived and/or modified sequence
taatcagaagagagggatatcggcaagcccatggaaatatttgtggatgacgaaaccaagttaacgcttcacggtctgcaacagtactatgtgaaactgaaggataacgagaaaaatcgcaaactgttcgacctgctggacgtcttggaatttaaccaggtcgtcattttcgtgaagtccgtgcagagatgcattgcactggctcagcttctggtggaacagaacttcccggctattgctattcaccggggaatgcctcaggaggagcgcctgtcacggtaccagcaatttaaagactttcagcgcaggatattggtggcgacaaatctcttcgggaggggtatggacatagagcgagtcaatattgccttcaactacgacatgccagaagattccgatacttacttgcatagggtggcacgcgcaggaaggttcggaacaaagggtttagccattacatttgtttctgatgaaaacgacgccaagatcttgaacgacgtgcaagacaggtttgaggtaaacatcagcgagctacctgacgaaatcgatatatctagctattag

SEQ ID NO: 231914 - DNA, 411 bp, Artificial Sequence
  derived and/or modified sequence
atgggaggtggtaggcggccttacgatgtgttcttctctaaggtgatggcagaaaacgatgtggataacgaactactcgactacgaggacgatgaagttgagacagccgcagggggagatggagcagaagcgcctgctaagaaagatgtcaaaggaagctacgttagcatccatagcagtggctttcgagatttcttgctgaaacccgagctcctgcgggctattgtcgattgcggtttcgaacacccttctgaggtgcagcacgaatgtattccacaggctattctcgggatggacgttttgtgtcaggccaaatccgggatgggaaaaacggctgtctttgtgttggcgaccttgcagcagctggagcctgtgacaggtcaggtctcagtcctggttatgtgtcactag

SEQ ID NO: 231915 - DNA, 411 bp, Artificial Sequence
  derived and/or modified sequence
atgggcggtggaaggaggccgtatgatgtttttttttcaaaagtgatggccgagaacgacgttgataatgaactactggattatgaggatgatgaagtggagacagcagctggaggcgatggagccgaggccccagctaagaaagacgtgaagggctcatatgtgtcaatacactcttcaggctttcgagatttcctgctgaagcctgagctgttacgcgcaattgttgactgtgggttcgagcatccttctgaggtccagcacgagtgcatccctcaggctatcctgggcatggacgtgctgtgtcaggctaagtcgggcatggggaaaacagccgtgtttgtgctggccaccctccagcagctcgagcccgtcacaggccaggttagcgtgctcgtgatgtgccactag

SEQ ID NO: 231916 - DNA, 399 bp, Artificial Sequence
  derived and/or modified sequence
atggctgagaatgacgtcgataacgaactgttagactacgaggacgatgaggtggaaaccgccgcaggcggtgacggcgctgaggccccagcgaagaaagatgtgaagggttcttacgtgagtatccacagctcaggattcagagacttcctgctgaaaccagagctgctgagagcaatcgtggactgtggattcgagcacccttccgaggtgcaacacgagtgtattccccaggctatacttggaatggacgtactctgccaagcaaaaagcgggatgggtaaaaccgcggtcttcgtgctggcaactctacagcagctcgagccagttactgggcaggtttgcttctgtgactcccatttccctcggggagacaacgaggaattgcacctgccctag

SEQ ID NO: 231917 - DNA, 711 bp, Artificial Sequence
  derived and/or modified sequence
atggctgagaacgacgttgataatgaactcctggactacgaggacgacgaggtggaaacagcagccggtggcgatggcgcagaagcacccgcaaaaaaagacgtcaagggaagttacgtctccatccactcctcaggctttcgcgacttccttctcaagccggaacttctccgagctattgtcgattgcggcttcgagcacccttcagaggtacagcacgaatgcattccacaagccatcctgggaatggacgtcctgtgccaggccaaatccggaatggggaaaaccgccgtttttgttctagccaccttacagcaactggagccagtcacagggcaggtttctgtactggttatgtgccacacacgagaacttgctttccagatctcaaaggagtacgagagatttagcaagtatatgcctaatgtgaaagtggccgtcttcttcggaggcctttcaattaaaaaggatgaggaggtcctaaagaaaaattgtccccacattgtcgtggggacacccggtagaatcctcgctttagcgcgtaataagagtctcaacctgaagcacatcaagcactttattttagatgaatgcgataagatgctggagcagctggatatgcgtagagacgtccaagagatctttagaatgacaccacacgaaaagcaagttatgatgttttctgctactctgtccaaggagatccggtag

SEQ ID NO: 231918 - DNA, 378 bp, Artificial Sequence
  derived and/or modified sequence
atggctgaaaacgatgtagataacgaactgcttgactatgaggacgacgaggtcgagaccgcagcgggtggcgacggtgccgaagcgccagcaaagaaggatgtcaaggggtcctatgtttccattcatagctctggttttcgcgattttctgctgaagccagagctcttaagggctattgtggactgtggcttcgagcatccctccgaagttcaacatgagtgcatccctcaggccattctgggaatggatgtgctttgccaggcaaaatccggcatggggaagactgccgtcttcgttctcgccactctgcaacaacttgaacctgtcactggacaggtttctgtgctggttatgtgccacacccgggaattatag

SEQ ID NO: 231919 - DNA, 987 bp, Artificial Sequence
  derived and/or modified sequence
taagcgactttacagcagctagagccagtcacaggacaggtctcagtgctggtcatgtgccacactcgcgagctcgccttccagatatccaaagagtatgagcgcttcagtaaatatatgccaaacgttaaggtggccgtgttttttggcggtctctctatcaagaaggatgaagaggtcctcaaaaagaattgtccccacattgtagtggggacacctggacggattctggcactggcccgaaataagagcttgaacctcaaacatattaaacacttcatcttggatgagtgcgataaaatgttggaacagctcgacatgaggcgggatgtccaggagatctttcggatgacaccacacgagaaacaggtgatgatgttctccgctaccctctccaaagagatccggccagtgtgccgcaagtttatgcaggaccccatggagatctttgtggatgacgagacaaaactgacactccacggcctgcagcaatattatgttaaactgaaggacaatgaaaagaataggaagctgtttgacctgcttgacgtcctggagttcaaccaggtggtcatcttcgtgaaatcagtgcagcgctgcattgccctggcacagctgcttgtggagcagaacttccctgcgatcgcaatccatcggggaatgccgcaagaagagcgtctgtcacgctaccagcagttcaaagacttccagcggaggattttggtcgccactaacctgtttggaagaggcatggacattgagagggtgaatattgcattcaactacgacatgcccgaggatagcgatacatatctgcatcgggtagccagagccggacggttcggaaccaaaggattggctatcacattcgtgtcagacgaaaatgacgcaaagatcttaaacgacgtgcaggacaggtttgaggtaaatatcagtgaactcccagacgagatagacatcagtagttacatcgagcaaactcggtag

SEQ ID NO: 231920 - DNA, 711 bp, Artificial Sequence
  derived and/or modified sequence
atggccgaaaacgacgtagacaacgagctgcttgattacgaggatgacgaggtggagacggcggcaggcggagacggggcagaggcaccagcgaagaaggatgtgaaggggtcttacgtgtcaattcactcaagcgggtttcgggactttctactgaaaccagagttactgcgtgccatcgtggactgcggtttcgaacatccttccgaggtgcaacacgagtgtatcccacaggcaattctagggatggatgttctctgtcaggccaagtctggaatggggaagactgccgttttcgtcctggccacccttcagcagctggaaccagtgaccgggcaggtgagcgttctggttatgtgtcatacgcgtgagctggcattccagattagtaaggaatatgaaaggttctccaaatacatgccgaatgtaaaggtggctgtgttttttggcggtttgtctattaagaaagatgaagaagttctcaagaagaattgcccccatatcgtggtcggaaccccaggacgtatcttggccctcgctagaaacaagtcactgaatcttaaacatataaaacattttatactcgatgagtgtgataaaatgttggagcagctggatatgcgccgagacgtgcaagaaatttttagaatgactccccatgagaagcaggtgatgatgttttctgctaccctgtccaaagagatccgctag

SEQ ID NO: 231921 - DNA, 564 bp, Artificial Sequence
  derived and/or modified sequence
taaagcgaagagcgcgatatagggaagcccatggagatttttgtcgatgatgagactaagctgacgctgcacggactccagcagtactatgttaaactgaaggacaacgagaaaaacaggaaactcttcgatttgctagatgtactggaatttaaccaagtcgtcattttcgtcaagtctgtgcagagatgcattgctctggctcagctcctcgtggagcagaactttcccgcaatcgctattcacagggggatgcctcaggaggagcggctgagccggtatcagcagtttaaagactttcagcgaagaatactggtggcaaccaacctcttcggcagaggcatggacattgaaagagtcaacattgcgttcaactacgacatgcctgaagattcagatacatatcttcacagggtggcccgagcaggcagattcggcacaaagggactcgcaattacttttgtgagcgacgagaatgatgccaagattctcaatgacgtgcaggataggtttgaagtgaacatatctgaactacctgatgagattgatatcagtagttactag

SEQ ID NO: 231922 - DNA, 378 bp, Artificial Sequence
  derived and/or modified sequence
atggccgagaacgatgtggataatgaactgctggactatgaagatgacgaggtggagactgcagcgggaggtgatggggctgaggctccagcaaagaaagacgttaaggggtcatacgtgtctatccattctagtggtttcagggattttctcctgaagcccgagctgctcagagccatcgtggactgcggctttgaacatccaagcgaggtgcaacatgagtgtataccacaggccattttggggatggatgtcttgtgtcaggcgaagagtggaatgggcaagactgccgtttttgtgcttgctacgttgcaacagttagaacctgtgactggacaggtatctgtgctcgtcatgtgccataccagagaactgtag

SEQ ID NO: 231923 - DNA, 291 bp, Artificial Sequence
  derived and/or modified sequence
atggccgagaatgacgtggacaatgagctcctggattatgaggatgacgaggtcgagaccgcagcaggtggagatggagccgaagccccagcaaaaaaagacgtgaagggctcgtacgtttcaatccattcttccggatttagagatttcctccttaagccagagctcttacgtgctatagttgattgcgggttcgaacacccatcagaggtgcagcatgagtgtatccctcaggccatattgggcatggacgtgctgtgtcaggctaaatctgggatggggaaaacatag

SEQ ID NO: 231924 - DNA, 378 bp, Artificial Sequence
  derived and/or modified sequence
atggcagaaaacgacgtcgataacgaactgcttgactatgaggatgacgaggtagaaacagcagctggtggcgatggcgcagaggccccagcaaagaaggatgtgaaaggcagctacgtctctatccattcctccggattccgggattttttgctgaaaccagaattgctccgggcaatagttgattgtggcttcgagcatccgagcgaggtgcagcatgagtgcattcctcaggccatcttagggatggacgttttatgccaggccaagagcgggatgggcaagactgcagtatttgtcctcgcaaccttacagcagctggagccagtgaccgggcaggtttcagtcctcgtaatgtgccatacacgagaactgtag

SEQ ID NO: 231925 - DNA, 987 bp, Artificial Sequence
  derived and/or modified sequence
tgagcaacactgcagcagctggaaccagtaacaggacaagtgtcagtgctagtgatgtgccacacgagggagctggcatttcagatttctaaggagtacgaacgcttctctaagtacatgcccaacgttaaagtggccgttttttttggaggtctctctattaaaaaggatgaagaagtgctcaagaaaaactgtccacacatagtcgtcggaaccccaggacgaatattggccctcgcgcgaaacaagagcctgaacctaaagcacatcaagcatttcatcctcgatgaatgcgacaagatgctagagcagctggatatgcgtcgggacgtccaggagatctttcggatgaccccacacgaaaagcaggtaatgatgttctccgccaccctgagcaaggaaattcgtcctgtatgtagaaagttcatgcaggatcctatggaaatcttcgtggatgacgagacaaagcttacactgcatgggctgcaacagtactacgtcaagctaaaagacaacgagaaaaacaggaaactctttgacctccttgatgttttagaatttaaccaagtggtcatattcgtgaaatcagtccagaggtgtatcgccctggctcagctgctggtcgaacagaattttcccgctatcgcaattcacagaggtatgcctcaggaggaaagactctcgagataccagcagttcaaagactttcagcgtcggatactggtagctacaaacctgtttgggagagggatggacatcgagcgggtgaatatagctttcaactatgatatgcccgaggacagcgatacttacctgcatagggtcgctcgggctggcagattcgggacaaaaggcttagctataacctttgtgtccgacgaaaatgacgccaagatcctgaatgacgtccaggacagatttgaggtcaatatctctgaactgccagatgaaatcgacatctctagctacatagaacagactagatag

SEQ ID NO: 231926 - DNA, 870 bp, Artificial Sequence
  derived and/or modified sequence
atggcagaaaacgacgttgataacgagctgctcgattatgaagatgacgaagtggagacggccgcaggcggtgacggggcagaagcacctgccaaaaaagatgtcaagggttcatacgtgagcatccatagtagtggattcagagatttcctgctcaaaccggaacttctcagggctatagtggactgcgggttcgaacatccgtccgaagtgcagcacgagtgcatccctcaggctattctggggatggacgttctctgtcaggcaaaatcaggaatgggtaaaacggcagttttcgtgctggctactctgcagcagttagagccggtgacaggacaggtctctgtcttggtaatgtgccacacacgggagttggcttttcagatttccaaagaatacgagcggttctctaagtacatgcctaatgtaaaagtggcagtcttctttgggggtttgtctattaaaaaagatgaggaagttctgaagaagaattgccctcacatagtcgtcggcacacctgggcgaattctcgccctcgcccgtaataagtcactcaacctcaagcacattaagcacttcattttggacgaatgtgacaagatgcttgagcaactagatatgagaagagacgtgcaggagatatttcgcatgaccccacacgagaaacaggtcatgatgttttctgccaccctgagcaaggagatccggcctgtgtgcaggaagtttatgcaagacccaatggagatatttgtggacgacgagacaaagctcacactgcacggcctgcaacaatattatgtcaagttgaaagataacgagaagaatcgtaaactgtttgacctgttagacgttctagagtttaatcagtag

SEQ ID NO: 231927 - DNA, 738 bp, Artificial Sequence
  derived and/or modified sequence
atgtggaccatgtccagttggacaatgaagatgatgagatggcgccagcagctgggggagatgggacttaggccacttcctaggaggatgtccagagcccctatgtccccgagtacagctcttgctttcgtgacgtcctgttcatctcaatcctgctcaggtccactctctacagtggcgctgagcatacggcagaaggtggcggtgttctttggtgggctctctattaagaaagacgaggaagtcctgaaaaagaactgcccacacatcgtggtcggcacgcccggacggattttggccctcgcgaggaacaagagcctgaatcttaagcacatcaagcattttatcttagatgagtgtgataaaatgctagaacagttggacatgcggagagacgtccaagagatctttagaatgaccccccatgaaaagcaggtgatgatgtttagtgctactctgtctaaagagatccgaccagtctgccgaaagtttatgcaggaccctatggagatttttgtggatgacgagactaagctgaccctgcatggtctgcagcaatactatgtcaaactcaaggataacgagaaaaataggaaattattcgacctgctggatgtgctcgagtttaaccaggtagttattttcgtcaaaagcgttcagcgctgtattgcccttgcccaattgctggtggagcagaacttccccgcaatcgcaatacataggggtatgcctcagtag

SEQ ID NO: 231928 - DNA, 738 bp, Artificial Sequence
  derived and/or modified sequence
atgtggactatgtctagctggacgatgaagatgatgaggtggaggcagcagctgggggaaatgggtcttcgcccattgccccgaaggatgtctcgcgctccaatgtctccctctaccgctctggcatttgttacatcttgtagctcccagtcttgttcaggaccgctctctactgtggctctgagtattagacagaaggtggccgtcttctttggcggtttgagcattaaaaaggatgaagaagtgctgaagaagaattgtcctcacattgtcgtgggaactcctggccgaatcctcgctctggcacgtaataaatccctgaatctcaaacacattaagcacttcatcctagatgagtgcgataagatgctggagcaattagacatgcgaagggacgtacaagagatctttaggatgacgccgcacgaaaaacaagtcatgatgttctcggccaccctgtcaaaggagattcggccagtgtgtcgcaagttcatgcaggaccccatggagatcttcgttgatgatgagactaaactgacactgcacgggttacagcaatactacgtgaagctgaaggataatgagaaaaacaggaaactttttgatctactagatgtactggagtttaaccaggttgtgatttttgtgaaaagcgtgcagcgatgtatcgctttggcccagctgcttgtcgagcagaacttccccgctattgccatacacagggggatgccccagtag

SEQ ID NO: 231929 - DNA, 396 bp, Artificial Sequence
  derived and/or modified sequence
taggctacactgcagcagcttgaacctgtgacaggacaagtctccgtcctggtgatgtgccatacccgggagctagcgttccaaatcagtaaagagtatgaacggttcagtaaatacatgcccaacgttaaagtggcagtgttcttcggtggcctatccatcaaaaaggatgaagaagtactgaaaaaaaattgcccacacatcgtcgtgggcaccccaggcagaattctcgcccttgctcgcaataaatccttgaacctgaaacacattaagcatttcatcctggacgagtgcgacaaaatgctggaacagctggacatgcggagggatgtgcaggagattttccgaatgacaccccatgaaaaacaggtaatgatgttttctgctacactctag

SEQ ID NO: 231930 - DNA, 411 bp, Artificial Sequence
  derived and/or modified sequence
tgagcaacacttcagcagctcgagcccgtaaccggacaggtatctgtgttggtgatgtgtcacacgcgggaactggctttccagatctcaaaagagtatgagcgcttcagcaagtacatgccaaatgtcaaagtggcagttttttttgggggactctctataaagaaagacgaggaggttctcaaaaagaactgcccacacatagtggtggggacaccaggccgtattcttgccctggcccgaaacaagtcactgaacctgaagcacatcaaacatttcattttggatgagtgtgataaaatgttggaacaactcgacatgcgtcgtgacgtgcaggaaattttcagaatgactccccacgagaagcaagtgatgatgttttctgcgaccttatctaaggaaattagatag

SEQ ID NO: 231931 - DNA, 717 bp, Artificial Sequence
  derived and/or modified sequence
atggcagagaatgacgtagacaatgaactgcttgattacgaggatgacgaggtggagaccgctgcaggtggcgatggtgccgaagccccagcaaaaaaagatgtgaaaggttcttacgtttcaatccactcctcgggatttcgagatttcctgttaaagcctgagttgctgagagcaatcgtagactgtgggtttgagcacccgtccgaagtccagcatgagtgcattcctcaggccatcttggggatggacgtgttatgtcaggccaaaagtggcatgggaaagactgctgtgtttgtgttagctaccctgcagcagctggaacctgtgacaggccaggtgtcggtgcttgtcatgtgccatacacgggaactggcttttcaaataagcaaggaatatgagcggttcagcaagtacatgcccaatgtcaaggtagctgtgttcttcggcggattaagcattaagaaagacgaggaggtgctcaaaaaaaactgccctcacatcgttgtgggtacccccggtagaatcttagcacttgccaggaacaaatctctaaatcttaagcatataaagcacttcatcctagacgaatgcgataagatgctggagcagctcgatatgcgtcgggacgtccaggaaatctttcggatgacgccccatgaaaagcaggtcatgatgttttcagctacgctttctaaggaaataaggcctgtgtag

SEQ ID NO: 231932 - DNA, 564 bp, Artificial Sequence
  derived and/or modified sequence
tgaagcgaggaaagggatattgggaaacctatggagatttttgttgacgacgagacgaagctaacactgcatggcttgcagcagtattacgtgaagctgaaagacaatgagaaaaacagaaaactgtttgacttgctggacgtgcttgagttcaaccaagttgtcatctttgtgaagagcgtgcagcgatgtatcgccctggctcaacttctggtcgaacagaatttccccgctatagccattcaccgcggaatgcctcaggaagagaggctctcgcggtaccaacagttcaaagactttcagaggcgtattctggtggcaacgaaccttttcgggagaggcatggatattgagagagttaacatcgctttcaactacgacatgccagaggattccgacacctacttgcaccgtgtggcccgagctggacggttcgggactaagggactcgctatcactttcgtgtctgacgaaaacgatgctaagatactgaacgacgtgcaggacaggttcgaggttaacatctcggagctgccagatgagattgacatctccagctactag

SEQ ID NO: 231933 - DNA, 594 bp, Artificial Sequence
  derived and/or modified sequence
atggccgaaaacgatgttgacaacgaattactggattatgaagacgacgaagtcgagactgccgctggaggcgacggggcagaggccccagcaaagaaagatgtgaaggggtcctatgtaagtatacatagctccggcttccgggactttctcctcaagccagagctgctccgggctattgttgactgcggcttcgaacacccctctgaagtacagcacgagtgtattccccaggcaatactgggaatggatgttctttgtcaagcgaaaagcggcatgggcaaaactgctgtcttcgtactcgccacccttcagcagcttgagcctgtgaccggtcaggtgtgcttttgtgactctcacttcccccgaggcgataatgaggaactccatctgccatatgtgtctgtgtacttcctgccaaaagtctctgtacttgtgatgtgtcacactcgggaattggcattccaaatttccaaggaatacgagcgcttttcaaaatatatgccaaacgtcaaagttgccgtgttttttggaggactcagcattaagaaagacgaggaagtgctgaagaagaactgcccccacatcgtctag

SEQ ID NO: 231934 - DNA, 594 bp, Artificial Sequence
  derived and/or modified sequence
atggccgagaacgacgtggataacgagctgctggactacgaagacgacgaggtggagaccgccgcaggcggtgacggcgcagaggctcccgctaagaaagacgtaaaggggtcttacgtttctattcatagttctggattcagggacttcctgctgaaaccagagttgctcagggccattgtagattgtgggtttgaacacccctcagaggtgcaacacgaatgcattcctcaggctatcctcgggatggatgtgctctgccaggctaaaagtggtatgggaaagacagcggtgttcgttctggcaacgctgcagcagctcgaaccagtaaccggccaagtgtgcttctgcgactcacatttcccaaggggcgataatgaggaattacacctgccttatgtttccgtgtatttccttccgaaggtaagtgtcctggtaatgtgccatactcgggagttagccttccagatatcaaaagaatacgagaggttctctaagtacatgcccaacgtaaaggttgctgtgttcttcgggggtctgagcattaaaaaggacgaggaagtgctcaaaaaaaactgtccacacattgtgtag

SEQ ID NO: 231935 - DNA, 411 bp, Artificial Sequence
  derived and/or modified sequence
atggggggaggcaggcgcccatatgatgtgttcttttccaaagtgatggccgagaatgatgtagacaacgagctgttggattacgaggacgacgaggtcgagacggcggctggtggcgatggcgctgaagcgccagccaagaaggatgtaaaggggagctacgtctcaattcatagtagtggattcagggacttccttctgaagcccgaattgttgcgggctatcgttgactgcggattcgagcatccctctgaagtccagcatgaatgtattccccaagccattctgggaatggacgttctgtgccaggcaaagagcgggatggggaagacggctgtgtttgttcttgcaaccctgcagcaactagaaccggtaaccggacaggtctctgtgctggtcatgtgccattag

SEQ ID NO: 231936 - DNA, 1278 bp, Artificial Sequence
  derived and/or modified sequence
atggctgaaaacgatgttgacaatgaactcctcgactacgaagacgatgaagtagagactgcagcagggggagacggagctgaagcccctgcgaagaaagacgttaaaggtagttacgtttcaatacactcctccggatttcgagactttctgttgaagccagaactcctacgagctattgtggactgcggtttcgagcacccatctgaagtccagcatgagtgcatcccccaggccattctgggtatggatgttctgtgtcaagccaaatctgggatgggaaagaccgctgtctttgtgcttgccacactgcagcagcttgagcccgtgactggtcaagtgtccgtcctggttatgtgccacacaagggagttggccttccagataagcaaagagtacgaacgattttccaaatacatgcccaacgtgaaggttgcagtattcttcggcggactttccattaaaaaagacgaagaagtgcttaagaaaaattgcccgcacatcgtggttgggactccagggcgtatcctcgccttagcccgaaataaatctttaaatttgaaacatatcaaacatttcatccttgatgaatgcgacaagatgctggaacagctcgacatgcgaagggacgtccaggaaatcttccgcatgacacctcacgaaaagcaagtgatgatgttttccgccacactatccaaggagatccggccagtctgcaggaagttcatgcaggaccctatggagatcttcgtagacgacgagaccaaactaaccctgcatggtctgcaacagtattatgtgaaactgaaggacaatgagaagaaccgtaaattgtttgacttactcgacgtgcttgaattcaaccaggttgtcatcttcgtcaagtccgtccagcgatgtatagcattagcgcaactccttgtggaacagaacttccccgcaatcgctatccaccggggtatgccgcaggaagagcggctctcgaggtaccagcaatttaaggacttccaacgccgtattctggtggccactaatctctttggtaggggcatggacattgaacgggtaaatattgcctttaattacgatatgcccgaagattccgatacatatctgcataggtgctatcctctgagccctagcagatggcctgagcaagccggactggctccgagggcatggctaagccatctgtgtcccatgaggatgatgccccgttccagcatgatgtgccgaattgctctgcggtcgattcttgtttcttgcttaatgagatag

SEQ ID NO: 231937 - DNA, 1287 bp, Artificial Sequence
  derived and/or modified sequence
atggcggagaacgatgtcgacaacgagcttctggattatgaggatgatgaagtggagacggctgctggcggagatggcgcagaagcacctgccaaaaaagatgtgaaaggttcttatgttagcattcacagctcgggttttcgggattttctgttaaagccggagctgcttcgtgcaattgtggattgcggttttgaacatccatcagaggtccagcacgagtgtatcccgcaggccatcttgggaatggacgtcttatgtcaagctaagagcgggatgggtaagaccgccgtcttcgtactggcgacactgcagcagcttgagccagtgacaggacaggtgagcgtcctagtcatgtgtcatacgcgggaattggctttccagatctcaaaagagtatgaaaggttttcaaagtatatgcccaacgtcaaagtggccgtgttctttggcggactttcaatcaagaaagatgaggaggtgctgaagaagaactgcccacatattgtggtgggaacccctgggagaatactcgcccttgcccgaaataagagtctgaatttgaaacacatcaaacactttatcctagacgaatgcgataagatgttggagcagctcgatatgcgcagggacgtccaagaaatctttcgtatgaccccccacgaaaagcaggttatgatgttctccgccactctgtccaaagagattcgaccagtgtgcagaaagttcatgcaggaccccatggagatattcgtggacgacgagacgaagctgaccttgcatggtttgcagcaatactatgttaagttgaaggacaatgagaaaaaccgcaaattattcgatctgctggatgtgcttgagtttaaccaggtggtcatcttcgtcaagtcagtccaacggtgcatcgcccttgcacaactgctcgtcgaacagaattttcccgctatcgcgatacaccgtgggatgccacaggaggaacgactgtcacgctatcagcagttcaaggactttcaacgcaggatcctggttgcaacgaacctatttggacgcggaatggacatcgagcgcgtcaacatcgccttcaactacgacatgcctgaagatagtgatacatatctgcatagggtggccagagcagggagattcgggactaagggcctcgcaataaccttcgtcagcgacgaaaacgacgccaagatactaaacgacgttcaggatcgttttgaggttaacatttcggagttaccagatgaaattgacatcagttcatatattgagcaaaccaggtag

SEQ ID NO: 231938 - DNA, 1287 bp, Artificial Sequence
  derived and/or modified sequence
atggctgagaacgacgtggataacgagctgctggactatgaggatgacgaggtggagactgccgctggcggtgacggtgccgaggctccagctaaaaaggacgtcaagggaagctacgtgtctatccactcatctggctttagagacttcttacttaagcccgagctgttgcgcgctatcgtggactgtggatttgaacaccccagtgaagtgcagcatgagtgtatcccccaggctatcctagggatggacgttttgtgccaagcgaaaagcgggatgggtaagactgctgtgtttgtactggccaccctccaacaactggagcccgtcaccggtcaggtgtctgtcctcgtgatgtgtcacactagggagctggcattccagatcagtaaggagtacgaaaggttctcaaaatacatgccaaatgtcaaggttgcagttttttttggaggcttgtccattaagaaagatgaggaggtcttgaagaaaaattgtccacacatcgtggtaggtaccccaggccgtatcctggcactggctcggaacaagagcctgaacttgaagcatattaagcattttatactggatgagtgcgacaagatgcttgagcagcttgatatgaggagagacgtacaggagatatttcggatgacacctcacgagaagcaggtgatgatgttcagcgctactctgagtaaggagattcggccagtttgtagaaaattcatgcaagaccctatggagatcttcgtagatgacgaaactaaactcactctccacgggcttcagcaatactatgtcaaactcaaggataatgagaagaaccgcaaactttttgatctactggatgtgctcgaatttaaccaggtggtcatcttcgtgaagagcgtgcagcgctgtattgccctggcacagctgctggtggagcagaacttcccggctatagccatccacaggggaatgccccaggaggaacgcctttcccggtatcaacaattcaaggactttcagagacggattttagtcgccactaatcttttcgggaggggcatggacattgagcgcgtgaatatcgcgtttaactatgacatgcctgaagactctgacacgtacttgcatagggtggcgcgtgccggtcggttcgggaccaaagggctggctattactttcgtgtccgatgaaaatgacgccaagattttaaacgacgtacaagataggttcgaggtgaatatctccgaattgcctgacgagattgacatttcctcctacatcgaacagactagatag

SEQ ID NO: 231939 - DNA, 738 bp, Artificial Sequence
  derived and/or modified sequence
atgtggacgatgtcttcatggacgatgaaaatgatgaggtggaggcagcaattgggtgagatgggcctgcgcccactgccacgccgtatgtcgcgcgctcctatgagtccctccaccgctctcgcctttgtgacatcctgtagttcgcagtcctgttccgggccactcagtacagtcgcactgtcaatccggcagaaggtcgctgtattctttggaggcctgagcattaagaaggacgaagaagtccttaaaaaaaactgtccacacatcgttgtggggactccaggcaggatcctggcactcgctcgcaacaaaagcctgaaccttaaacacattaaacatttcattctggacgagtgcgacaagatgctggaacaactggacatgcggagagacgtgcaggagatcttccgaatgacgccacacgagaaacaggtgatgatgttctctgcaactctttctaaggaaatcagacctgtgtgtcggaagtttatgcaggatccaatggaaatcttcgtggacgatgagaccaaacttacactgcacggactgcagcagtactacgttaagctgaaggataatgaaaagaaccgaaaattattcgatctgctggatgtcctcgaatttaaccaggtggtcatctttgtgaagagtgtgcaacggtgcattgcgttggcccagctgcttgtggaacagaatttcccagccatagccatccaccggggtatgccccagtag

SEQ ID NO: 231940 - DNA, 696 bp, Artificial Sequence
  derived and/or modified sequence
atggccgaaaatgatgtcgacaatgagctgctcgattatgaagacgacgaggtggagaccgctgccggaggcgacggtgcagaggcccctgccaagaaagatgtgaaaggctcgtatgtcagcatccactcttctggcttcagggacttcttgttaaagcctgagctgctgagggccattgtggactgtggcttcgaacacccttccgaggtccagcatgagtgcattccacaagcaatcctaggcatggacgtgttatgtcaagccaagtccggcatgggcaaaacagcagtttttgttctcgcaactctgcagcaacttgagccagtgacagggcaagtgagtgtgctcgttatgtgccatactagagaattggcttttcagatcagtaaggagtatgagagattttcaaagtacatgcctaacgtgaaagtggccgtgttttttggaggactgtcaatcaaaaaggacgaggaggtacttaaaaagaattgccctcacattgtggtgggaacgccaggcaggatccttgccttggccagaaacaagagccttaaccttaagcacattaagcattttatccttgacgagtgcgacaaaatgctggagcagctggacatgaggcgggatgtgcaggaaatcttcaggatgacaccccacgagaagcaggttatgatgttctctgcaacactctag

SEQ ID NO: 231941 - DNA, 594 bp, Artificial Sequence
  derived and/or modified sequence
atggcagagaatgacgttgataacgaactgctggattacgaggatgatgaggtggagactgccgcaggaggagatggagctgaggccccagctaaaaaggatgttaaagggtcatacgtgtcaatacatagcagtggcttccgtgactttctcctcaaacctgagctgctgcgcgcaatcgtggactgtggatttgagcacccctccgaagtgcagcatgaatgcattccgcaggctatccttggtatggacgttttgtgtcaggccaaatcaggaatgggcaagactgctgtgtttgtactagccaccctccagcagctggagcccgtaaccgggcaggtgtgtttctgtgactcccacttcccccgaggcgataacgaggagttgcatctgccctacgtgtccgtgtatttcctgcccaaggtctcggtcctagtgatgtgccacacccgtgaacttgcatttcagatttccaaagagtatgaacgattctctaaatacatgcccaatgttaaagtagcagtctttttcggaggcttgtcgattaaaaaagacgaggaagttctgaaaaaaaactgcccgcatattgtctag

SEQ ID NO: 231942 - DNA, 594 bp, Artificial Sequence
  derived and/or modified sequence
atggctgagaatgacgtagacaatgaactgctggattacgaagacgatgaagtagagactgcagcagggggtgatggcgcagaagcaccggctaaaaaagatgttaaagggagttatgtaagtatacactcctcggggtttcgggactttcttctgaagcctgaacttctgcgggcaatcgtggattgcggttttgagcacccgtccgaggtgcaacacgagtgtattccgcaggcgattttaggaatggatgttctgtgtcaggccaaatcagggatgggcaaaacggctgtatttgtcctcgccaccttgcagcagctggagcccgttaccggacaggtgtgtttctgcgattcccatttccccaggggcgataacgaggagctgcacctgccctatgtttcggtatatttcttacctaaggtttccgttctggtaatgtgtcatactcgggagctagcctttcagatctctaaggagtacgaaaggttctcaaaatatatgcccaacgtgaaagtcgcagttttcttcggtggtttgagcataaaaaaagacgaggaagtcctcaaaaagaattgcccccatattgtgtag

SEQ ID NO: 231943 - DNA, 540 bp, Artificial Sequence
  derived and/or modified sequence
gtggccgtctttttcggcggtctttccataaagaaggatgaggaggttcttaagaaaaactgcccacatatagttgtcgggacccctggtaggattctcgcattggctcgcaataaaagcctcaatctgaagcatattaaacactttatactagatgagtgtgataagatgctggagcagctcgacatgcggagggatgtccaagagatcttcagaatgacccctcacgaaaaacaggtgatgatgttttctgcaacactgtccaaggagatccgaccagtttgccgaaagtttatgcaggatcctatggaaatatttgtggacgatgagacaaaacttacgctgcacgggctacagcagtactatgtgaagcttaaagacaatgaaaagaatcggaagctgttcgacttgctagatgttttggagtttaatcaggttgtcatcttcgtgaagagcgtccaacgctgtattgccctggcacagttgctcgttgaacagaacttcccagccatcgccatccataggggaatgccccaatag

SEQ ID NO: 231944 - DNA, 594 bp, Artificial Sequence
  derived and/or modified sequence
atggctgaaaatgatgtggataatgagttgctcgactacgaggacgacgaagtcgagacggctgctggtggtgatggcgctgaggcaccagcaaagaaagatgtgaagggctcctatgtctcaatacacagttctgggttccgcgacttcctcttgaagccagaactgctgcgggctatagtggactgtggatttgaacatccctctgaggttcagcatgaatgcattccccaggcaatcttgggcatggacgtgctctgccaggctaagtccggcatgggaaaaaccgctgttttcgtgctggccactttacagcagctggagccagtgacaggccaggtgtgtttttgcgacagtcattttccacggggtgacaatgaagagctgcacttaccttacgtcagcgtttacttccttcctaaggtcagtgtgctggtcatgtgccacacacgtgaactcgcattccagatatccaaggagtacgaaagattttctaagtatatgccaaacgtgaaggttgctgtgttcttcggtggactgagtatcaagaaagatgaggaggtgctcaagaaaaattgcccgcacatcgtctag

SEQ ID NO: 231945 - DNA, 564 bp, Artificial Sequence
  derived and/or modified sequence
taaagcgaggaaagggacattggcaaaccgatggagatcttcgtggatgatgagacaaaattgaccctccacggtctccagcagtactatgttaaactgaaagataatgagaagaatcgaaagttgttcgatctcttggacgtcctcgagttcaatcaggtggtgatcttcgttaaaagtgtccagagatgtattgctctggcgcagctactcgtagagcagaactttcccgcaatcgccatccaccggggtatgcctcaggaggagcggctgagtcggtatcagcagttcaaggactttcagcgcagaattttggttgccacaaaccttttcgggaggggaatggacattgaacgggtgaatatagccttcaactacgatatgcccgaggactccgatacctatctgcatagagtggccagggcaggaaggttcgggacgaaaggcctagctattactttcgtttctgacgagaacgatgccaaaattcttaacgatgtgcaggaccggtttgaagtcaatatcagtgagcttcctgacgaaatcgacatcagttcgtactag

SEQ ID NO: 231946 - DNA, 195 bp, Artificial Sequence
  derived and/or modified sequence
tgagcaaccctgcagcagctggaacccgtcacgggtcaggtatccgttctggtgatgtgccatactcgagaactggcgttccagatctctaaggagtacgaacgatttagtaagtatatgccaaacgtcaaggtcgccgttttctttggtggattgtccatcaagaaggatgaagaagtcctgaagaaaaattag

SEQ ID NO: 231947 - DNA, 78 bp, Artificial Sequence
  derived and/or modified sequence
tgagcaaccctccagcaacttgaacccgtaaccgggcaagtctctgtgctggtcatgtgtcacactagggaactctag

SEQ ID NO: 231948 - DNA, 66 bp, Artificial Sequence
  derived and/or modified sequence
taagcgactctgcagcaacttgagccagtgactggacaggtgtcagttctagtcatgtgtcactag

SEQ ID NO: 231949 - DNA, 870 bp, Artificial Sequence
  derived and/or modified sequence
atggcagaaaatgacgtggacaacgaactgcttgattatgaggatgatgaggttgagactgctgccggtggagacggtgccgaagctcctgccaagaaagatgtcaaagggagctacgtgtcgattcattcgagcggattccgggatttcctccttaagccggaactgcttcgagccattgtggactgtgggttcgagcacccatctgaggttcagcatgaatgcattccacaagctattttaggtatggacgtgctgtgccaggctaagtcggggatgggaaagactgccgtgttcgttcttgccaccctacagcagttggaacccgtgacaggacaggtaagcgtgctggtgatgtgccatacccgggaattggcgtttcaaatctctaaagagtacgagcgcttctctaaatatatgcctaacgtgaaggtcgccgtgttctttggcggactctccattaaaaaggatgaagaagttctgaagaagaattgccctcatatagtcgtaggcactccgggaaggatcctggccctagcaagaaacaagagcctgaacttaaaacatattaaacatttcatcttagatgagtgtgataagatgctagagcagctcgatatgcgccgtgatgtgcaggaaatctttcgaatgaccccccacgagaaacaggttatgatgttctccgcaaccctcagtaaagaaatacgccctgtgtgcaggaagttcatgcaggaccctatggagatctttgtagacgatgagactaagctgactctccatggtctgcagcagtactacgtcaaactgaaggacaacgaaaagaatcgtaagctcttcgacctgttggacgtgctggaatttaatcaatag

SEQ ID NO: 231950 - DNA, 711 bp, Artificial Sequence
  derived and/or modified sequence
atggctgagaacgacgttgacaatgagctgttggactatgaggacgacgaggtggagactgccgctggtggcgatggggcagaagcacccgctaagaaagatgtgaagggttcatacgtcagcatacacagctcaggtttcagggacttcctccttaagccagagctccttcgtgccattgtggattgcggattcgagcacccatctgaagtgcagcacgaatgcatacctcaagctatcttaggaatggatgtgctatgccaagcaaaatccggaatggggaagactgccgtttttgtccttgccaccctccagcagcttgaacccgtcacaggccaagtgagcgtgctggtgatgtgccatacgcgcgaactggcattccagatctccaaagagtacgagaggtttagcaaatatatgcccaacgtgaaagttgccgttttcttcggcggactgtccattaagaaagacgaagaggtactgaaaaagaactgtcctcatattgtagtgggaaccccgggacgaattctcgccttagctcggaacaaaagcctgaatctgaaacacatcaaacactttatcttggatgagtgcgataaaatgctggagcagctcgatatgaggcgtgacgtgcaggagatatttaggatgacaccacatgagaagcaggtgatgatgttttcagcaacattgtccaaggaaatccgttag

SEQ ID NO: 231951 - DNA, 711 bp, Artificial Sequence
  derived and/or modified sequence
atggcagaaaatgacgtcgacaatgagttgctggactatgaggatgacgaggttgagacagctgccggaggtgatggagcagaggcacctgctaagaaagatgtaaagggcagttatgtgtcaattcactcgtctgggttccgggatttcctgctgaaaccagagctactcagagcaatcgtggattgtgggtttgagcatccgtccgaggtgcagcatgagtgcattccacaagcaatcctcggcatggatgtgctgtgccaggctaagtccgggatgggaaagacagctgttttcgtgctggccactttacagcagctagaacctgtgacaggacaggtttccgtccttgtaatgtgtcacacccgtgagctcgcattccaaatttcaaaagaatacgaacgtttttctaagtacatgcccaatgtgaaagtggctgtgttctttggagggttatctatcaaaaaagacgaggaggtgctgaagaagaattgtcctcatatcgttgtgggcacacccggtcggatcctggcactggcccgaaacaagtctctgaacctgaaacacatcaaacatttcatcctggatgaatgtgataaaatgctggaacagctggatatgcgaagagatgttcaagaaatctttaggatgacgccccacgagaaacaggtgatgatgttctctgccacactgagcaaagaaatcaggtag

SEQ ID NO: 231952 - DNA, 978 bp, Artificial Sequence
  derived and/or modified sequence
tgagccacactgcagcagctcgaaccggtgacaggccaggtgtctgtgctggtcatgtgccacactcgggagctggcttttcagattagtaaggaatatgagagatttagtaaatatatgcccaacgtgaaagtagccgtgtttttcggtggcctgagtattaaaaaggacgaggaagtgctcaagaaaaactgcccacacatcgtggtgggcacccccggacgaattctggccctagcacggaataagagtcttaatctgaaacacattaagcactttattctcgacgagtgcgataagatgctggagcaactggacatgcggagagacgttcaggagattttcagaatgaccccccatgaaaagcaagtgatgatgttctccgccaccctgtccaaggaaatcagacctgtgtgtaggaagtttatgcaggatccgatggagatcttcgttgatgatgaaaccaagttaactctgcacggcttgcagcagtactatgtcaaactgaaggacaacgaaaagaaccgaaaactcttcgatctactcgatgtgctagaattcaatcaggtcgttatttttgtcaagagcgtccagaggtgtatcgcactagcccaactgctggtcgaacagaatttccccgcaatagccatccaccggggaatgccacaggaggaacgcttgtctcgctaccagcaatttaaggactttcagcgacgcattctggtggccactaatctatttggacgtggtatggatattgagcgagttaacatcgctttcaattatgatatgccagaggactctgacacctaccttcatcgttgctacccactgagccctagtagatggccagaacaggccggactcgcccctagggcctggctgagccacctttgccctatgcgtatgatgcccaggtcaagtatgatgtgtcggatcgccctacggtccatccttgtctcttgtttgatgcgatag

SEQ ID NO: 231953 - DNA, 717 bp, Artificial Sequence
  derived and/or modified sequence
atggctgagaatgatgtagataacgagctgttggattatgaagatgacgaggtggaaacagccgctgggggtgacggagcagaagcccctgcaaaaaaagacgttaagggaagctacgtgagtatccattcgagcggctttagggattttctgctgaagcccgagttactgcgggctatcgtcgattgtggcttcgagcacccttcagaagtccaacacgagtgtatcccgcaggcaatcctcgggatggacgtattgtgtcaagccaagagtggtatgggaaagactgctgtcttcgttctggctactttgcagcagctggaacctgtgactggtcaagtgtccgtccttgtaatgtgtcacactcgggagctggcttttcaaatctcgaaagagtatgagaggttttccaagtatatgcctaacgtcaaggtcgctgtgttcttcggcggtcttagcatcaaaaaggacgaagaggtgctgaagaaaaattgtcctcatatagtcgtaggcactcctgggaggatactggccctggccaggaataagtctcttaatctcaaacatatcaaacactttatcctcgatgagtgcgacaagatgttagagcagttagacatgagacgtgatgtacaagaaatctttagaatgactccccatgagaagcaggtcatgatgttctcagccacgctatctaaggagatcagaccagtttag

SEQ ID NO: 231954 - DNA, 717 bp, Artificial Sequence
  derived and/or modified sequence
atggccgaaaacgatgttgacaatgagctgctcgattacgaggacgacgaagtggagaccgcagctggaggcgatggtgcagaggctcctgcgaaaaaggatgtgaaaggcagctacgtgagcattcatagcagcggttttagggatttcttgttgaaacctgaactgctccgggctatcgtcgattgcgggtttgaacacccctccgaagtacaacatgagtgtattccacaagccatcctgggaatggacgtactgtgccaggcaaagagcggtatggggaaaaccgccgtcttcgtactggctactctgcagcagttggagcctgtgaccggacaggtgagcgtgttggttatgtgccacacacgagaattggcgttccagatctcaaaggagtatgaacgcttttcaaagtacatgcccaatgttaaagtggcggtgttttttgggggtctatcgattaaaaaagacgaggaggtgctgaaaaagaactgcccacacattgtagttggtacacctgggcgtatactcgcactggcgaggaataagagcctgaatctgaaacacatcaagcattttatcctcgatgagtgcgataagatgttagagcaactcgacatgcgtagggacgtacaggaaatctttaggatgacccctcacgagaagcaggtgatgatgttttcagccaccctcagtaaggaaattaggcccgtctag

SEQ ID NO: 231955 - DNA, 870 bp, Artificial Sequence
  derived and/or modified sequence
atggccgagaacgatgttgataacgaactgctcgattatgaggacgatgaggtcgaaacagccgcaggaggcgacggggctgaagctccagccaaaaaagacgtaaaaggctcgtacgtgagcatccactcttcaggcttccgggactttctgcttaaacccgaactgcttcgcgcaatcgtcgactgcgggttcgaacacccatcggaggtacagcatgagtgtatccctcaggccatattgggaatggacgtgctatgtcaggctaaatcaggcatgggaaagacagctgtgttcgttctggcaactcttcagcagcttgaacccgtcaccggccaagtctctgtactggtgatgtgccacacccgcgaactagcatttcaaatttccaaagagtacgaacgctttagtaagtatatgcctaacgtaaaagttgccgtgttcttcgggggactgagcataaaaaaggacgaagaggtcttaaaaaagaactgcccccatatagtggttggaacccctggccgaatccttgcgctggccaggaataagtctctcaatctcaaacacattaagcactttatcctcgatgagtgtgataagatgttggaacagttagatatgcggagggacgtacaggaaattttcaggatgactccccacgaaaaacaggtaatgatgttttccgccaccctttcaaaggagattagacccgtctgtaggaagtttatgcaagaccctatggagattttcgtcgacgacgaaaccaagcttacactccacggtttgcagcagtattatgtcaagcttaaggacaacgagaaaaaccggaagctattcgacctgcttgacgttctggagtttaaccagtag

SEQ ID NO: 231956 - DNA, 1278 bp, Artificial Sequence
  derived and/or modified sequence
atggctgagaacgatgtcgacaacgagttactggactacgaagatgacgaggtggaaaccgctgctggtggggatggagcagaagctcctgccaagaaggatgtgaaggggtcatacgtttcaattcacagttctggattccgggacttcctgctgaagcccgagttacttcgggctattgtggactgcggcttcgaacatccttctgaggtgcagcacgaatgcatcccgcaggcaatcttgggtatggacgtgctctgccaagccaaatcgggaatgggcaaaacggctgtattcgttttggcaaccctgcaacagctcgagcctgttaccggacaggtttccgtactggttatgtgccatacaagagaattggcctttcaaatctcaaaggaatacgagcgcttcagcaaatacatgccaaacgttaaggtggctgtgtttttcggagggctgtctataaaaaaagacgaggaggtgctgaagaagaactgccctcacattgtagtgggaacccctgggagaatccttgccctagcgagaaataaatctctcaacctgaagcatatcaagcactttattctggatgaatgtgacaaaatgcttgagcagctggacatgaggcgggacgtccaggaaatcttccgaatgaccccccatgagaaacaggtgatgatgtttagcgccaccctttccaaagagatcaggccagtctgtcggaaattcatgcaggatcccatggagatctttgtagacgacgagaccaaactaaccctgcacggactccaacagtattacgtgaagctcaaggacaacgaaaagaatcggaagctgtttgacctactggacgtcctcgagttcaaccaggtggtcatcttcgtgaaatccgtccagcgctgtatcgccctggctcagctcctagtcgagcagaattttccggcaattgccatccatcgaggaatgccacaagaagaaaggctttcacggtatcagcagttcaaggacttccagcgcaggatattggtagccaccaacctctttggcaggggtatggacatcgagcgggtaaatattgcattcaattacgatatgcccgaagactccgacacatatctgcaccgttgctatccactctctcctagcaggtggccagagcaggctggcttggcccctcgcgcttggctaagccacctgtgtcccatgcgcatgatgccacggtcctctatgatgtgccgaatcgccttacgttccatactggtcagctgcctgatgcggtag

SEQ ID NO: 231957 - DNA, 411 bp, Artificial Sequence
  derived and/or modified sequence
atgggagggggtagaagaccctatgatgtcttcttttcaaaggtgatggccgaaaacgatgtggataacgagttgttagactacgaggacgacgaggtggagacagccgctggtggcgatggcgcagaggcaccagccaaaaaagacgtgaaaggctcatacgtctctattcactcatctggattccgggacttcctcctgaagcccgaattgttacgagcgatcgtagattgcgggtttgaacacccgtctgaagtgcagcacgagtgtatacctcaagcaattttagggatggatgtactttgccaagctaaaagtgggatgggcaagaccgccgtgttcgtacttgccaccctgcaacagctggagccagtgactggacaagtctctgtgctggtgatgtgtcactag

SEQ ID NO: 231958 - DNA, 564 bp, Artificial Sequence
  derived and/or modified sequence
atgggcagtagccacattggcggtctgtctattaacgagagaaggtgttctgcctcactaggactggtaatggcagagaacgacgtggataacgaactccttgattacgaggatgatgaggtggaaactgctgctggcggagatggagctgaggctcctgcaaagaaagacgtgaaaggaagttacgtgtccattcactcctctggtttcagagatttcctgctgaagccagaactgttgcgagcgatcgtagattgcggattcgagcatccctcggaagtgcagcatgaatgtatcccccaggccatcctgggcatggatgtcctgtgccaggccaaatcggggatgggcaagacggccgtgtttgtgctcgcaactttacagcagctggagcctgttactggtcaagtgtctgttctggtgatgtgtcatactcgggagttagcattccagatttccaaagagtacgaacggttctcaaaatatatgccgaacgttaaggtcgcagtgttttttggaggcttgtctatcaagaaggatgaggaggtcctgaagaagaattag

SEQ ID NO: 231959 - DNA, 399 bp, Artificial Sequence
  derived and/or modified sequence
atggctgaaaacgacgttgataacgagctgctggattacgaggatgacgaagtggaaactgcagccggaggggacggagcggaggcccctgcgaagaaggacgttaaggggagttatgtaagcattcactcatctggctttagagacttccttctgaaacccgagctgcttagggccatagtggactgtggtttcgaacacccatcagaagtgcaacacgagtgcatcccgcaggccattctcgggatggatgtcttgtgccaggctaagtcagggatgggtaaaaccgcagttttcgtcttggccacgctgcaacagcttgagcccgtgacgggacaggtgtgtttttgcgatagtcacttccctcgcggagacaatgaagaactgcatctcccctag

SEQ ID NO: 231960 - DNA, 870 bp, Artificial Sequence
  derived and/or modified sequence
atggctgaaaatgatgttgacaatgagttactcgactatgaggatgatgaggttgagacagctgccggaggcgacggagcagaagcgcctgcgaagaaagatgtgaaaggcagctatgtatccatacattcttcagggtttagggatttcttactgaaaccagaacttctcagagctatagtggattgcgggtttgagcatcctagtgaagtgcagcacgaatgcatcccccaggccattcttggcatggacgtgctgtgtcaggcaaaaagcggcatgggcaagactgccgtttttgtcctagctaccttgcagcaattggagccggtgaccggtcaggtttcagtgctcgttatgtgtcacacccgcgagctggctttccagatctctaaagaatatgagaggttttcgaaatatatgccaaatgtcaaggtggccgtgttttttggaggcctcagtatcaaaaaggacgaggaggtgctaaaaaaaaactgccctcatattgtggtgggaacacctggccgaattctggcactggccaggaataaatctctcaatcttaagcatattaaacattttatcctggatgagtgtgataagatgttggagcagcttgatatgagacgcgatgtacaagaaatcttccgtatgaccccgcatgagaaacaggtcatgatgtttagcgcaacgctgtcaaaggagatcaggcccgtctgtaggaaattcatgcaagatcctatggagatcttcgtcgacgacgagacaaaactgacactgcacggactgcaacagtattatgtgaaattgaaggataacgagaagaatcgcaaactttttgatctgcttgatgtattggagttcaatcagtag

SEQ ID NO: 231961 - DNA, 1287 bp, Artificial Sequence
  derived and/or modified sequence
atggctgaaaatgacgttgacaacgaactcctggactatgaggacgacgaagtggaaactgctgctgggggtgacggtgcagaagccccagccaagaaggacgttaaaggttcgtatgtcagtattcattcgagtggtttcagggactttctgctgaagccagagctgctgcgggcaatcgtggattgtggcttcgaacatcctagcgaggttcagcacgagtgtattcctcaagcaatcttaggcatggacgttctttgtcaggctaagtctggaatggggaagacagctgtgttcgtcctggccacattgcagcagctggagcctgtaacaggccaggtctccgtcctggtgatgtgtcacacaagggagctggcatttcaaatcagcaaggagtacgagcgatttagcaaatatatgcccaatgtgaaggtcgctgtttttttcggcggtctctccatcaagaaggatgaagaggtgctgaagaaaaactgtccccacattgtggttggcactcccggacggatactcgctctcgcgagaaacaaaagccttaacttgaagcacataaagcactttatcctagacgaatgtgataaaatgctagagcagctggatatgcgtcgggacgtgcaggagattttcagaatgactccccatgaaaagcaggtgatgatgttcagcgccaccctttctaaggagattcgacccgtatgtaggaaatttatgcaggaccccatggaaattttcgtggacgatgagaccaaactaacccttcatggcttacagcagtattatgtgaagctcaaggacaacgagaaaaacagaaagctgttcgacctcctcgatgtgctggaattcaatcaggttgttatctttgtaaaaagtgttcagcggtgcatcgcactggcccaactactggtcgaacagaacttcccagccatcgccatccatcgcggaatgccacaggaggagcgcttatctaggtatcagcagttcaaggatttccaacggaggattttggtggctactaatctttttgggaggggcatggatatcgagagagtgaatatcgcatttaattacgacatgcctgaggatagcgatacttacctccacagagtcgcaagagcgggacgatttggaactaagggcctggcaatcactttcgtgtccgatgagaacgatgccaaaatcctgaacgatgtgcaggatagattcgaagtcaacattagtgagctgcccgatgagatcgatatctcttcgtatattgagcaaaccagatag

SEQ ID NO: 231962 - DNA, 564 bp, Artificial Sequence
  derived and/or modified sequence
atgggctcatcgcacattggcggattgtccatcaatgagaggagatgtagcgcctcactgggactggtgatggcggaaaacgacgtcgataatgagctgctggactacgaggacgatgaggttgagacagctgccggtggcgatggggcagaagcacccgctaagaaagacgtgaaagggtcttacgtttctatccacagctccggctttagagattttctcctgaagcctgagctcttgagagccatcgtggattgtgggtttgagcaccccagtgaagtgcagcacgagtgcataccacaagctatcctgggtatggatgtgttgtgtcaggccaagtcaggaatgggcaagaccgccgtatttgtgctggccactttacaacagctggaaccagttaccgggcaggtttcagtactggtcatgtgtcacactcgagagttggcctttcagattagtaaagaatatgagaggttttcgaagtatatgccgaatgtgaaggtcgccgtgtttttcggaggtctatctatcaagaaagatgaagaggtcctgaaaaaaaactag

SEQ ID NO: 231963 - DNA, 291 bp, Artificial Sequence
  derived and/or modified sequence
atggccgaaaatgatgtggacaacgagctcttagactatgaggatgatgaagtggaaaccgccgcaggaggtgatggtgccgaggcacccgctaagaaagatgtgaaaggttcatatgttagcattcattcctcaggatttcgggattttctgctgaagccagagttactcagagccatcgtcgactgtggcttcgagcatcccagtgaagtgcagcatgaatgtattcctcaggccatcctaggcatggatgtgctgtgccaggctaagagtggcatgggaaaaacttag

SEQ ID NO: 231964 - DNA, 564 bp, Artificial Sequence
  derived and/or modified sequence
atgggctcctcacatatcggtggtctgtctataaacgagcgacgttgcagcgcatcccttggtttagtgatggccgagaatgacgtggataacgaactgctcgactatgaggatgacgaggtcgagacagccgctggtggagacggagctgaggcacctgccaagaaggatgtcaagggaagttacgtgtcaattcacagctctgggtttagggacttcctgctaaagccagaactgctcagagccatcgtggattgcgggtttgaacacccctctgaagtgcagcacgagtgtattcctcaagcaatcctgggcatggatgtcctttgccaggccaagtcaggcatgggcaagaccgcagtctttgtgctcgcaacgctgcagcagctggagccagtaacaggccaagtttccgtgttagtcatgtgccacacccgggagcttgctttccagatcagtaaagagtacgaacggttctcgaaatatatgcctaacgtgaaagtggctgtcttcttcggaggcctgagtataaagaaggacgaagaagttctgaaaaagaactag

SEQ ID NO: 231965 - DNA, 594 bp, Artificial Sequence
  derived and/or modified sequence
atggctgaaaatgacgtggacaatgaactgctggactacgaggacgacgaggtggaaaccgctgcaggaggagatggagccgaagcccctgctaaaaaggatgtcaaaggtagttatgtgtctatccactctagtggattcagagatttccttcttaagccagaactgctccgagccattgtcgactgcggattcgaacatccgtctgaggtacaacacgagtgtatccctcaggcaattctcggaatggacgtcctctgtcaggcaaaatccggaatgggtaagactgccgtgttcgtgcttgccacactacagcaactggagccagtaacaggtcaggtatgtttctgcgattcccactttcccagaggggataacgaagagttgcaccttccctacgtgagcgtttacttcctgcccaaggttagtgtgctcgttatgtgccataccagagagcttgcctttcaaatctccaaggaatatgagagattcagcaaatatatgccaaacgttaaggtcgctgtgttctttggaggcctgtcaatcaagaaggatgaagaggttctgaagaaaaattgtccccacattgtttag

SEQ ID NO: 231966 - DNA, 291 bp, Artificial Sequence
  derived and/or modified sequence
atggcagagaacgacgtagacaatgaacttctcgattatgaggacgatgaggtagagaccgccgcaggcggtgacggtgcagaagcccctgccaagaaagacgttaagggatcctatgtctccattcactccagcgggtttagggatttcctgcttaaacctgaactcttaagagccatagtggactgcggatttgagcacccaagtgaagtgcaacatgagtgcattcctcaggctattctcggaatggacgtactgtgccaggctaaaagcggcatgggtaaaacatag

SEQ ID NO: 231967 - DNA, 696 bp, Artificial Sequence
  derived and/or modified sequence
atggcagaaaacgacgtggataatgaattattggactacgaagatgacgaggtggaaaccgccgcagggggagatggggcagaagcgccagcgaagaaggacgttaaagggagctacgtgtcaatccattccagcggattcagagactttctcctaaaacctgaactcttgagggctatcgtggactgtggtttcgagcatccctccgaggttcagcatgaatgcattccacaggccatactggggatggatgtcctttgccaggccaagagtggcatggggaaaacggccgtgttcgtgttggctactctgcagcagttggagcccgtaaccgggcaagtcagcgttctcgtgatgtgccacactcgggaactggcctttcagatctccaaggaatatgaacggttttcaaaatacatgcctaacgttaaggtggcggtgtttttcggagggctgagcatcaagaaggatgaggaagttctaaagaagaactgccctcatattgtggttgggacgccagggaggatcctggctcttgcacgaaataagagcttaaacctgaaacacatcaaacactttatattggacgagtgtgacaagatgctagaacaactcgacatgcgtcgcgatgttcaggagatttttaggatgacacctcatgagaaacaggtcatgatgttctccgctaccttatag

SEQ ID NO: 231968 - DNA, 696 bp, Artificial Sequence
  derived and/or modified sequence
atggcagagaatgatgtcgataatgagctgctggattacgaagacgatgaggtcgaaacggccgcaggcggagatggggcagaagcaccagctaagaaggacgtgaaaggtagctacgtgagcattcacagcagcggcttcagagactttctgctgaaacccgagcttctaagagcaatcgttgattgcgggtttgaacacccttccgaggtccaacatgaatgtattccccaagccatcttgggcatggatgtgctgtgtcaagctaaatctgggatggggaaaacagctgttttcgttttggccacactacagcagctggagccagtcacaggccaggtcagcgtgcttgtgatgtgccatacccgggaactggcatttcagatctctaaggagtacgagcggttcagcaagtacatgccaaatgtaaaggtagctgttttcttcgggggactgagcattaagaaggatgaagaggtactcaagaaaaactgtcctcacatagtggttggcacgcccggtagaatcctcgccttagcaaggaacaaaagccttaacctgaaacacattaaacacttcattcttgacgaatgtgacaaaatgctggagcagctggacatgcgcagagatgtgcaggagatttttcggatgactcctcacgaaaagcaggtgatgatgtttagcgcaacgctctag

SEQ ID NO: 231969 - DNA, 717 bp, Artificial Sequence
  derived and/or modified sequence
atggctgagaatgacgtagataatgagctactcgactatgaggacgacgaggtagaaacggcggctgggggagatggagccgaggcaccagccaagaaggatgtgaaaggatcatacgtgtcaatccattcttcaggctttcgggattttctgttaaagccagagttgctcagagccatcgtggactgcggtttcgagcatccatccgaggtgcaacacgagtgtatcccccaggcaatcttaggcatggatgtactgtgtcaggccaagtcaggtatgggaaagacagccgtctttgtgctggcgactctacagcagctggagcccgtgacggggcaagtgtctgtgctagtaatgtgccacactcgggaactggcctttcagatctccaaggagtatgaaaggttctctaagtacatgcccaatgtgaaagtggccgtgttctttggcggtctcagtattaagaaagatgaggaggtgctgaagaagaattgcccgcacattgtggtcggcacaccaggcaggatattggctcttgcaagaaacaagagcctgaatctgaaacatataaaacatttcatcctggatgagtgcgacaagatgctggaacaactcgacatgagaagagacgtccaagagatctttcgcatgacaccacatgagaagcaagtgatgatgttctcggctactttgagcaaggagatacgcccagtgtag

SEQ ID NO: 231970 - DNA, 1287 bp, Artificial Sequence
  derived and/or modified sequence
atggccgaaaatgacgtagataacgaattgctggactacgaagacgacgaggtcgagacggccgctggcggtgacggggcagaggctcccgctaaaaaggacgtcaaggggtcttatgtatccatacacagctccggctttcgggactttctgttgaagcctgaattactgcgcgcaatagtggattgcgggttcgagcatccctccgaggtccagcatgagtgcatcccgcaggccatcctgggcatggatgtgctgtgtcaggcaaaaagcggaatgggaaaaacagccgtgtttgtccttgccacactgcagcaattggagcctgtgacaggccaggtgagtgtgcttgtcatgtgtcatactcgagagctggcctttcaaatcagcaaggaatatgagcggttcagcaaatatatgcctaacgtgaaggtggccgtgttttttggtgggctctcaattaaaaaagacgaggaggtcctgaaaaaaaattgtccacatattgtcgtgggcacaccagggcgaatcctggcactggccagaaataagtccttgaacttgaagcacataaaacacttcatcctggatgagtgcgataagatgctggaacagctggatatgcgaagagacgtgcaagagatctttcgaatgaccccccatgagaaacaagtgatgatgttctccgctacactgtccaaagagattaggcctgtctgtagaaagtttatgcaggatcctatggagattttcgtcgacgatgagaccaagctaaccctccacggcctacagcagtactatgtcaagctcaaggacaacgaaaagaaccgcaagttattcgatcttctggatgtactggagtttaaccaagtcgttattttcgtcaagtccgtgcaacgatgtattgctctggcccagctgctggtggagcaaaattttcccgcaatcgctatccacagaggcatgccacaggaggagagattaagccggtatcagcagttcaaagactttcaacgcagaatcctggttgccacaaatctgttcggccgtggcatggatatcgaacgggtaaatattgcctttaattatgatatgcccgaggatagtgatacctacttgcatcgagtggcccgagccggaaggttcggaacgaaaggcctggccattacattcgtgtccgacgagaacgacgccaaaatactgaatgatgtgcaagacagattcgaagttaacatatctgagctgcctgatgaaattgatatcagtagctacatcgagcagacgcgttag

SEQ ID NO: 231971 - DNA, 564 bp, Artificial Sequence
  derived and/or modified sequence
tagtcggaggaacgggacattgggaagcccatggagatatttgttgacgacgagacaaaactaactctacatggcctgcaacagtattatgtcaagttgaaagacaatgagaagaatcgtaaactgtttgatcttctggacgtcttagagtttaatcaggttgtcatttttgtaaagtccgtgcagcgatgcatcgcattggctcagctcctcgttgaacaaaactttccagctatagccattcatagagggatgccccaggaggagcgattgtccaggtatcaacagttcaaagactttcagagaaggatcctcgtggctactaacctgtttggacgcggaatggacatcgaacgagtaaatatcgcatttaattacgacatgcccgaggattcagacacatacttacaccgggttgcccgagcaggcaggtttggcacaaaggggctcgccatcacgttcgtatctgacgagaatgacgcaaaaattttgaatgacgtccaggatcgcttcgaggtgaacataagtgagctgccggacgaaattgacatttcctcttactag

SEQ ID NO: 231972 - DNA, 564 bp, Artificial Sequence
  derived and/or modified sequence
atgggcagttcacacattgggggattaagcatcaatgaacggcgttgttccgcatcactgggcctggtaatggcagagaatgacgtggacaatgaactgttggattatgaagacgatgaagtggaaactgctgccggtggggacggtgcagaggcccctgccaagaaggatgtcaaggggtcttacgtttctatacactcctccggctttcgggactttttgctgaagccggagctgctcagggccattgtagattgcggcttcgagcatccaagcgaagttcagcacgagtgtatacctcaggccatacttggaatggatgttctctgccaggccaagtcaggtatgggaaagaccgctgtttttgtgcttgccacacttcagcaactagagccagtgaccggtcaggtgagcgttctggtcatgtgtcatactcgggaactcgcctttcagatcagcaaggaatacgaaagattcagcaagtatatgcctaatgttaaggtggctgtgttcttcggagggctctcaatcaagaaggatgaggaagttctgaagaaaaattag

SEQ ID NO: 231973 - DNA, 717 bp, Artificial Sequence
  derived and/or modified sequence
atggcagagaacgatgtcgacaatgaactgctggattacgaggacgatgaagtggagacagccgctggaggagatggtgcagaggctcccgctaaaaaagatgtgaaaggcagctatgtcagcatacacagctctgggtttagagacttcctgttaaagcctgagctgcttcgcgcaatcgtggattgcgggtttgaacacccatccgaagttcagcatgagtgcatcccacaggccattctcggcatggacgtcctctgccaggccaaatcaggcatgggtaaaaccgctgtcttcgtgttagccacgttgcaacagctcgagcccgtcacaggccaggtaagcgtacttgtcatgtgtcacacacgagagctggcattccagattagtaaggagtacgagaggtttagcaagtacatgccgaatgtgaaggtagcagtgtttttcggcggtttgtccattaagaaagacgaagaggtgctgaagaaaaactgtccccatattgtagtgggcacacctggacgcattctcgcattagcacggaacaagagcctgaatcttaaacacattaaacactttatcctggacgagtgtgacaaaatgttggagcaattggatatgcggagggatgtacaggagatttttcgcatgacaccgcatgagaaacaagttatgatgttctccgcaactctttctaaggagatccgaccagtgtag

SEQ ID NO: 231974 - DNA, 738 bp, Artificial Sequence
  derived and/or modified sequence
atgtggacaatgagctcctggaccatgaagatgatgcgttggcgccaacaacttggcgaaatgggcctacgacctctgccgagacgaatgagtagggcccctatgtctccgtcaacggccctggctttcgtgactagctgcagttcccagtcttgctccggacctctgtcgacagtggccctgtccattcgccaaaaggtggccgttttttttggcggtttgtccattaagaaggacgaggaggttctcaaaaagaattgtccacatattgtcgtgggcaccccgggtaggatcctcgccctcgcacggaataagagcctgaacttgaaacacatcaagcacttcatcctggacgaatgcgacaaaatgttggaacagttggatatgcgaagagatgtacaggagatcttccggatgactccccatgaaaaacaggtgatgatgttttcagccaccctgtccaaggaaatacgccctgtctgcagaaaatttatgcaggatcccatggaaatctttgtcgatgatgagactaagctcacactccatggcctccagcagtactacgtgaaactaaaggacaatgagaaaaatcggaagctattcgatttgctcgacgtgcttgaatttaatcaggtggtaatctttgtgaagtctgtccaaagatgcattgcgctggcccagttgctggtggagcaaaatttccccgcaatcgccatccatcgaggaatgcctcaatag

SEQ ID NO: 231975 - DNA, 1278 bp, Artificial Sequence
  derived and/or modified sequence
atggcagagaacgacgttgacaatgaactgctggattatgaggacgatgaggtcgaaactgctgcagggggagacggagccgaagcacccgcaaagaaggatgtgaaggggtcttatgtaagtattcattcatcaggattccgtgatttcctactaaaacccgagctgctgagagctatcgttgactgtggcttcgaacatccctctgaagtgcagcatgaatgcatcccccaggctatcctgggcatggacgtgctctgccaagcaaagtctggaatgggaaagaccgccgtgtttgtcctcgccactctgcaacagctcgagcccgtgaccggccaagtgtccgtccttgtgatgtgtcacacgcgagaactcgcttttcagatttccaaagaatatgagagattcagcaaatatatgccaaatgtcaaagtggccgtgttcttcggcggtttgagcattaaaaaagatgaagaggtgcttaaaaagaattgtccccatatagtcgtgggcacccccggacgaattctcgccctggcacgcaataaatccctgaaccttaaacacataaagcactttattttggacgagtgcgacaagatgctcgagcaactcgacatgcgaagggatgttcaggagatcttcagaatgacaccccacgagaagcaggtcatgatgtttagcgcaacactgtccaaggagattcggcctgtctgccggaaattcatgcaggatccaatggagatcttcgtggatgacgagaccaaactgacacttcatggcctgcagcaatactatgtgaagctcaaggataacgaaaagaaccggaaacttttcgatctgctggatgttctggaattcaaccaggtggtaatattcgttaagagtgtacaaagatgcatcgcactcgctcaactcttagtggaacagaacttccctgcgatcgccatacatcgtggtatgccacaggaggaaaggctgagccggtaccagcagtttaaggatttccagagacgcattcttgtcgcaaccaacttgttcggcagggggatggacatcgaaagagtgaacatcgccttcaactatgacatgcctgaagattctgatacttacttacatcgctgctaccccctgtctccctcacgatggcctgaacaagcagggctggcccctcgtgcttggctctctcatctgtgtcccatgaggatgatgccacgttcctctatgatgtgtaggattgcactccggtccatcctggtcagctgcctcatgcgctag

SEQ ID NO: 231976 - DNA, 711 bp, Artificial Sequence
  derived and/or modified sequence
atggccgaaaatgacgtggataacgagctgctcgattatgaggacgacgaagttgaaacagctgccggtggagatggagccgaagctccggctaaaaaggatgtcaagggcagttatgtgtcgatacatagctcaggttttagggactttctgttgaaaccagagctgctgagggcaattgtcgactgcgggtttgagcatccctctgaggttcagcatgaatgtattccgcaggccatactgggcatggacgtgttatgccaggctaagtctggcatgggtaaaacagccgtatttgtgcttgcgaccctccagcaactggagcccgtgacaggccaagtgagcgtactggtgatgtgtcacactcgcgagttagcctttcaaattagcaaggagtatgagcgcttctcaaaatacatgcccaatgtgaaggtggccgttttctttggaggactctccatcaaaaaagatgaggaagtgcttaagaaaaattgtccacatattgtggtcggaactccagggaggatcctagctcttgcaaggaataaaagcttaaacctgaagcacattaagcactttattctcgatgagtgcgataagatgttggagcagttggacatgagaagagacgttcaagaaatctttagaatgaccccacacgagaagcaggtgatgatgttcagcgcgacgctcagcaaggaaataaggtag

SEQ ID NO: 231977 - DNA, 738 bp, Artificial Sequence
  derived and/or modified sequence
atgtggacgatgagtagctggacaatgaagatgatgcggtggagacagcaactgggggaaatgggcttacgaccgctcccgaggcgtatgtctcgtgctcccatgtcccctagtaccgccttggccttcgtcaccagttgtagtagtcagtcttgcagcggcccactttctaccgtagcactgtcaatccgccaaaaggttgccgttttctttggtgggctctcaatcaagaaagacgaggaggtgctgaagaagaactgcccacacattgtggtggggaccccaggcaggattctcgcactcgccaggaataaaagtctgaacctcaagcacattaaacacttcattctggatgagtgcgacaaaatgcttgagcagctggacatgcgcagagatgtgcaagagatatttaggatgacaccacatgagaaacaggtcatgatgttttcggcgaccttgtcaaaagaaattcgccctgtttgcaggaaattcatgcaggacccaatggagattttcgtcgacgatgaaacgaaacttacactccacggcttgcagcaatactacgtgaagctgaaggacaatgagaaaaatcgcaagctgtttgacctccttgatgtcctggagttcaatcaggttgtgatcttcgtgaagtcagtacagaggtgtatagctttagctcagcttttggtggagcagaattttcctgcaatcgcaattcacagaggaatgccacagtag

SEQ ID NO: 231978 - DNA, 1287 bp, Artificial Sequence
  derived and/or modified sequence
atggccgagaatgatgtcgataacgaactgctcgactatgaggatgatgaggtggaaaccgcggctggaggggatggcgctgaggccccagccaaaaaggacgtgaaggggtcttacgtgagtattcactccagcgggttccgggacttcctgctgaaacccgagctgctgcgtgctatcgtcgactgtggattcgagcatccgtccgaggtacagcacgagtgcatccctcaagctattctggggatggatgtgttatgtcaggcaaagagtgggatgggcaaaactgccgtcttcgtgctggccaccctccagcaactggaacctgtgacaggacaagtctccgtgttggtaatgtgtcacacacgagaactggcctttcagatctccaaggaatacgagagattttccaagtacatgcctaatgtcaaggtggcggtgttttttggcggtctctctataaagaaggacgaggaagtcttgaaaaaaaattgtccccatatcgtagttggcacccccggaaggattctggccctagccagaaataaaagtttgaacctgaaacacatcaagcattttatactggatgaatgcgataaaatgctagagcagctagatatgcggagagacgtacaggaaatcttcaggatgacacctcacgagaagcaagtcatgatgttctccgccacattatccaaagagattaggccagtctgccgtaaatttatgcaggatccaatggagatcttcgtcgatgatgaaaccaagctgactctccacggactgcagcaatactatgtgaagcttaaggacaacgagaaaaacaggaagctcttcgacctgctggatgtattggaatttaaccaggtggttatttttgtcaagtctgttcagcggtgcatagctctggcgcagctcctggtggagcagaattttcccgctatagcaattcatcggggaatgccccaggaagagagattgtcccggtatcagcagttcaaagacttccagcgacgtattctggtggctacgaatttgtttggacgtggcatggatattgagcgggtaaacattgccttcaactacgacatgccagaagactccgatacatacctgcaccgtgttgcacgcgctggtcgatttggtacaaaggggcttgctatcacattcgtaagcgatgaaaatgatgcaaagatcctcaacgacgtacaagaccgatttgaggtgaatattagcgagctcccagacgaaatcgacataagctcttatatcgagcagacccggtag

SEQ ID NO: 231979 - DNA, 411 bp, Artificial Sequence
  derived and/or modified sequence
atgggcggtggacgcaggccatacgacgtctttttcagtaaggttatggccgaaaacgacgtggacaacgaactcctcgattacgaggacgacgaggtcgaaaccgctgccggaggagacggtgcggaggcccctgctaagaaggatgtgaaggggagttacgtgtctatccacagctcaggcttccgggatttcctgctcaaaccagagctgctgcgcgcaatcgtggactgcggattcgagcaccctagcgaagtgcagcacgaatgtatcccacaggcaatcctgggcatggatgtgctgtgtcaggctaagtccgggatgggcaagacggcagttttcgtgctggcaacactgcaacaacttgaaccagttacaggacaggtttccgtcctggtgatgtgtcattag

SEQ ID NO: 231980 - DNA, 987 bp, Artificial Sequence
  derived and/or modified sequence
tgagcaaccctgcaacagttggaaccagtcaccggccaggtttctgtgttggtgatgtgccatacgagagagctcgcgtttcaaatttccaaagagtacgaacgcttctcgaaatatatgcctaacgtgaaggttgcggtcttttttggaggactcagcattaaaaaggatgaggaggtgctgaaaaaaaattgtcctcatattgtggtgggcacgcccggtcgcattcttgctctggcccgaaataagagcctgaatcttaaacatatcaaacactttattttggacgaatgcgacaaaatgttggaacaacttgacatgaggagagatgtgcaggagattttccgcatgactccacacgagaagcaagtgatgatgttcagcgctacactcagtaaagagatccgccctgtgtgtagaaagttcatgcaggatcccatggagatcttcgttgatgacgagacaaaactcaccctgcacgggctgcagcagtattacgtgaaactcaaagataatgaaaagaacagaaaactgttcgaccttctcgacgtcttggaatttaatcaggtggtgatcttcgtcaagtctgtgcagagatgtattgccttagcccagttgcttgtggaacagaactttcccgcaatcgccatacatcggggtatgccgcaggaagagcgcctctcaagataccagcagttcaaggactttcagcgtcggatcctggtcgcaaccaacttgttcggacgcggtatggatatagagagagtgaacatcgcttttaactatgacatgcccgaggactctgacacgtacttacatagagtggctcgggcagggagatttggaactaaaggcttagccatcacctttgttagcgacgagaatgacgctaagattttaaatgatgtgcaggacaggtttgaagttaacattagcgaactgcccgatgaaatcgacatctcgtcatacattgaacaaactcgttag

SEQ ID NO: 231981 - DNA, 399 bp, Artificial Sequence
  derived and/or modified sequence
atggctgagaacgacgtggacaacgaattgctcgactatgaagacgatgaggtggagactgccgctggcggtgacggagcagaggcacctgcaaaaaaagacgttaaggggtcttatgtctctatccactcctcaggtttcagggacttcctactaaagcccgagttactccgggctattgtcgactgcggctttgagcatccaagtgaggttcagcacgaatgtataccccaggccatactggggatggatgtgctgtgccaggccaagtccggaatgggcaagaccgcagtctttgtgctggccacccttcagcagctggagcccgtgacagggcaagtgtgtttttgtgactcacatttcccacggggagacaatgaggaactgcatctgccttag

SEQ ID NO: 231982 - DNA, 420 bp, Artificial Sequence
  derived and/or modified sequence
atggcggaaaatgacgtagataatgaattacttgattatgaggatgacgaggtggaaacagcggctgggggagatggtgctgaagcaccagcaaaaaaggacgttaagggtagttatgtttcaattcacagcagtggatttcgcgatttcttacttaagcctgaactgttaagagccatcgtggactgtggattcgaacacccgagtgaggtgcagcacgagtgcataccacaggcaatactcggaatggatgtgctctgtcaggccaaaagcggtatgggtaagaccgcggtgttcgtgttggctacgttgcagcaactggaaccggtgactgggcagtcgcacgagcacatgaccagcgtaaccttggataacctcaccgcggttggggatgtgctttcccaagcctgggggtcctag

SEQ ID NO: 231983 - DNA, 717 bp, Artificial Sequence
  derived and/or modified sequence
atggccgagaacgatgtggacaacgagcttctagattacgaggacgacgaagttgaaacagctgcaggaggggacggagcagaagctcctgcgaagaaggatgtgaagggctcctacgtatcaatccactcttcgggcttcagggatttcctcttgaagccggagctcttacgggcaatcgtggattgtggatttgagcaccccagtgaggtgcagcacgagtgcatcccacaggcaatccttgggatggacgtcctatgccaggccaaatcaggaatgggcaagacagctgttttcgtgctggctacactccagcaattggaacccgtgactggtcaggtgtctgtactggtgatgtgccacactcgcgagctggcctttcagatctctaaagagtatgaacgcttttcaaagtacatgccaaatgtaaaggtagccgtcttcttcgggggactttcaattaaaaaggatgaagaagtactgaaaaaaaattgtccgcatatagtggtggggactccaggacgcatactggcactggcaagaaataaatctttgaacttgaaacacatcaaacacttcattcttgacgaatgtgataaaatgctagagcagctagacatgcgcagggatgtacaggaaattttcagaatgactccccatgagaaacaggtgatgatgtttagcgccaccctctcaaaggagatccgtcctgtgtag

SEQ ID NO: 231984 - DNA, 564 bp, Artificial Sequence
  derived and/or modified sequence
atgggttcgtcccacataggaggcctgtctattaacgagcggcgtagaagcgccagcctcggcctggtgatggcagaaaatgatgtcgacaacgagctgcttgattatgaagacgacgaggtggaaaccgcggctgggggagatggtgctgaagctcccgctaagaaggatgtcaagggctcgtatgttagcatccatagttctggtttcagagactttttgctgaaacccgagttattgcgggcaattgttgattgcggcttcgaacatcccagtgaagttcagcacgagtgcatacctcaggccattctgggcatggacgtgctttgtcaggccaagtccggcatgggaaaaacagcagtgtttgtgttagctacactgcagcagctagaacccgtgaccggccaggtgagcgtactggtaatgtgtcacactcgtgaactggcgtttcagatctccaaggaatacgagcgattttctaaatacatgcccaacgttaaagtggccgtctttttcgggggactttcgatcaagaaagacgaagaggtcctcaagaagaattag

SEQ ID NO: 231985 - DNA, 711 bp, Artificial Sequence
  derived and/or modified sequence
atggccgagaatgacgtggataacgagcttctggattacgaggatgatgaagttgagaccgccgcaggtggggacggtgcagaagcacctgctaaaaaagatgtcaagggcagttatgtgagcatccattctagcggcttcagggacttcctgctcaagcccgagcttttgcgtgcaattgtggattgcgggtttgaacaccccagcgaggttcaacatgaatgtatccctcaggctatactggggatggatgtgctgtgtcaggccaagagcggcatgggcaagactgccgtcttcgtgcttgccactctgcagcaactggagccggtgactgggcaggtttccgtgttggtcatgtgccacacacgcgagttggcattccagatttccaaagagtatgagcggttttcgaaatacatgccaaacgtgaaggtggccgttttctttgggggattgtccataaaaaaggacgaggaagtcctgaaaaaaaattgtcctcacatcgtggtgggcactcccggacgcatcctggccctggcaagaaataagtcgttaaacctgaagcacatcaagcacttcatactggacgagtgtgataagatgttggagcagctggacatgcggcgagatgtgcaggaaatattccggatgaccccgcatgagaaacaggtgatgatgttttccgccaccctcagcaaggagataagatag

SEQ ID NO: 231986 - DNA, 1278 bp, Artificial Sequence
  derived and/or modified sequence
atggctgaaaatgacgtggacaacgaattgctggactacgaagacgatgaagtggaaaccgctgcaggtggcgatggagccgaggcccctgcgaaaaaagacgtgaaggggtcatatgtgagcatccattcttccggattcagggacttccttctcaaaccggagctcttgagagcgatcgtcgactgtgggtttgagcatcccagtgaagtgcagcatgagtgtataccccaagctatcttgggaatggatgtcctctgtcaggcaaaatcagggatgggaaaaacagcggtgtttgtacttgcgaccctccagcagctggagcccgtcactggacaggtttcagtactcgtcatgtgccacacaagagaacttgcctttcaaatcagcaaagagtacgaacgtttttctaaatatatgcctaatgtgaaggtcgcagtgttctttggaggcctgtctattaaaaaagatgaggaggtcctgaaaaaaaactgcccccatatcgtcgtgggtacaccgggacgaatcttagccctggcgaggaacaagtcccttaacctgaagcatatcaaacacttcatactggacgaatgcgataaaatgttggagcagctggacatgcggagggatgtgcaggagatcttccggatgacaccccatgagaaacaagtgatgatgttttccgcgactctctccaaggagattcgtcctgtgtgcaggaaatttatgcaagaccccatggaaatttttgtggatgacgaaacaaagctgaccctgcacgggctgcagcagtactatgtcaagctcaaagataatgagaaaaaccgtaaactatttgacctgcttgacgtcctggagttcaaccaggtggtgatatttgttaagagtgtacagagatgcatcgcccttgcccagctgctcgtagagcagaacttccccgctatagctatacaccgcggtatgccacaggaggagaggttgtcccgttatcagcagttcaaggacttccagcgcagaatcctggtagccaccaatctgttcggccgtggtatggatattgaacgggtgaacattgctttcaactatgatatgcctgaggactctgacacttacttgcacaggtgttaccccctgtctccctctcgatggccagaacaggctggcctggccccacgggcatggttgtctcatctgtgtcccatgaggatgatgcccagatcttccatgatgtgtagaatcgcgctgcgtagcatactcgtttcatgcttgatgaggtag

SEQ ID NO: 231987 - DNA, 696 bp, Artificial Sequence
  derived and/or modified sequence
atggctgagaacgatgtcgacaatgagcttctggactatgaagatgatgaagtggagaccgccgcaggcggagatggagcagaggccccagctaaaaaggacgtgaaaggcagctacgtcagcattcatagttcagggttccgcgatttccttctcaagcctgaactcctcagagctatcgttgactgtggctttgagcaccctagtgaggttcagcacgaatgtattccgcaagcgatcctgggaatggatgtgctgtgtcaggcgaaaagcggaatggggaagaccgctgtatttgtcctcgcaaccctccagcagctggagcctgtgacgggccaggtatccgtactcgttatgtgccacacccgggaactggccttccagattagtaaagaatatgaaagatttagcaagtacatgcctaatgtaaaagttgccgtgttcttcggagggctctctatcaaaaaagatgaagaagtattaaagaagaattgtccgcatattgtggtcgggactccagggagaattctggcactcgcacggaacaagtcactgaacctgaaacatatcaaacattttattctggacgaatgtgacaagatgttagagcagctcgacatgcgaagagacgtccaagaaatttttcgcatgacgcctcatgagaaacaggttatgatgttcagcgccacactgtag

SEQ ID NO: 231988 - DNA, 99 bp, Artificial Sequence
  derived and/or modified sequence
tgagctaccctgcaacagctcgaacccgtcactggtcaggtttgtttctgtgactctcatttccctaggggggacaacgaagagctacatttgccctag

SEQ ID NO: 231989 - DNA, 399 bp, Artificial Sequence
  derived and/or modified sequence
atggcagagaacgacgtagacaatgagttattggattacgaggacgatgaggtggaaacagccgcaggaggcgacggtgctgaggcccctgcaaagaaagatgttaagggctcatatgtgagcattcactcttctggattcagggatttcctgcttaagcctgagctattgcgtgccatcgtggactgtggctttgagcacccatcagaggtccaacacgagtgtatccctcaagcaatactcgggatggacgtcctgtgccaggcaaaaagcggcatgggtaagactgcggttttcgtcctcgccaccctgcagcagttagaacctgtgaccgggcaggtctgcttttgcgacagccatttccccagaggcgacaacgaggagctgcatctaccttag

SEQ ID NO: 231990 - DNA, 399 bp, Artificial Sequence
  derived and/or modified sequence
atggcagaaaacgacgtcgacaatgagctgctggactacgaggatgacgaggtcgagaccgccgctggcggagatggagccgaggctcctgcgaaaaaagacgtgaagggaagctacgtgtctatccactccagtgggtttcgcgatttccttttaaaacccgaactcctccgggctatcgtggactgcggtttcgaacatcctagcgaggtacagcatgaatgtataccccaagctattctggggatggacgtactttgccaagcgaaaagcggtatgggaaagaccgcggtgttcgtgctggctacactgcagcagcttgagcctgtgaccggacaggtgtgcttttgtgattcacatttcccccgaggtgacaacgaagagcttcacctcccatag

SEQ ID NO: 231991 - DNA, 738 bp, Artificial Sequence
  derived and/or modified sequence
atgtggacaatgagcagctggaccatgaagatgatgagatggcgccagcaacttggcgagatggggctccgtccgctgcctagacgcatgtcaagagcccctatgagtcccagcacagctctcgctttcgtgacctcctgctccagtcagtcctgcagtgggccactgtcaacagtggccttgagtattagacagaaggtagcagttttctttggcggactttccatcaagaaggacgaggaagtgctcaaaaaaaactgtccccatatcgtcgtcggtacgcccggacgcatcctggcgcttgcgagaaacaagtcattaaatctgaagcatataaaacatttcattctagacgagtgcgacaaaatgttggagcagctggacatgaggcgcgacgtgcaagagatctttcggatgacaccccacgaaaagcaggtgatgatgttcagcgccaccttatctaaagaaattaggcccgtttgcaggaaattcatgcaggatccaatggagatcttcgtggacgacgagactaaactcacacttcacggcctgcagcagtactatgtgaaactgaaggacaatgagaagaaccggaaactgttcgacctgttagacgtcctagaatttaatcaagttgttattttcgttaaatctgtgcagcgatgtattgctctggcccagctcctggttgaacagaatttccccgctatagcaattcaccgaggcatgccacaatag

SEQ ID NO: 231992 - DNA, 696 bp, Artificial Sequence
  derived and/or modified sequence
atggccgaaaacgatgtggataatgagctgctcgactatgaagatgacgaagtagaaaccgctgccggaggagacggagccgaagcacctgctaagaaggacgtaaaagggtcttatgtgtccatccatagctcggggttcagggacttcctgctcaagccggagttgctgcgtgcaattgttgactgcggctttgaacacccaagcgaagttcaacacgaatgcatccctcaagctattctcggaatggacgtattgtgtcaggctaagagcggtatgggcaagaccgctgtcttcgtccttgccacactgcagcagctggaaccagtcactggccaggtgtcagtgctggtgatgtgtcacacacgtgagctcgcatttcagatctccaaagagtatgagagattctctaaatatatgccaaacgttaaggtggcagttttcttcggagggctaagtatcaagaaagacgaggaagtcttaaaaaaaaattgccctcacattgtggtgggaactccgggacgtatactggccttggctcgaaacaagtctctgaacctgaaacatataaaacattttatcctggacgaatgcgataaaatgctggagcagcttgacatgagaagggacgtccaggagatctttcgaatgactccgcacgagaaacaggtaatgatgttctccgctaccctttag

SEQ ID NO: 231993 - DNA, 732 bp, Artificial Sequence
  derived and/or modified sequence
atgtggactatgagtagctggactatgaagatgatgaggtggaggcagcagcttggtgagatgggcctaaggcctctgcctagaaggatgtctcgcgcacccatgagcccctcaacagctctagcattcgtaacttcatgttcctcccaaagttgctcaggtcctttgagcacggttgctctgagtatccgccagaaagtgtcagtcctagtgatgtgccatactcgggagctcgcttttcagatatctaaggagtacgagagattctcgaaatacatgcccaatgttaaggtggctgtgttttttggaggcctgtctatcaaaaaggacgaggaagttctgaaaaaaaactgtccccacatagtggtgggtacccctggtcggatcctggcactcgcccgaaataagagtctcaatctcaaacacattaagcacttcattctagatgagtgtgacaagatgctcgaacaattggacatgcgacgggacgtgcaagaaatattccggatgactccgcacgagaagcaggtgatgatgttctcagcaaccctgtctaaggagatcaggccggtttgccggaagttcatgcaggacgtcaacacattgctccctagcctgcctcccctgcctgctcggtgtctgttacccttcttagcgttattcctacggctcccatgtcattccagtgccaagaaggctgcctgcgcccaactgggcgtgatgactccttag

SEQ ID NO: 231994 - DNA, 1287 bp, Artificial Sequence
  derived and/or modified sequence
atggccgagaacgatgtggacaatgaactgttagactacgaagatgacgaagtcgagactgctgctggcggagacggcgcagaggcccctgcgaagaaggacgtgaaaggcagctatgtgtcaatccactcgagtggtttccgcgacttcctcctgaagccagaactgctgcgggctatcgttgactgcgggttcgagcacccatctgaagttcagcacgagtgcatcccacaagcaatcctgggaatggatgtgctatgccaggcaaagtccggcatgggaaaaaccgccgtcttcgttctggcaacgctgcaacagctggagccagtcactggacaggttagcgttctcgtgatgtgccacacgcgagaactggcatttcagatctcgaaggagtacgagaggttttctaagtatatgccaaacgtcaaggtggctgtgtttttcgggggtttgtccattaaaaaagatgaagaagttcttaagaaaaattgtcctcacatcgtggtgggtacaccaggcagaattctggctctcgcacgcaacaagtccctgaatttgaagcatattaagcattttatcctcgacgagtgcgacaagatgctcgagcaactggacatgaggagagatgtccaagagatcttcaggatgacaccacacgagaaacaggtgatgatgttctctgcaactctctctaaagagattcgccctgtgtgcaggaagttcatgcaggatcccatggaaattttcgtcgacgacgaaacgaagttgaccttgcacggcctgcagcagtattatgtgaagctgaaagacaatgagaagaacaggaagctgtttgacttgctcgacgtactggagttcaaccaggtagtgatattcgtaaagtctgtccagcgctgcatcgcactcgcccagttgctcgttgagcagaattttcctgctatcgctattcatcgcggaatgccccaggaggagcggctttcaagataccagcagtttaaggacttccagcgtagaatcctggttgcaacaaacctctttggaagagggatggacatagagcgcgtgaatatagcatttaattatgatatgccagaggatagtgatacttatttgcacagagtggccagagccggacggtttgggacaaaagggttggccattacgtttgttagcgacgagaatgacgcaaagatactcaatgacgtccaagaccgcttcgaggtgaacatctctgagctgccagacgagatcgacatctcctcgtacattgagcagactaggtag

SEQ ID NO: 231995 - DNA, 1278 bp, Artificial Sequence
  derived and/or modified sequence
atggcggaaaacgatgtcgataacgagctgctggattacgaggacgatgaagtcgagaccgctgccggaggggatggagcagaggcaccggctaagaaggacgtgaagggaagttatgtatccatccattcctcagggtttagggatttcttactgaagcctgagctgcttcgcgcaattgtggactgcggcttcgagcatccctctgaggttcagcacgaatgtatccctcaggccatcctcggcatggacgtcttgtgccaggctaagtcagggatgggcaagaccgccgtgtttgtattagcaaccctgcagcaactggagcccgtgactggccaggtgagcgttctggtcatgtgtcataccagggaactggcttttcaaatctccaaggagtacgaacggttctctaaatacatgcccaacgtcaaggtcgctgtcttttttggtggactgtccatcaaaaaagacgaggaggtcctcaagaaaaattgcccacacatcgtcgtgggtacacctggtcgtatactggcattggcccgaaataagagtcttaatctgaagcacattaagcattttattctagacgaatgcgacaagatgcttgaacagcttgatatgaggcgcgacgttcaggagatcttccgaatgacacctcacgaaaagcaggtgatgatgtttagcgcaacactctccaaggagatccgaccggtgtgcaggaagttcatgcaggaccccatggaaatatttgttgatgacgagacaaagctgaccctgcatggcctgcaacagtactatgttaagttgaaggacaacgagaagaaccgcaagctgttcgacctactcgatgttttggagttcaatcaggtggtgatatttgtcaaatccgttcagaggtgcatcgcactggcccagttgctggtggaacagaatttcccagcaatcgccattcacagagggatgccccaggaggagcgtctttctcggtatcagcagttcaaagatttccaacgcaggattctggtggctacaaatctgttcggaaggggcatggatatcgaaagggtcaacatagcattcaactacgatatgccggaagactcagacacttatttgcataggtgttaccccctgtcaccctctagatggccagagcaggctgggctcgcacctcgagcgtggctcagccacttgtgtccgatgagaatgatgcccaggtcgagcatgatgtgccgaatcgccctacgttccatcctggtaagctgcctgatgcgctag

SEQ ID NO: 231996 - DNA, 291 bp, Artificial Sequence
  derived and/or modified sequence
atggctgaaaacgatgtagacaatgaattgttagattacgaagatgacgaagtggagactgcagccggaggagacggcgcagaagctccagccaagaaggacgtgaaaggatcctatgtatcaattcactcgagcggattcagagattttctgttaaaaccagagcttctgcgcgcaatcgtggattgcggctttgaacatccctcagaggttcagcacgagtgcattcctcaggctatcctcggtatggacgtcctctgccaggcaaagtctgggatgggcaagacctag

SEQ ID NO: 231997 - DNA, 411 bp, Artificial Sequence
  derived and/or modified sequence
atgggcggtggcagacgaccatatgacgtcttctttagtaaggtgatggccgagaacgatgtggacaatgagctcctggattatgaggatgatgaggtcgaaaccgctgcgggaggggacggggctgaggctcctgctaagaaagatgtaaagggatcttacgtgtctatccatagttctgggttccgcgatttcctgttaaaaccagagctgctgcgagcaatcgtggattgcggctttgaacacccgtcggaagtgcagcacgagtgcatcccacaggcaatcctgggaatggatgttctgtgtcaggctaagagcgggatgggtaagaccgccgtttttgtcttggccacactgcagcagcttgagcccgtgactggccaggtctcagtgcttgtgatgtgtcattag

SEQ ID NO: 231998 - DNA, 564 bp, Artificial Sequence
  derived and/or modified sequence
tagtctgaggaacgagacattggcaagccaatggaaatctttgtggacgacgaaaccaagcttaccttgcacggcctgcagcaatactacgttaaactcaaggacaacgaaaagaatcgcaagctctttgacctgcttgacgtgctggaattcaaccaggttgttatctttgttaagtcggttcagaggtgcatcgccttggcccagttgttagtcgagcagaacttccccgcaattgctatccacagaggcatgccccaggaagagaggttaagccgataccaacagtttaaagacttccagagacgaattcttgtcgcgacaaatctttttggcaggggcatggatatagagcgtgtgaacatcgcctttaattacgacatgcccgaggattccgatacttacctgcatagggtggctcgcgctgggaggttcggaacaaaaggattggccatcactttcgtcagtgatgaaaacgacgctaaaattctgaatgacgttcaggatcgtttcgaagtcaacatttcagaactgcccgacgagattgatatcagttcttactag

SEQ ID NO: 231999 - DNA, 717 bp, Artificial Sequence
  derived and/or modified sequence
atggctgaaaatgatgtcgacaacgaattactggattacgaagacgacgaggtggagactgcagcaggtggcgatggagccgaagcccctgctaaaaaagatgttaagggcagctatgtatcgatccattcaagtggattcagggactttttgctgaaaccagagctactgagagcaatcgtggactgtggctttgaacacccgagtgaagtgcagcacgaatgcatccctcaagccattctggggatggatgtgttgtgtcaggctaagtccggaatgggcaaaactgccgtgttcgtactggccacacttcaacagctggaacctgtcactggtcaggtcagcgtattagttatgtgtcacaccagagaacttgcgttccagatctcaaaagagtatgagcgcttctccaagtatatgcccaatgttaaggtagccgtgttcttcgggggtctgtcaattaagaaggatgaagaggtgctgaagaagaactgccctcacatcgttgtcgggactcctggcaggatccttgccctcgccagaaacaaatcactgaatctcaagcatatcaaacacttcattctggatgaatgcgacaaaatgttagaacagctggatatgcgaagagatgtacaggagatcttcagaatgactccacatgaaaaacaggtgatgatgttcagtgctaccttatccaaggagatacggcctgtttag

SEQ ID NO: 232000 - DNA, 417 bp, Artificial Sequence
  derived and/or modified sequence
tgagccaccctgcagcagctagagcccgtgaccgggcaggtttccgtacttgtcatgtgccatacacgggagctggcctttcaaatcagcaaagaatatgaacgctttagcaaatatatgccaaatgtcaaagtggcagtcttctttggcggtctgtccatcaagaaggatgaagaagtgctaaaaaagaattgccctcacattgtggtgggcaccccaggacggattcttgcgcttgccagaaacaaaagcctgaacctaaagcacatcaagcatttcatcttggatgaatgcgacaagatgttagagcaactggacatgcgacgggatgtacaggaaattttccgcatgacacctcatgagaaacaggtgatgatgttttcggcaaccttgagcaaagaaattaggcccgtctag

SEQ ID NO: 232001 - DNA, 870 bp, Artificial Sequence
  derived and/or modified sequence
atggctgagaacgacgtggacaatgagcttctagactacgaagacgacgaagtcgaaactgcggctggtggcgatggtgcagaggccccagccaagaaggatgtgaagggatcttatgtcagcattcactcgagtggcttcagagattttctcctgaagccagagctcctgagagctatagtggattgtggctttgaacacccctcggaggtgcagcatgaatgcatccctcaggctattctgggcatggatgtcctctgtcaagccaaatcagggatggggaaaacggctgtgttcgtcttggccacccttcagcaactggagccagtcactggacaggtgtccgtcctcgtcatgtgccatacaagagagctcgccttccagatctcaaaagagtatgagaggttcagcaagtacatgccaaacgtcaaggtggcggtcttttttggcggactgtcaatcaagaaagacgaagaagtcctcaagaaaaattgtcctcacatcgtagtaggaactcccggacgaatcctcgcgctggcccgaaacaagtctttgaacctcaaacatattaagcatttcattctggacgagtgcgacaagatgctggagcagctggatatgagacgggatgtgcaggaaatcttcaggatgactccccacgaaaagcaggtcatgatgttcagtgcaactctctcgaaagagatccgtcctgtttgcagaaaatttatgcaggacccaatggagatattcgtagatgatgaaacaaagctcaccctccatggcctccagcagtactatgtgaaactgaaagataatgagaagaatcgcaagctgtttgatctgctggacgtcttggagtttaaccaatag

SEQ ID NO: 232002 - DNA, 1287 bp, Artificial Sequence
  derived and/or modified sequence
atggcagaaaacgacgtggacaatgaattgcttgattatgaggacgatgaagtggaaactgccgctggcggtgatggagcagaagctcccgcaaaaaaagacgttaaggggagctatgtttcaattcacagttccggattccgggacttcctgctaaagcctgagctgctgcgggctatcgttgactgcgggtttgagcacccgtccgaagttcagcacgaatgcataccacaggccattctgggcatggatgtcttatgccaggccaaatccggaatgggtaagactgctgtgttcgtgctggccacactccagcagctcgagcccgttaccggacaagtgtccgtccttgttatgtgtcatactcgagagctagcatttcagatctctaaagaatatgaacgattcagcaagtacatgccaaatgtgaaggtggctgtgttcttcggagggctttcaataaagaaggacgaagaggttttaaagaaaaactgcccccatatagtggtcgggacaccgggtcgaattcttgcactggcccgtaacaaaagtctaaacctcaagcacataaagcattttatactggatgagtgtgataaaatgctggagcagttagatatgcgcagagacgttcaagagatattcagaatgactccacacgagaaacaggttatgatgtttagcgccacactgtctaaggagattaggccagtgtgcaggaagtttatgcaagacccgatggaaatttttgtagacgatgagacgaagctgacactacatggcctgcagcaatactacgttaaattgaaggacaacgagaaaaatagaaagttgttcgacctgcttgacgttctggagtttaatcaggtggtgatctttgtgaagagcgtgcagcgctgtatcgctttggcacaactcctggtcgagcaaaattttcccgctatcgctattcacagaggcatgccacaagaagagcggctgagccgatatcagcaatttaaagactttcagcgccgtatattggtggcaacgaacctgttcggaaggggaatggatattgaaagggtgaatattgcttttaattacgacatgccagaagacagtgacacctacctccaccgggtggcaagagcaggaagattcggcacgaagggattggccattaccttcgttagtgatgagaacgatgcgaaaatactcaatgatgtgcaggaccgattcgaagtgaatattagcgagctgcccgacgaaattgatatttcatcgtatattgaacagacacggtag

SEQ ID NO: 232003 - DNA, 696 bp, Artificial Sequence
  derived and/or modified sequence
atggccgagaacgacgtcgataacgagctgctagattatgaggacgacgaggtcgagactgcagcaggaggcgacggtgccgaagccccagccaagaaggacgtgaaggggtcctacgtttcaattcacagtagtggctttagagattttcttctaaagccagagcttctaagggccattgttgactgcggcttcgagcacccaagcgaagttcagcacgaatgcatcccccaggctattttaggcatggacgtgctctgccaagccaagagtggaatgggcaaaacggccgtgtttgtccttgccactctgcagcagctagagccagtcacgggacaagtttccgtgctggtgatgtgtcacacgcgcgaactcgccttccagatctctaaggagtacgagcgcttctcaaagtacatgcctaacgtgaaagtcgccgttttttttggcggactcagtataaagaaagatgaggaggtgctgaagaagaactgcccccacattgttgtgggcacgcctggtagaattctggcgctcgccaggaacaagagcctgaatctcaaacacattaagcattttatcttagacgagtgtgacaagatgcttgaacagttggacatgcggcgtgacgtccaagagatcttcagaatgacaccgcacgagaagcaggtgatgatgttcagcgcaacgctgtag

SEQ ID NO: 232004 - DNA, 1287 bp, Artificial Sequence
  derived and/or modified sequence
atggccgagaatgatgtcgataacgagctactggactatgaggacgacgaagtagagaccgctgctgggggtgacggcgctgaagcaccggcaaagaaggatgtcaagggaagctatgtttccatacatagcagtgggtttcgagatttcctcctgaaaccggagctgctccgggctatcgttgactgtggctttgagcatccttccgaagtccaacatgagtgcatccctcaggccatcctaggcatggatgtgctctgccaggccaagtctggtatggggaagacggcggtcttcgtactcgccacgcttcagcagctcgagcccgtgacaggacaggtgtccgtgctggttatgtgtcatacccgagagctagctttccagatctctaaggaatacgagcgcttctctaaatatatgcccaacgttaaggtggccgtcttcttcggaggtttatccattaagaaagacgaggaggtgttgaaaaaaaactgcccgcacatcgtggtaggtacacccggacgaatcctggccctcgccaggaataagtccctgaatctcaaacacatcaagcatttcatcctggatgaatgtgacaaaatgcttgagcagttagacatgcgccgagacgtccaagagatctttcgaatgacccctcatgaaaaacaggttatgatgttcagtgctacgttgtcgaaagagattagaccagtgtgccgtaaattcatgcaagacccgatggaaatttttgtggacgacgagaccaaactcaccttacatggcctccagcaatattatgtgaaactgaaagacaatgagaaaaaccgaaagctattcgatttactcgacgtattggagttcaaccaggtggtgatctttgtgaaaagcgtccaaagatgcattgctctggctcaactgctcgtggagcagaactttcctgctatcgccatccatcgaggcatgccccaagaagagcggctcagtagataccagcagttcaaagacttccaacgtcggattttggtagcaacaaatttgtttggccgtggcatggacatcgaaagggtgaatatcgcattcaattacgacatgcctgaggactctgatacctatctgcatagagtggccagggcagggaggttcggtactaagggactggccataacctttgtgagcgacgaaaatgacgcaaagattttgaatgatgttcaggataggtttgaggtgaacattagtgaactgccagatgaaattgacatctcctcatacatcgagcagacaaggtag

SEQ ID NO: 232005 - DNA, 378 bp, Artificial Sequence
  derived and/or modified sequence
atggcagagaacgacgtggataatgaactgctggattacgaagatgacgaagtcgaaactgccgctggtggggatggcgcagaggcccctgccaagaaggatgttaaaggcagttacgtatctatacactctagcggatttcgcgattttctactgaagcccgagctcctgcgcgctatcgtggactgtggttttgaacacccttcagaggtccagcacgaatgcatccctcaggctatcctgggcatggacgtcctctgccaggccaaatccggaatgggcaaaactgcagtcttcgtgctcgcaactctgcaacaacttgagcctgtgactgggcaggtctcggtgttagtcatgtgtcacactcgagaactctag

SEQ ID NO: 232006 - DNA, 294 bp, Artificial Sequence
  derived and/or modified sequence
taggccaccctccagcagttagaacccgtgacagggcaggtgtgtttctgcgattcccactttcccagaggtgacaacgaggagctccatctcccctacgtgtccgtgtattttctgcccaaggtaagcgtgttggtcatgtgccacacccgggaactcgcatttcagatcagcaaggagtatgaacggttcagcaagtatatgcccaacgtcaaggttgctgtctttttcggaggtttgtccatcaagaaggacgaggaggtcttgaagaagaattgcccacacatcgtgtag

SEQ ID NO: 232007 - DNA, 291 bp, Artificial Sequence
  derived and/or modified sequence
atggcagaaaatgatgtcgataatgagctcctggattatgaagatgatgaggtcgaaaccgccgctgggggagacggcgctgaggcacccgcaaagaaggacgtgaagggttcttatgtgtccatacatagttcaggcttccgtgacttccttctgaagcccgagttgcttagagccattgtggattgtggctttgaacatccttccgaggtgcagcacgaatgtatcccccaggctattctcggcatggatgttctctgtcaggccaagagtgggatgggcaagacctag

SEQ ID NO: 232008 - DNA, 291 bp, Artificial Sequence
  derived and/or modified sequence
atggcagaaaacgacgtggataatgagttactcgactatgaggatgatgaggtagaaacagcggcaggtggtgatggagccgaagccccagcaaaaaaggatgttaaaggcagctatgtgagtattcacagttctggattcagagatttcctgcttaaaccagaactcctgcgagctatagtagactgcggcttcgagcacccttccgaggtgcagcatgaatgcatcccacaggcaatcctgggaatggacgtcttatgccaagcaaagtcagggatgggaaagacctag

SEQ ID NO: 232009 - DNA, 1287 bp, Artificial Sequence
  derived and/or modified sequence
atggcagagaacgacgtcgataacgagctcctggattacgaagatgatgaggtggaaactgcagcgggtggagacggcgctgaggcacccgctaagaaggacgtcaagggttcctatgtctctatccattcttccggcttcagggatttcctcttgaaacccgagcttcttagagccatagtggactgtggcttcgaacacccaagcgaggttcaacacgagtgtatccctcaggctatactcggaatggacgtcctctgccaggccaaatccggaatgggcaagaccgcggtattcgtgctagccacactgcagcagctggagcctgtgacggggcaggtgagtgtgctggtgatgtgtcataccagggagctggcgtttcagatcagcaaagaatacgagcgtttcagtaagtatatgcctaatgtgaaagtggcggtctttttcggaggactgtcaataaaaaaagacgaagaagtcctcaagaaaaactgtcctcacatcgttgtgggtactccgggtaggatcctcgccctcgcgagaaataagtctttgaacctcaaacacataaaacacttcatcctggacgaatgcgataagatgctcgagcaattggacatgaggcgggatgtgcaggagatttttcggatgactcctcacgagaagcaagtgatgatgtttagtgctaccttatcaaaggagatccggcctgtctgccgtaaattcatgcaggaccctatggagatctttgtggatgatgaaacaaaattgaccctgcatgggttgcaacaatattatgtcaagctcaaagacaacgagaaaaaccggaagctgttcgacctgctcgacgtgctcgagttcaaccaggtggtgatattcgtaaagtctgtgcaaaggtgtattgccctggcccaactgctggtagagcaaaacttcccagccattgccatccaccgtggcatgccccaagaggaaaggctaagccgttaccagcagttcaaagacttccagaggcgaatcctggtggcaaccaatttattcggcagagggatggatatcgaacgcgtaaatatcgccttcaattacgatatgcccgaagactctgacacctacttgcaccgcgtagccagagcaggacgctttgggacaaagggacttgccatcacatttgtatccgacgaaaacgacgcaaagatcctgaatgatgttcaggaccgcttcgaggtcaacatctctgaactgccagatgaaatagacatctcttcctacattgagcagacgcgctag

SEQ ID NO: 232010 - DNA, 732 bp, Artificial Sequence
  derived and/or modified sequence
atgtggactatgagttcctggactatgaagatgatgcggtggcggcagcagctgggtgagatgggattgcgccctcttccaagacggatgagtagagccccaatgtccccaagtacggcattggccttcgtgacctcctgctccagtcagtcctgcagcggccctctctcgacagtggctctgtccataaggcagaaggtgtcagttctggtcatgtgccacactagggagctggccttccagatatccaaagaatacgaacgattctccaaatatatgccaaacgtgaaggtcgccgtgtttttcggtggactgtccataaagaaggatgaggaagttcttaagaagaactgccctcatattgtcgtcgggacacccggacgtattctggctctagcacgaaacaaaagcctgaatcttaagcatattaagcactttatcctagatgagtgtgataaaatgctggagcagttagatatgcgcagagatgtgcaggagatttttcggatgacaccacatgaaaagcaggtcatgatgttctcagccacactgagcaaggagattcggccagtgtgtaggaaattcatgcaggatgtgaatacactgctcccttctttaccccctctgcccgcaagatgtttgctaccttttcttgcgctattcctgcgcttgccttgccactccagcgccaaaaaagctgcctgtgcacagctgggtgttatgaccccatag

SEQ ID NO: 232011 - DNA, 972 bp, Artificial Sequence
  derived and/or modified sequence
atggcagagaatgacgttgacaacgagctcctggactatgaagatgatgaggtcgagacggcagcgggaggcgatggcgctgaagctcccgctaaaaaggatgtgaaaggatcctacgtgtccatacattcaagcggatttcgcgatttcctactaaaaccagagctgctgagggctattgttgactgtggtttcgagcatccatccgaggtccagcacgagtgcatccctcaggcgatcttggggatggacgtgctgtgtcaggccaagagcgggatgggtaaaaccgccgtttttgtgctagcgaccctacaacaacttgagccggttacaggacaggtgtcagtgctcgtcatgtgccacacccgcgagctggctttccaaattagcaaagaatacgaacgattctcaaagtacatgccaaacgtaaaagtagccgtctttttcgggggtctgtctattaaaaaggacgaagaggtgctgaagaagaactgtccacacattgtggtgggcacaccaggacgcatcctcgccctggccagaaacaagtcactgaacctgaaacatattaagcatttcatactagacgagtgcgacaaaatgcttgaacagctggatatgagacgtgacgtccaagaaatcttcaggatgacacctcacgagaagcaagtgatgatgttttcagcaaccttaagcaaggaaatcaggcccgtgtgccggaaattcatgcaggaccccatggaaatctttgtggatgatgagactaaactgacactacatggcctgcagcaatattacgttaaattaaaagacaatgagaaaaataggaaactatttgatctgctcgacgtgctcgagttcaatcaggagattacctgcaaatcagtccagcgtttcagcaccaccaattcttgtggctaccagccaatttggccacgacacggtcacagagcaggggaacactgcttctag

SEQ ID NO: 232012 - DNA, 972 bp, Artificial Sequence
  derived and/or modified sequence
atggccgagaatgatgttgacaacgagctgctggattacgaggacgatgaggttgagaccgcggctggcggagatggggctgaggccccagctaagaaggatgtgaagggcagttacgtttcaatccactctagtggattcagagattttctgctcaagcccgaactcctgcgcgctatcgtggattgtggcttcgagcacccatccgaggtccagcatgaatgcattcctcaggcgatcttagggatggacgtcctgtgtcaggctaaatcaggtatgggtaaaacagccgtatttgtactcgcaacattacagcagttggagcccgtgacaggccaagtttctgttctcgtaatgtgtcatacacgtgagctcgcctttcagatctctaaggagtacgagagatttagtaagtacatgcccaatgtcaaagtggcggtgttttttgggggtctcagcatcaagaaggatgaagaagtgttaaagaagaactgtccacatattgtcgttggcacaccaggcagaattctcgcgctcgccaggaataaatctctgaatctgaaacacatcaaacactttatcttagacgagtgtgacaagatgttggagcagctggatatgagaagagatgtgcaggagattttccggatgaccccccatgagaaacaggtcatgatgttctctgcaaccctttccaaggagattcgacccgtgtgcaggaaattcatgcaggaccccatggagatctttgtggacgatgagactaaactaacattacatggacttcaacagtattacgtgaagctaaaggacaacgagaaaaatcggaagctcttcgatctactggatgttctggagttcaaccaagagatcacctgcaaatctgtgcagcgcttctccacaacaaattcttgcggatatcagccgatttggccacgacatggacacagggctggagagcattgtttttag

SEQ ID NO: 232013 - DNA, 1332 bp, Artificial Sequence
  derived and/or modified sequence
atggccgaaaacgacgtagataacgaactcctggattacgaggacgacgaggtggagaccgcggctggtggcgatggggctgaagccccagctaaaaaggatgtcaaaggctcctatgtctcaatccacagctcagggtttcgggacttccttctgaaaccagaactgttgagagccatcgttgattgcgggtttgaacacccttcagaagtgcagcacgaatgcatccctcaggccatactaggaatggatgtgctgtgccaggccaagtcaggtatgggcaagacagcagtctttgtgctggcgaccttgcagcagttagagcctgtcacaggacaggtgtacctgggcagggtgttaggcagaggcttctggtgcgtattcgtgtcggtgctggtgatgtgtcacacccgcgagctggcgtttcagatttcgaaagagtatgaaagattcagtaagtatatgccaaatgtgaaggtggcagtcttcttcggtggtctgtctataaagaaggatgaagaagtgctgaagaagaactgccctcacatcgtggttggcacacccggaaggatcctggccctggcccgtaataaatccctcaacctgaagcacattaagcatttcatactcgatgagtgtgataaaatgctggagcagttggacatgcgcagggacgtccaggagatctttaggatgaccccgcatgagaaacaggtcatgatgtttagcgcaacgctgtccaaagaaattagacctgtctgccgaaagttcatgcaagatcccatggagatctttgttgatgacgaaaccaaactcactctgcacggtctgcaacagtactacgtcaagcttaaagacaatgaaaaaaacaggaagctgttcgatctcctggacgtgctggaattcaaccaagtcgtgatattcgtgaaaagcgtccagaggtgcattgcactggctcagctgttggtagaacagaacttccccgcaatcgctattcatcggggaatgcctcaggaggagaggctgtccaggtaccagcagtttaaagattttcaacgcagaatcctagtagccacgaacctgttcggcagagggatggacattgaaagggtcaacattgctttcaattacgatatgcccgaggattctgatacatacttgcatcgtgttgcgagagccggaaggtttggaactaaaggtttggcgataactttcgtgtccgacgagaacgacgccaagatcctgaatgacgtgcaagataggttcgaagttaatatatccgaactgcctgatgaaatcgacatcagctcttatatcgagcagacacgctag

SEQ ID NO: 232014 - DNA, 732 bp, Artificial Sequence
  derived and/or modified sequence
atgtggaccatgagtagctggacaatgaagatgatgcgttggagacagcaactgggagaaatgggacttaggcccctccccaggcggatgagcagggcacctatgtctccctcgacagcactggcctttgtgacaagctgtagctcccagtcttgctcagggccactgagcacagtggcattaagcattcggcaaaaagtaagcgtgctggtcatgtgtcacacacgcgagctggctttccagatctccaaggaatatgagcgatttagtaagtacatgcccaatgtgaaagtcgccgtattcttcgggggattatcaattaagaaagatgaagaagtactcaagaagaactgcccgcacattgtcgtcggaactcctggcagaattcttgctctcgctcggaacaagtcactgaacctaaagcatataaaacactttatactagacgaatgcgataagatgctcgaacagctggacatgagacgagatgtccaagagatttttcgcatgacacctcacgaaaaacaggtgatgatgtttagcgccactctctctaaggagatccgacccgtttgtcgcaaatttatgcaggacgttaacaccctgcttccgagcctgccaccacttcccgctagatgcctcctgccgtttctggccctctttttaagactgccctgccactcttctgccaaaaaagccgcatgtgcacagctgggagtcatgaccccatag

SEQ ID NO: 232015 - DNA, 1332 bp, Artificial Sequence
  derived and/or modified sequence
atggcggagaatgatgtagataatgagctgttggattacgaagatgacgaggttgagactgcggctgggggagatggggctgaggcgccagcaaagaaagacgtgaaaggctcctatgtttccatccatagcagcggcttccgcgattttctgctcaagcccgagctcctgcgagctatagtggactgtgggtttgagcacccctctgaggtccaacacgaatgcattcctcaagccattcttggcatggatgttttgtgccaggccaaatcgggaatgggcaaaacagcagtatttgtactggccactcttcagcagctggagccagtcaccggacaagtatatctcggaagggttctgggcaggggcttttggtgtgtgttcgtatccgtccttgttatgtgtcatacgagagaactcgccttccaaatctcaaaggagtatgagagatttagcaagtacatgcccaatgtcaaggtggcagtgtttttcggtgggctttctatcaagaaggacgaggaggtgttgaaaaagaattgtccgcatatcgtagtcggcactccaggtcgtatactagcactggctagaaataaaagcttaaacttaaaacacataaaacacttcattctggatgagtgcgacaaaatgttggagcaactggatatgcggagagacgtgcaggagatattccggatgacacctcatgaaaaacaggttatgatgttctccgccaccctgtcaaaagagatcagacccgtttgtagaaaattcatgcaggaccctatggagatattcgttgacgacgaaacgaaactcaccctgcacggtttacaacaatattatgtcaagctgaaagacaacgaaaagaacaggaaactgttcgatctgctggatgttctagagttcaaccaggtggtaatttttgttaaatccgtacagcgctgtattgctcttgcacagttgctggttgagcagaacttccccgctatcgcaatacaccgcggaatgcctcaagaagagcgattgagccgctaccagcaattcaaggacttccagagacgaatcttggtggccacgaacctcttcggcagaggcatggatatagagagggtcaatattgccttcaattatgacatgcccgaagatagcgatacctatctccacagagtggctcgtgctgggagattcggcacaaaggggctggcaataacattcgtatcagacgaaaacgacgcaaagatcctgaacgacgtccaagaccgcttcgaggtgaacatctcagagctgccggatgagatcgacatctcctcctacattgagcagacccgctag

SEQ ID NO: 232016 - DNA, 420 bp, Artificial Sequence
  derived and/or modified sequence
atggccgagaacgacgtggacaatgagctgctcgactacgaagatgatgaagtagagacagcagccggtggagacggcgcagaggctcctgcgaagaaagatgtcaagggcagctatgtgagcatccactcgtcaggctttagagacttcttgctaaaacccgagctgcttcgtgcaattgtggattgtggtttcgagcaccccagcgaggttcagcacgaatgcatcccacaagctattttggggatggacgtgctgtgtcaggccaagtccggcatgggcaagactgccgtgtttgtgcttgccaccctgcaacagctggagccagttacaggacagtctcacgagcatatgacatctgttacccttgataacttgactgccgtgggcgacgttttgtcacaggcctggggttcctag

SEQ ID NO: 232017 - DNA, 732 bp, Artificial Sequence
  derived and/or modified sequence
atgtggacaatgtcctcttggactatgaagatgatgaggtggcgtcagcagctcggagaaatggggctccgccctttgccacggcgaatgtcccgggcacccatgtccccctcaaccgctttggccttcgtcacgtcctgttcttcgcagagttgttctggcccacttagtactgttgccctgtccatccgtcagaaggtctcagtcttggtgatgtgccatacccgggagctcgctttccagatatctaaagagtacgagcggttctccaagtatatgccaaatgtaaaagtggcagttttcttcggcggtctaagcatcaagaaagatgaggaagtccttaaaaaaaactgcccacatattgtggtcggcacccccggtaggatcctcgccttagccagaaataaatctctcaaccttaaacatatcaagcatttcatccttgacgagtgcgataaaatgcttgaacagcttgatatgaggcgagacgtccaggagatattcagaatgacccctcatgagaagcaggtgatgatgttttctgccactctcagcaaagagattcgcccagtgtgcaggaagtttatgcaagatgtcaatactttacttcctagcctcccacctctgcccgctagatgcctgcttcccttcctggccctatttctaagactcccctgccattcatccgcaaagaaggccgcttgcgctcagttgggggtgatgaccccatag

SEQ ID NO: 232018 - DNA, 732 bp, Artificial Sequence
  derived and/or modified sequence
atgtggactatgtccagctggacaatgaaaatgatgaggtggaggcagcagctaggcgagatggggctgcggccactgccacgcagaatgtcgcgagcacccatgtctccatccaccgcccttgcttttgtgaccagctgtagttcacagagctgcagcggacctttaagcaccgtggcactttcaattaggcagaaggtttccgtcctggtgatgtgtcacacaagagaactggcctttcaaatcagcaaggaatacgagagatttagcaaatatatgcctaacgtgaaggtcgctgtgttcttcggtggcctgtccatcaagaaagatgaagaagtcctgaaaaagaactgtcctcacatcgtagtaggtaccccgggacgcatcctggctctggccaggaacaagagtctgaacctgaagcacatcaagcactttattctggacgaatgtgataagatgctcgaacagttggatatgcgccgtgatgttcaggagatctttcgtatgaccccccacgagaagcaggtgatgatgttttctgccacgttatcaaaggagattaggcctgtgtgtcgtaaatttatgcaggacgtaaacacactgctgccctccctgccccctctcccagcgagatgtctgttgcccttccttgccttatttctgagactcccatgccattccagcgccaagaaggccgcatgtgcccagcttggagtcatgacaccctag

SEQ ID NO: 232019 - DNA, 420 bp, Artificial Sequence
  derived and/or modified sequence
atggccgagaatgatgtggacaacgagcttctggactacgaagatgacgaggtggagacagctgcaggcggagacggcgcagaggcaccagccaaaaaggacgttaaaggtagctatgtttcgattcattcatctggctttcgggattttctgctgaagcctgagctccttcgtgctattgtggactgtgggttcgaacacccctcggaggtgcagcatgagtgtattcctcaggctattttggggatggacgtcctatgccaagctaagagcgggatgggcaaaaccgctgttttcgtgcttgctacacttcagcagttggagccagtgactggccagagtcacgagcatatgacctccgtgacactggataacctcaccgccgtgggggacgtgcttagtcaagcatgggggagctag

SEQ ID NO: 232020 - DNA, 972 bp, Artificial Sequence
  derived and/or modified sequence
atggccgaaaacgacgtagataacgagctactggactacgaggacgacgaagtcgaaacagctgccggaggagatggcgctgaagcaccggcaaaaaaggacgtgaagggatcctacgtttccatacattcttcaggattccgcgactttctacttaaacccgagctcctgcgggctatagttgactgtgggttcgagcatccctccgaggtgcagcacgaatgcataccacaggctatacttgggatggatgtcctgtgtcaggctaagagcggaatgggtaagactgctgtgttcgtgctcgctacgcttcaacaactggaacccgtgacaggccaggtaagcgttctggtgatgtgtcatacacgcgagttagcatttcagattagcaaggaatatgagcggtttagcaagtatatgcccaatgtgaaagtggcagtcttcttcggagggttgagtatcaagaaagacgaggaagtgctgaagaaaaattgtccccatattgttgttggtactcctgggaggatcctggcgctggcaaggaataagtcactgaacctgaaacacataaagcatttcatcctagacgaatgcgacaaaatgttagaacagttggacatgagacgggacgtgcaggaaatctttagaatgactccgcatgaaaagcaagtgatgatgttcagtgctaccctgtctaaggagatcagacccgtgtgcaggaagttcatgcaggacccgatggagatcttcgtggacgacgaaactaagttaacgcttcatggcctgcagcaatactacgttaaactgaaagacaacgaaaagaataggaagctatttgatttactcgatgtgcttgagttcaatcaggaaataacttgtaagagcgtgcaaaggttctcaacaacaaattcctgtgggtaccagccaatttggcccagacatggccaccgagcaggggagcactgcttctag

SEQ ID NO: 232021 - DNA, 1332 bp, Artificial Sequence
  derived and/or modified sequence
atggccgaaaatgatgtggacaatgagcttttggactatgaggatgacgaggtcgagacagctgctggcggagatggggctgaagctccagccaagaaagacgtgaagggctcctatgtgtccattcactcttctgggtttagggacttccttctgaaaccggaactcctccgtgctatcgtggactgtgggttcgagcacccttctgaggtccaacacgagtgcatcccccaggccatcttgggaatggacgttctgtgtcaggctaaatcaggcatgggcaaaacagccgtgttcgtgttagctaccctccagcagttggaacccgtcaccgggcaggtctacttgggtagagtccttggtcgcggattttggtgcgtattcgttagcgtgcttgtgatgtgtcacacaagggagctggcatttcagattagcaaagaatatgaacgcttctcaaagtatatgccaaatgtgaaagtggcggtgttttttggcggtcttagcataaaaaaagatgaagaagtgctgaagaaaaattgcccacacatcgtggtaggtaccccagggaggatccttgctctcgccaggaataaaagtctgaatttgaagcacatcaaacattttatcttagatgaatgtgataaaatgctagagcagttggacatgaggcgcgacgtacaggagatattcagaatgacaccacatgagaaacaagtgatgatgttctcagccactctgagtaaagagattcggcctgtgtgtcggaagtttatgcaagacccaatggagatttttgtggacgatgaaaccaagctgactctacatggacttcagcagtactatgtgaaacttaaggataatgaaaaaaacaggaagttgtttgatttgcttgatgtgcttgaatttaaccaggtcgtgatttttgttaagtcagtgcagaggtgtattgccctagctcaacttttggtggagcagaattttccagctatagccatccacaggggcatgcctcaggaggaaagactctcaaggtatcagcagtttaaagattttcagagacggattctcgtcgctaccaatctattcgggagaggcatggatatcgagagggttaacatcgcctttaactacgatatgcctgaggattctgatacatatctccacagggtcgcacgggctgggaggtttggtaccaaaggactagcgatcacgtttgtatctgacgagaacgacgctaagattctcaatgacgtgcaggatagattcgaagtgaacatctccgagttgccagacgaaatcgacatctcaagctacatagagcagacccggtag

SEQ ID NO: 232022 - DNA, 732 bp, Artificial Sequence
  derived and/or modified sequence
atgtggactatgtcttcttggaccatgaagatgatgcgatggcgacaacagctgggcgagatgggcctgaggccgctgcccagaagaatgtcacgggctcccatgtcgccctctactgctcttgccttcgttacatcctgcagttcacagagttgttccgggcctctatctaccgttgcattgtccatcagacaaaaggtaagtgttcttgtgatgtgtcacacgcgggagctggccttccaaatttcaaaagaatacgagaggttttcgaagtacatgccaaacgttaaggtggccgtgttctttggaggtttgtctatcaaaaaggatgaggaggtcctgaaaaagaactgcccccacatcgtggtcggaacacctgggaggatcctcgccctggctaggaataaatcattgaacctgaaacacataaaacacttcatattggatgagtgtgacaaaatgcttgaacaactggacatgcggcgtgatgtgcaagaaatattcaggatgacacctcacgagaagcaggtgatgatgtttagtgccactctcagcaaagaaataagaccagtctgccggaagtttatgcaggacgttaacaccttgttgccatccctcccaccgctccccgcacgttgcctcctcccattcctggccttgttcctgcggttaccttgccacagcagcgctaagaaagcagcatgcgcccagttaggagtgatgactccatag

SEQ ID NO: 232023 - DNA, 1053 bp, Artificial Sequence
  derived and/or modified sequence
atgtggactatgtcttcttggaccatgaaaatgatgagatggcgacaacagctgggagaaatgggcttgagaccactgcccagaagaatgtcaagagctcccatgtccccttcaacagctttggccttcgtgacttcttgctcttcacagtcatgttcagggcctctgtccactgttgccctttccatcagacagaaagtggctgtgttctttggcggtctgtcaataaaaaaagacgaagaggtcctgaaaaagaactgcccccatattgtggtcggaacgcccggtcgcattctggcactcgcacgcaacaagtcccttaatctgaagcatattaagcactttatcctggacgagtgcgataagatgctggaacagttggacatgcggagggatgttcaggagatcttcagaatgacacctcacgaaaagcaggttatgatgttttccgccacactcagtaaggagataaggccggtgtgcagaaaatttatgcaggatcctatggaaatcttcgttgacgacgaaactaaactcaccctgcatgggcttcagcaatattatgttaagctgaaggataatgaaaagaaccggaagctctttgatctgctcgatgtcttggaatttaatcaggttgtcatcttcgtgaagtcagtacaacggtgtattgcactggcacagctgttggttgagcagaattttccagccatagccatccatcgcggtatgccacaagaggaacgcttgagtcggtaccaacaattcaaggacttccagaggcgcattttggtcgcgactaacctcttcgggcgaggcatggatatcgagagggtgaatattgcttttaattacgatatgccggaggatagtgatacatacttgcatagagtggccagagccggacggttcggcaccaaaggtctggcaattacattcgtgtctgatgaaaacgatgccaaaatccttaatgacgtgcaggaccgttttgaagtgaatatctccgaattgcctgacgagatcgacatctcctcgtacatcgagcaaaccaggtag

SEQ ID NO: 232024 - DNA, 1332 bp, Artificial Sequence
  derived and/or modified sequence
atggccgaaaatgacgttgacaacgaacttcttgactatgaggacgatgaagtggagactgcagctgggggagatggagccgaggcgcctgctaagaaagacgtgaaagggagctacgtgagtatccattcatccggctttagggatttcttattaaagccggaacttctgagggcaatcgtggattgtggattcgaacatccgtctgaggtccagcacgagtgcatccctcaggccatactggggatggacgtgctctgtcaggccaaatcaggaatgggaaagaccgcagtatttgtgttggcaactctacagcagttggaacctgtcaccggccaagtgtaccttgggagggttctcggccgaggcttttggtgtgtgttcgtctccgtgcttgtcatgtgtcacaccagagagctcgcctttcagatcagtaaggaatacgaacggtttagcaagtatatgccgaatgtgaaagttgccgtctttttcggagggcttagtatcaaaaaagacgaggaagtcctcaagaaaaattgcccccacatagtagtgggcacacctgggcgtatcctcgcgcttgcaaggaataaaagcctgaacctcaagcacatcaaacacttcatcttagacgagtgcgacaaaatgctggagcagctggacatgaggagagatgtacaggagattttcagaatgactccccacgaaaagcaggtcatgatgttctccgccacactgagtaaggagattagacccgtttgtcgcaaatttatgcaggatcccatggaaatctttgttgatgacgagaccaagctcaccctccatggcctgcagcaatactacgtcaagctaaaggataacgaaaagaaccggaaactgttcgatctgctggacgtgctggaatttaatcaggtcgtgatattcgtgaagtctgttcaaaggtgcatcgcccttgctcagctgctcgttgaacaaaatttccctgccatagccattcaccgcggtatgccccaggaggaacggctgtcccgataccaacagtttaaggatttccagcgtcggatcctcgtggccacgaacctgttcgggaggggaatggacatcgagagagtgaatatcgcctttaattatgatatgcctgaggatagtgatacctatctgcatagggtcgcccgagccggaagattcggaaccaagggactggctattacttttgtctcagacgagaacgacgccaaaatcctaaacgacgtgcaggatcgatttgaggtaaatattagtgagctcccagacgagatcgacattagcagctacattgagcagaccaggtag

SEQ ID NO: 232025 - DNA, 1053 bp, Artificial Sequence
  derived and/or modified sequence
atgtggaccatgtcatcatggacgatgaagatgatgcgctggcgacaacagttgggtgaaatggggttgagacccctacctcggaggatgtcaagggccccaatgagtcctagtactgctctggcgtttgtcacgtcttgctccagccagagttgttctggtcccctatccactgttgcgttatccattcgtcagaaagtggcggtcttctttgggggtttatccattaagaaagatgaggaagtgcttaagaaaaattgcccccacatcgtggtgggcacaccaggccgtatactggccctagccagaaacaagtccctgaatcttaaacacattaaacattttattctggacgagtgcgacaagatgctggagcagctggatatgcggagagacgtgcaggagatttttcgcatgacgccacacgagaagcaggtgatgatgttctctgcaaccctgagcaaggaaattaggccggtgtgccgtaagtttatgcaggatcctatggaaatattcgtcgatgacgagaccaaactgacactgcacgggttgcagcagtattatgtgaaattgaaagataatgagaaaaatagaaaattgtttgacctactggatgttttggagttcaatcaggtggtgatttttgtcaagtctgtccaacggtgcatcgcactggcgcagctcctcgttgagcagaatttcccggctattgcaattcaccgaggcatgcctcaggaggagcgcctgtccaggtatcaacagttcaaggactttcagcggaggattttggtggccacaaatctgtttggcaggggcatggatattgagagggtgaacatagcttttaattacgacatgccagaggactctgacacttatcttcacagggtggctcgggcaggcagattcggaactaaggggctggccatcaccttcgtcagtgatgagaacgatgctaaaatcctgaatgatgtgcaggatcggtttgaggtcaacatctctgagttgcccgacgagattgacatcagctcctacatcgaacagaccagatag

SEQ ID NO: 232026 - DNA, 732 bp, Artificial Sequence
  derived and/or modified sequence
atgtggactatgagctcctggactatgaaaatgatgaggtggagacagcagttgggcgagatgggtctcagaccactcccgaggcgcatgtccagggcccctatgagtccttcaacagctctcgcgttcgtaacctcctgctcgtcccagagctgcagcggtcctctgagtactgtggctctgtctatccgtcaaaaagtgagcgtgttggtgatgtgtcacacccgggaacttgcctttcagatatctaaggaatatgaacgttttagtaagtatatgcctaacgtcaaagtggccgtctttttcgggggtctctctatcaagaaagacgaagaggtcctcaagaaaaactgcccacacatcgtcgtcggtacccccggtcgcatactggctcttgccaggaacaagagcctgaacttgaagcacatcaagcatttcattctcgacgagtgcgacaagatgttagagcagctggatatgaggcgtgatgtgcaagaaatcttccgcatgactcctcacgagaagcaagttatgatgttttcggcaacactcagtaaggagatcagacctgtttgccgcaagttcatgcaggatgtcaacaccttactgccctccctaccaccgttgcctgctagatgcctcctcccatttctagccctgttcctcagacttccctgtcattcttcagctaaaaaagctgcctgcgctcaactgggggtcatgacgccttag

SEQ ID NO: 232027 - DNA, 420 bp, Artificial Sequence
  derived and/or modified sequence
atggctgaaaatgatgttgataacgagctgctggactatgaggacgatgaagttgagactgccgctggcggagacggtgccgaagctccggcaaaaaaagatgtaaaaggcagttatgtctctatccacagttcaggcttcagagactttctgctcaaaccagaactccttagagcaatcgttgactgtggattcgaacatcctagcgaggtgcagcatgagtgtatccctcaggcaatcctgggcatggacgtgctgtgccaagccaagtccgggatgggtaaaaccgctgtgttcgttttggccacccttcaacagctggagccagtgaccggccagagccatgagcatatgacctctgtgacattagacaatctgaccgccgtgggcgacgtgctctcccaagcatggggatcctag

SEQ ID NO: 232028 - DNA, 1053 bp, Artificial Sequence
  derived and/or modified sequence
atgtggactatgagttcttggaccatgaagatgatgagatggagacagcagctcggcgaaatgggcttacgtccattgcctcggcgaatgtctcgcgcacccatgtcaccatcaacagccttagccttcgtgacaagctgtagtagccagtcatgttccgggccactctctacggtggcattatccatccggcagaaagttgccgtatttttcggcggactgagtattaagaaggacgaagaggtgcttaaaaagaattgcccccatatagtggtcggcacaccaggcagaattctggcactcgctcggaataaatccttaaatctcaaacatatcaagcactttatcctcgatgaatgtgacaagatgctcgagcaattggacatgcgacgtgatgtgcaggagatctttcggatgacaccgcatgagaaacaggtcatgatgttctctgcaactctctctaaggagatccggcctgtgtgtcgcaagttcatgcaggatcctatggagatttttgtggatgatgaaaccaagcttacattacacggcctgcaacaatattacgtgaagctcaaggacaacgaaaagaaccgaaaactattcgaccttctcgacgtactggaatttaatcaggtggtcatcttcgttaaatccgtccagcgctgtatcgctctcgcccagctgctggtcgagcagaatttcccagctattgctatccaccgcggaatgccccaggaggaacgcttgagccgctatcaacaatttaaggactttcagcggagaattctggttgcaacaaacctttttggacgtggcatggatatcgagcgggtgaacatagctttcaattacgacatgcccgaagacagtgatacctacctacatcgagtggcccgagcaggccgtttcggcacaaaaggcctggctataacatttgttagtgatgaaaacgatgccaaaatcctgaacgatgtgcaggacaggttcgaggtgaacatttccgagctcccagacgagattgacatatctagctatatcgaacagaccagatag

SEQ ID NO: 232029 - DNA, 972 bp, Artificial Sequence
  derived and/or modified sequence
atggccgagaacgatgtggacaacgaactactggactacgaggatgatgaggtggagacagccgcaggaggtgacggcgcagaggctcccgctaagaaggacgtgaagggctcttatgtgagcatccatagttccggctttagggactttcttcttaagcccgaactgttacgggctattgtcgattgtggatttgagcacccaagtgaggtccagcacgagtgtattccgcaggccattctaggtatggacgtgctgtgccaggcaaagtccggcatgggtaagactgcggtgttcgtgctggctactttgcagcagctcgaacctgttaccgggcaggtgtctgtgcttgtgatgtgccacactcgggagctggccttccagatatcgaaagagtacgagagatttagcaaatacatgccaaacgttaaagtggctgtctttttcgggggactttctattaaaaaggatgaggaagtgctgaaaaagaactgtccgcacatcgtggtgggcactccaggtcggatactcgccctcgcaaggaataaatccctgaacctcaaacacatcaagcacttcattcttgatgaatgtgacaagatgcttgaacaattagacatgcgcagggacgtgcaggagatttttagaatgaccccgcacgagaaacaagtaatgatgttctctgcgactttatctaaagaaatacgacctgtgtgcaggaaattcatgcaggatcccatggagatcttcgtggatgatgaaacaaagctgaccctgcacggactgcagcagtattacgtcaagcttaaagacaacgaaaagaatcggaaactgtttgacttgctggacgtgctggagttcaaccaggagatcacatgtaaatccgtgcagaggttcagcaccaccaattcctgtggctatcagcccatctggccaaggcacggacatagggcaggggagcactgtttctag

SEQ ID NO: 232030 - DNA, 1053 bp, Artificial Sequence
  derived and/or modified sequence
atgtggacaatgagttcgtggaccatgaagatgatgcggtggaggcaacagctcggcgaaatggggctccgcccattgccacggcgtatgtctcgggcaccaatgagcccttccacagctctagcattcgtgacaagctgtagctcccaatcctgctccggtccattaagtacagtggccctgtctattcggcagaaagtggccgtgttctttggcggactcagcataaaaaaagatgaagaagtgctgaaaaagaattgcccacacattgttgtgggcactccgggacgcatcctcgccctcgcacgcaataagagcctgaatttgaagcacattaaacattttattcttgacgaatgcgacaagatgctggagcagttggatatgcgcagagatgttcaggaaatcttccgcatgacgcctcacgagaagcaggtgatgatgttcagcgcgactctgagcaaagagatccgcccagtctgcagaaagtttatgcaagatccgatggagatttttgtggatgacgagactaagttgaccctccatgggctccagcagtattacgtgaaacttaaggacaacgagaagaaccgcaaactgttcgatctgctcgacgtcctggaatttaatcaggtggtgatcttcgtgaaaagcgtgcaacgctgtatcgctttagcccaactgctggtagaacaaaactttcctgccattgctatccacagggggatgcctcaggaggaacgcctatcaagatatcagcagttcaaagatttccagcgccgaatactggtggctactaatttgttcgggcgaggtatggatattgaacgggttaacattgcgttcaactacgacatgcccgaagacagtgacacatatctgcacagggtggcacgtgctgggagatttggaaccaaaggccttgccattacatttgtgagtgacgaaaacgatgccaagatcctgaacgacgtgcaagataggttcgaggtgaatatttcggagctgcccgacgagattgatatttcatcatacatagaacagacaaggtag

SEQ ID NO: 232031 - DNA, 420 bp, Artificial Sequence
  derived and/or modified sequence
atggcagaaaatgatgtggataacgagttattggactatgaagatgatgaggttgagactgctgccggaggtgacggggctgaggcccctgccaaaaaagacgtaaagggatcttatgtgtccattcacagcagcggctttagggactttctcttaaaacccgaactgctcagggcgatcgtggattgcggttttgagcacccctccgaggtccagcatgaatgcatccctcaggctattctggggatggatgttctctgccaagccaagagcggaatgggcaagaccgcggtgttcgtgcttgctacattgcaacaattagagccagtgaccggacaatcccatgaacatatgacatctgtgaccctagacaatctaacggctgtgggagacgtgctttcccaagcatggggatcttag

SEQ ID NO: 232032 - DNA, 1332 bp, Artificial Sequence
  derived and/or modified sequence
atggctgagaacgatgtagacaatgagttactggactacgaagacgacgaggtggaaacggccgcagggggagatggcgctgaagcgccagcaaagaaggacgtcaagggtagctacgtatccatccattctagcggtttcagggactttctgttgaagcctgagctgctgcgcgctatcgtggactgcggattcgaacatccttccgaggtacaacatgaatgtatacctcaggccatactggggatggacgtcctgtgccaggctaagagtggcatgggcaaaaccgccgtctttgtgttggccaccctacagcaactggagcctgtgacagggcaggtgtaccttgggagggtgctggggcgagggttttggtgtgttttcgtgagtgtgttagtgatgtgccatacccgagaactagcctttcagatatctaaggagtacgaaaggtttagcaagtatatgcctaatgtcaaagttgctgttttctttggaggactctctattaagaaagatgaggaagtgctcaaaaagaattgtccccacattgtggttggaacaccagggaggatactcgctttggcgaggaataaaagtctgaatctcaaacacatcaaacactttatcttagatgagtgtgacaaaatgttggagcagttagatatgcgcagggacgtgcaggaaatcttccggatgacgccccatgagaaacaggttatgatgttcagcgccaccctcagtaaggaaatacgtcccgtctgccggaagtttatgcaagaccccatggagattttcgtggacgatgaaaccaaacttactctgcatggactacagcaatattatgtgaagctgaaagataatgaaaagaatcgcaaactcttcgatcttctagacgtcctcgagtttaatcaggtggtgattttcgttaagagcgtgcaacgatgcattgccttggcccagctgcttgttgaacaaaatttcccagcaattgccatccacagaggcatgccgcaggaagagaggttgagtcggtaccagcagttcaaggattttcagcggaggatcctggtggcaacaaacctgttcggtcgtggcatggatatagagagagtgaacatcgccttcaattacgacatgccagaggacagcgacacgtacctgcaccgcgtcgcacgcgctgggaggttcggcactaagggcctggctatcacgttcgtatccgatgagaacgacgctaagatactgaatgatgtacaggatcgtttcgaggttaacatttccgagctacctgatgagatcgatattagtagctatattgagcagacacgatag

SEQ ID NO: 232033 - DNA, 972 bp, Artificial Sequence
  derived and/or modified sequence
atggccgagaacgatgtcgacaacgaattactcgactacgaagacgatgaagtggaaaccgctgctggcggagatggcgctgaagctcccgctaagaaagacgttaagggttcatatgtgtccatccacagctctggttttcgtgatttcttgctcaagcccgaactactgcgggctatcgtcgactgcgggtttgagcacccctcagaggtgcagcacgaatgcattccccaggcaatcttaggtatggatgtcctttgtcaggccaaatctggcatggggaagacagcagtgtttgtccttgctaccctgcagcagctggagccagtcaccggacaggtgtccgtgctggtgatgtgccacacaagagagttagcgtttcagatctcaaaggagtacgaaaggttcagcaagtacatgccaaatgtgaaagtggctgttttcttcgggggactttctataaagaaggatgaggaagtcctcaagaagaattgccctcacattgtggtcggaacgcccggtaggattctggccctggccagaaataagagtctcaacctgaaacacattaaacactttatcttagacgagtgcgataagatgctggagcaactggatatgcgcagggacgtgcaagagatcttccggatgactcctcacgaaaagcaggtaatgatgttctccgcaacactgagtaaagagatacggcctgtttgcagaaagtttatgcaggaccctatggagatctttgtggatgacgagactaagcttactctgcatggtctgcagcagtactacgttaaactgaaggataacgaaaaaaacagaaagctgtttgatttactggacgtgctggagtttaatcaggagatcacctgtaagtcggtgcagaggttctccaccacaaatagttgtggctaccaacctatttggcccagacacggacaccgagccggtgagcactgcttctag

SEQ ID NO: 232034 - DNA, 972 bp, Artificial Sequence
  derived and/or modified sequence
atggcagagaacgacgtcgacaatgaactgctcgattacgaggacgacgaggtcgaaacagcagccggtggagacggcgcagaggctcccgctaaaaaagatgttaagggttcttatgtatccatccacagcagcggcttcagagactttctccttaagccagagttactgcgagccattgtagactgtggattcgaacatccaagtgaagtacaacatgaatgcataccccaagcaatcctcggcatggacgtgctttgccaagccaagagcgggatgggtaagacagcagtgttcgttcttgccacgctgcagcagctggagcccgttactggtcaagtatccgtactggttatgtgtcatactcgggagctggcctttcagatctccaaagagtatgaaagattctccaagtacatgccaaatgttaaagtcgcagtctttttcggcggactatccataaagaaagatgaagaagtcctgaaaaagaactgtccccatatcgtggttggtactcctggccgaattcttgctctcgcccgtaataagtccctcaatctcaagcacattaagcacttcatcctggacgagtgcgataagatgttggagcagttggatatgcggcgtgacgtgcaggagatcttcaggatgaccccacacgaaaaacaggtgatgatgtttagcgccacccttagcaaggagatacgcccagtgtgcagaaagttcatgcaggatcccatggagatctttgtagatgatgagacaaaactaactttacacggtctccaacagtactatgtcaagctcaaggacaatgaaaaaaataggaagttgttcgacctgctggatgtactggagtttaaccaagagataacttgtaagtcagtccagaggttttctaccactaactcgtgcggataccaaccaatctggccaagacacggccaccgtgctggcgaacactgcttttag

SEQ ID NO: 232035 - DNA, 1053 bp, Artificial Sequence
  derived and/or modified sequence
atgtggacaatgagtagctggacaatgaagatgatgagatggaggcaacagctgggagagatgggtttacgtccactcccaaggcgcatgagcagagcgccaatgagcccctcaacagccctggcattcgtaacatcttgctcctcccagagctgcagcgggccactcagcaccgtagccctctccattcgacaaaaggttgctgtgttctttggagggctttctataaaaaaggacgaagaggtgctgaagaaaaattgtccacacatcgtggtgggtaccccaggaaggattctggcactggcaagaaataagtccctgaacctgaaacatatcaagcatttcatcttagacgaatgcgacaagatgctggagcaactcgacatgcgcagagatgtccaggagatcttcagaatgacgcctcatgaaaaacaggtcatgatgtttagtgccacactgtcaaaggagattcggcctgtgtgtcgcaagttcatgcaggaccccatggaaatcttcgtagacgatgagacgaaattaaccctgcacgggctccagcagtattacgtgaaactcaaagataatgagaagaacagaaagctgttcgaccttttggacgtcctcgaattcaaccaggtggttattttcgtgaagagtgtgcagcgttgtatcgccttggcccagctccttgtggaacaaaattttcctgctatcgccatccaccgcggaatgccacaggaggagcgattgtccaggtaccagcagttcaaggattttcagcgtcggatcctggtggccacaaatctctttgggagaggaatggatattgagcgtgtaaacattgccttcaactatgacatgccagaagattcagacacctatctgcatagggtggccagggccggacgctttgggaccaagggactggcaatcacattcgtatccgatgagaacgatgcgaagatcctgaatgatgtccaggacagatttgaggtcaacatttcagagttgccagacgagattgacatcagtagctacatcgagcagacacggtag

SEQ ID NO: 232036 - DNA, 420 bp, Artificial Sequence
  derived and/or modified sequence
atggcggagaatgacgtcgacaatgagctactggactatgaggatgacgaggtcgagaccgccgctggaggagacggagcagaagctcccgctaaaaaggatgtaaagggatcttatgtgtctatccatagctccggttttagggactttttactgaaacccgaattgctcagggcaatcgtggactgtggcttcgaacatcctagcgaagtccagcacgaatgtataccacaggcaatacttggaatggacgtgttgtgccaggccaaaagtggcatgggtaagactgcagtctttgttttagctacgctgcagcaactcgagcccgtcactgggcagtcacacgaacacatgactagtgtcacattagataacctgacggcagtcggggatgtcctgtcacaggcttggggcagttag

SEQ ID NO: 232037 - DNA, 1053 bp, Artificial Sequence
  derived and/or modified sequence
atgtggacaatgagcagctggactatgaagatgatgcgttggcgacagcagctgggtgagatgggcctgagacctctccctcgaagaatgtctagggctccaatgtcaccgagcaccgccctggcctttgtcacctcatgcagtagccagtcttgctcggggccactatccactgtggccctgagtatccgccagaaagtggctgtttttttcggagggctcagtattaaaaaagatgaagaagtgctgaaaaaaaactgcccccacattgtagtgggaaccccaggccgtatactggctttggccagaaataaatctctaaatctcaagcacattaagcacttcatcttggacgaatgtgataagatgcttgaacagttggatatgcggagagatgtgcaggagatttttcggatgacacctcatgaaaaacaggtgatgatgttctccgctaccctgagtaaagaaatccgccctgtctgccgcaagttcatgcaggacccaatggagattttcgtagatgacgagactaagctcacgctccacgggctgcagcagtattacgtgaagctgaaggataacgaaaaaaataggaagctctttgatctgcttgacgtgctggagttcaaccaggtggtgatttttgtgaaatcagtccagcgttgtatcgcactggcacagcttctggtggagcagaacttcccagctattgctatacatcggggtatgcctcaagaggaacggttgtcccgttaccaacaatttaaagacttccaaagacgtatcctcgttgctactaatctgtttggcagaggcatggacatcgaacgtgttaacattgcgttcaattatgacatgcctgaggactcagatacctacctccatagagtagccagggccggaagattcggcacaaaaggactggctattacgttcgtcagcgacgaaaatgacgctaagattctcaacgacgtgcaggacaggttcgaggttaatatttctgagttacccgatgagattgacatctcatcatatattgaacagacacggtag

SEQ ID NO: 232038 - DNA, 420 bp, Artificial Sequence
  derived and/or modified sequence
atggctgaaaatgacgtggataacgagcttctggattatgaggacgatgaggttgaaacagctgccggtggggacggtgcagaggcgccagctaaaaaggatgttaagggtagctatgtctcaattcactccagcggattccgggatttcctattgaaacctgagctgctgagagcaattgtggattgtggcttcgaacatccctccgaggtccagcacgaatgcattccccaagcaatacttggaatggacgttttatgtcaagctaagtccggtatgggcaagactgccgtattcgtcctggccaccctgcaacagctggaaccggtgaccggacagtcccacgaacacatgacgagcgttacactggacaatcttactgccgtgggggacgttctgtcgcaggcctggggcagttag

SEQ ID NO: 232039 - DNA, 1332 bp, Artificial Sequence
  derived and/or modified sequence
atggctgaaaatgatgtggacaacgaactgctggactacgaagacgatgaggtggaaaccgcagctggcggagacggcgctgaggcccctgccaaaaaagacgttaaggggtcttatgtctcaatccatagctctggatttagggatttcttattgaaacctgagttgctgcgcgcaatcgtggattgtgggtttgaacaccccagtgaggtccagcatgagtgtatcccgcaggctatcctgggaatggacgtgttgtgccaggctaaatctggtatgggtaagaccgccgttttcgtactagcgactcttcagcagctcgagccagtcaccggccaggtctacttaggtcgggtgctgggcaggggtttctggtgcgtgtttgtgagcgtgctcgtgatgtgccacacccgcgagcttgcctttcaaatctctaaagaatacgagcgattctctaagtacatgccaaacgtgaaagttgccgtatttttcggcggtctttccatcaagaaagatgaagaggttttaaagaaaaattgcccacacatcgttgtggggacaccagggaggattctagctctggccaggaataaatctcttaatcttaagcacataaaacattttatactcgacgaatgcgacaagatgctggagcagctggacatgagacgtgacgtccaggagatttttagaatgacgcctcatgagaagcaggtgatgatgttctctgctacattgagcaaagaaataaggcccgtctgtcgaaagtttatgcaggaccctatggaaatctttgtggacgacgaaaccaaattgacattgcatggtctgcagcagtattatgtgaaactgaaggataacgagaaaaatagaaagctgtttgatcttctggatgtgttggaattcaatcaagttgttatttttgttaagtcagtgcagcggtgtatagcactagctcaactgctggtggagcagaactttccagctatagccattcatagaggtatgccgcaggaggagcgcctgtcgcgctaccagcagtttaaagactttcagaggcgcatcctcgtggctactaacctgtttggcagagggatggacatagagagggtgaatattgcctttaactacgatatgcccgaagattctgacacttatctacaccgggttgcccgagccggaagatttggtaccaaagggctggccatcacatttgtgtcggacgaaaatgatgccaaaattctcaatgatgtacaggatcgattcgaggttaatattagtgagctgccggacgagatcgacatcagttcttacatcgagcagacaaggtag

SEQ ID NO: 232040 - DNA, 552 bp, Artificial Sequence
  derived and/or modified sequence
atggagatcttcgtcgacgatgaaaccaaactgacactacacggcctgcagcagtattatgtaaagcttaaagataacgagaaaaacagaaaactgttcgacctgttggacgtactagaattcaatcaggtggttatcttcgtcaagagcgtccaaaggtgcatcgcgctggctcagctgttagtagagcaaaattttccagctatcgcgatccatcgcggaatgccccaggaggaacggtggctttctcggtaccagcagtttaaagacttccaacggagaattcttgttgcgaccaatctttttggtcgtggcatggatatcgaacgggttaacatcgctttcaattatgacatgcctgaagactctgacacttatctccatcgggtggcgagagcagggagattcggcactaaggggttagccataacctttgtcagcgacgaaaacgatgcgaagatactaaacgatgtccaggacaggttcgaagtaaacatttctgagctacccgacgagattgatattagtagttacattgagcagaccaggtag

SEQ ID NO: 232041 - DNA, 1529 bp, Artificial Sequence
  derived and/or modified sequence
agttatggcagagaacgatgtggacaatgagctcttggactatgaagatgatgaggtggagacagcagctgggggagatggggctgaggcccctgccaagaaggatgtcaagggctcctatgtctccatccacagctctggctttcgtgacttcctgctcaagccagagttgctccgggccattgtcgactgtggctttgagcatccgtcagaagtccagcatgagtgcatccctcaggccattctgggaatggatgtcctgtgccaggccaagtcgggcatgggaaagacagcagtgtttgtcttggccacactgcaacagctggagccagttactgggcaggtgtctgtactggtgatgtgtcacactcgggagttggcttttcagatcagcaaggaatatgagcgcttctctaaatacatgcccaatgtcaaggttgctgttttttttggtggtctgtctatcaagaaggatgaagaggtgctgaagaagaactgcccgcatatcgtcgtggggactccaggccgtatcctagccctggctcgaaataagagcctcaacctcaaacacattaaacactttattttggatgaatgtgataagatgcttgaacagctcgacatgcgtcgggatgtccaggaaatttttcgcatgaccccccacgagaagcaggtcatgatgttcagtgctaccttgagcaaagagatccgtccagtctgccgcaagttcatgcaagatccaatggagatcttcgtggatgatgagacgaagttgacgctgcatgggttgcagcagtactacgtgaaactgaaggacaacgagaagaaccggaagctctttgaccttctggatgtccttgagttcaaccaggtggtgatctttgtgaagtctgtgcagcggtgcattgccttggcccagctactagtggagcagaacttcccagccattgccatccaccgtgggatgccccaggaggagaggctttctcggtatcagcagtttaaagattttcaacgacgaattcttgtggctaccaacctatttggccgaggcatggacatcgagcgggtgaacattgcttttaattatgacatgcctgaggattctgacacctacctgcatcggtgctaccctctgtctccctccaggtggccagagcaggccggtttggcaccaagggcttggctatcacatttgtgtccgatgagaatgatgccaagatcctcaatgatgtgcaggatcgctttgaggtcaatattagtgagctgcctgatgagatagacatctcctcctacattgaacagacacggtagaagactcgcccattttggaatgtgaccgtctgtccttcaggagaggacaccagggtgggggtgaaggagacactactgcccccacccctgacagcccccaccccatggcttccatcttttgcatcaccaccactcctgaacccccatttctgatttgtcagaatttttttttaacaaaactaaaaatgaaacacatgtgtctgtggtatctataa

SEQ ID NO: 232042 - DNA, 2039 bp, Artificial Sequence
  derived and/or modified sequence
cagcatcggccataacaacagaaatggccagtcagtcccaaggtatccagcagcttctgcaagctgagaagcgggcagctgagaaggtggcagatgccagaaagaggaaggcccggcgactgaagcaggcaaaggaggaggcacagatggaggtggagcaataccgcagagagcgagagcacgaattccagagcaagcagcaggcgacaggcattttccaaaggcaagcctggagcgcacggatctgtataaccgcggaaggccctgtttccggtcccttgcgcctgcgctcttgcagccaagaaggcgggaggctggagtagagggaagcctgcaaccggaagtgaaggcagatttccctccttcgtcgctgttgctgccgccatacgcgctctccctgtttagctcttctgttagaaatagtatctttgttttcctttgctgttcctcaatcccctactcttcaccccttgttttcacctattttgcgagaacccatccagatcccccttcccttcttcccctgccggcccagttatggcagagaacgatgtggacaatgagctcttggactatgaagatgatgaggtggagacagcagctgggggagatggggctgaggcccctgccaagaaggatgtcaagggctcctatgtctccatccacagctctggctttcgtgacttcctgctcaagccagagttgctccgggccattgtcgactgtggctttgagcatccgtcagaagtccagcatgagtgcatccctcaggccattctgggaatggatgtcctgtgccaggccaagtcgggcatgggaaagacagcagtgtttgtcttggccacactgcaacagctggagccagttactgggcaggtgtctgtgctggtgatgtgtcacactcgggagttggcttttcagatcagcaaggaatatgagcgcttctctaaatacatgcccaatgtcaaggttgctgttttttttggtggtctgtctatcaagaaggatgaagaggtgctgaagaagaactgcccgcatatcgtcgtggggactccaggccgtatcctagccctggctcgaaataagagcctcaacctcaaacacattaaacactttattttggatgaatgtgataagatgcttgaacagctcgacatgcgtcgggatgtccaggaaatttttcgcatgaccccccacgagaagcaggtcatgatgttcagtgctaccttgagcaaagagatccgtccagtctgccgcaagttcatgcaagatccaatggagatcttcgtggatgatgagacgaagttgacgctgcatgggttgcagcagtactacgtgaaactgaaggacaacgagaagaaccggaagctctttgaccttctggatgtccttgagttcaaccaggtggtgatctttgtgaagtctgtgcagcggtgcattgccttggcccagctactagtggagcagaacttcccagccattgccatccaccgtgggatgccccaggaggagaggctttctcggtatcagcagtttaaagattttcaacgacgaattcttgtggctaccaacctatttggccgaggcatggacatcgagcgggtgaacattgcttttaattatgacatgcctgaggattctgacacctacctgcatcgggtggccagagcaggccggtttggcaccaagggcttggctatcacatttgtgtccgatgagaatgatgccaagatcctcaatgatgtgcaggatcgctttgaggtcaatattagtgagctgcctgatgagatagacatctcctcctacattgaacagacacggtagaagactcgcccattttggaatgtgaccgtctgtccttcaggagaggacaccagggtgggggtgaaggagacactactgcccccacccctgacagcccccaccccatggcttccatcttttgcatcaccaccactcctgaacccccatttctgatttgtcagaatttttttttaacaaaactaaaaatgaaacacatgtgtctgtggtatctataa

SEQ ID NO: 232043 - DNA, 2133 bp, Artificial Sequence
  derived and/or modified sequence
ctcagctagggcctgccggttcctagtgcgtgcccagcagtcctcaggtcaccttcactaccgggccaaggaccccgtgggaactcgcagccttcgccacactcgttcctcgcgcatccatggaggggtgcctacagagaagacctgcgtggcaaaaacctaaacgaagagatgaggggcatggagaggagtaggataagagaataaagataacagtgggggggagacgttagtttcctttatatcttttgttactggcggtagcagtgaagttagaaacggttttaaaacaaatttcagacaggcattttccaaaggcaagcctggagcgcacggatctgtataaccgcggaaggccctgtttccggtcccttgcgcctgcgctcttgcagccaagaaggcgggaggctggagtagagggaagcctgcaaccggaagtgaaggcagatttccctccttcgtcgctgttgctgccgccatacgcgctctccctgtttagctcttctgttagaaatagtatctttgttttcctttgctgttcctcaatcccctactcttcaccccttgttttcacctattttgcgagaacccatccagatcccccttcccttcttcccctgccggcccagttatggcagagaacgatgtggacaatgagctcttggactatgaagatgatgaggtggagacagcagctgggggagatggggctgaggcccctgccaagaaggatgtcaagggctcctatgtctccatccacagctctggctttcgtgacttcctgctcaagccagagttgctccgggccattgtcgactgtggctttgagcatccgtcagaagtccagcatgagtgcatccctcaggccattctgggaatggatgtcctgtgccaggccaagtcgggcatgggaaagacagcagtgtttgtcttggccacactgcaacagctggagccagttactgggcaggtgtctgtactggtgatgtgtcacactcgggagttggcttttcagatcagcaaggaatatgagcgcttctctaaatacatgcccaatgtcaaggttgctgttttttttggtggtctgtctatcaagaaggatgaagaggtgctgaagaagaactgcccgcatatcgtcgtggggactccaggccgtatcctagccctggctcgaaataagagcctcaacctcaaacacattaaacactttattttggatgaatgtgataagatgcttgaacagctcgacatgcgtcgggatgtccaggaaatttttcgcatgaccccccacgagaagcaggtcatgatgttcagtgctaccttgagcaaagagatccgtccagtctgccgcaagttcatgcaagatccaatggagatcttcgtggatgatgagacgaagttgacgctgcatgggttgcagcagtactacgtgaaactgaaggacaacgagaagaaccggaagctctttgaccttctggatgtccttgagttcaaccaggtggtgatctttgtgaagtctgtgcagcggtgcattgccttggcccagctactagtggagcagaacttcccagccattgccatccaccgtgggatgccccaggaggagaggctttctcggtatcagcagtttaaagattttcaacgacgaattcttgtggctaccaacctatttggccgaggcatggacatcgagcgggtgaacattgcttttaattatgacatgcctgaggattctgacacctacctgcatcgggtggccagagcaggccggtttggcaccaagggcttggctatcacatttgtgtccgatgagaatgatgccaagatcctcaatgatgtgcaggatcgctttgaggtcaatattagtgagctgcctgatgagatagacatctcctcctacattgaacagacacggtagaagactcgcccattttggaatgtgaccgtctgtccttcaggagaggacaccagggtgggggtgaaggagacactactgcccccacccctgacagcccccaccccatggcttccatcttttgcatcaccaccactcctgaacccccatttctgatttgtcagaatttttttttaacaaaactaaaaatgaaacacatgtgtctgtggtatctataa

SEQ ID NO: 232044 - DNA, 1529 bp, Artificial Sequence
  derived and/or modified sequence
agttatggcagagaacgatgtggacaatgagctcttggactatgaagatgatgaggtggagacagcagctgggggagatggggctgaggcccctgccaagaaggatgtcaagggctcctatgtctccatccacagctctggctttcgtgacttcctgctcaagccagagttgctccgggccattgtcgactgtggctttgagcatccgtcagaagtccagcatgagtgcatccctcaggccattctgggaatggatgtcctgtgccaggccaagtcgggcatgggaaagacagcagtgtttgtcttggccacactgcaacagctggagccagttactgggcaggtgtctgtgctggtgatgtgtcacactcgggagttggcttttcagatcagcaaggaatatgagcgcttctctaaatacatgcccaatgtcaaggttgctgttttttttggtggtctgtctatcaagaaggatgaagaggtgctgaagaagaactgcccgcatatcgtcgtggggactccaggccgtatcctagccctggctcgaaataagagcctcaacctcaaacacattaaacactttattttggatgaatgtgataagatgcttgaacagctcgacatgcgtcgggatgtccaggaaatttttcgcatgaccccccacgagaagcaggtcatgatgttcagtgctaccttgagcaaagagatccgtccagtctgccgcaagttcatgcaagatccaatggagatcttcgtggatgatgagacgaagttgacgctgcatgggttgcagcagtactacgtgaaactgaaggacaacgagaagaaccggaagctctttgaccttctggatgtccttgagttcaaccaggtggtgatctttgtgaagtctgtgcagcggtgcattgccttggcccagctactagtggagcagaacttcccagccattgccatccaccgtgggatgccccaggaggagaggctttctcggtatcagcagtttaaagattttcaacgacgaattcttgtggctaccaacctatttggccgaggcatggacatcgagcgggtgaacattgcttttaattatgacatgcctgaggattctgacacctacctgcatcggtgctaccctctgtctccctccaggtggccagagcaggccggtttggcaccaagggcttggctatcacatttgtgtccgatgagaatgatgccaagatcctcaatgatgtgcaggatcgctttgaggtcaatattagtgagctgcctgatgagatagacatctcctcctacattgaacagacacggtagaagactcgcccattttggaatgtgaccgtctgtccttcaggagaggacaccagggtgggggtgaaggagacactactgcccccacccctgacagcccccaccccatggcttccatcttttgcatcaccaccactcctgaacccccatttctgatttgtcagaatttttttttaacaaaactaaaaatgaaacacatgtgtctgtggtatctataa

SEQ ID NO: 232045 - DNA, 2003 bp, Artificial Sequence
  derived and/or modified sequence
ctcagctagggcctgccggttcctagtgcgtgcccagcagtcctcaggtcaccttcactaccgggccaaggaccccgtgggaactcgcagccttcgccacactcgttcctcgcgcatccacggaggggtgcctacagagaagacctgcgtggcaaaaacctaaacgaagagatgaggggcatggagaggagtaggataagagaataaagataacagtgggggggagacgttagtttcctttatatcttttgttactggcggtagcagtgaagttagaaacggttttaaaacaaatttcagacaggcattttccaaaggcaagcctggagcgcacggatctgtataaccgcggaaggccctgtttccggtcccttgcgcctgcgctcttgcagccaagaaggcgggaggctggagtagagggaagcctgcaaccggaagtgaaggcagatttccctccttcgtcgctgttgctgccgccatacgcgctctccctgtttagttatggcagagaacgatgtggacaatgagctcttggactatgaagatgatgaggtggagacagcagctgggggagatggggctgaggcccctgccaagaaggatgtcaagggctcctatgtctccatccacagctctggctttcgtgacttcctgctcaagccagagttgctccgggccattgtcgactgtggctttgagcatccgtcagaagtccagcatgagtgcatccctcaggccattctgggaatggatgtcctgtgccaggccaagtcgggcatgggaaagacagcagtgtttgtcttggccacactgcaacagctggagccagttactgggcaggtgtctgtgctggtgatgtgtcacactcgggagttggcttttcagatcagcaaggaatatgagcgcttctctaaatacatgcccaatgtcaaggttgctgttttttttggtggtctgtctatcaagaaggatgaagaggtgctgaagaagaactgcccgcatatcgtcgtggggactccaggccgtatcctagccctggctcgaaataagagcctcaacctcaaacacattaaacactttattttggatgaatgtgataagatgcttgaacagctcgacatgcgtcgggatgtccaggaaatttttcgcatgaccccccacgagaagcaggtcatgatgttcagtgctaccttgagcaaagagatccgtccagtctgccgcaagttcatgcaagatccaatggagatcttcgtggatgatgagacgaagttgacgctgcatgggttgcagcagtactacgtgaaactgaaggacaacgagaagaaccggaagctctttgaccttctggatgtccttgagttcaaccaggtggtgatctttgtgaagtctgtgcagcggtgcattgccttggcccagctactagtggagcagaacttcccagccattgccatccaccgtgggatgccccaggaggagaggctttctcggtatcagcagtttaaagattttcaacgacgaattcttgtggctaccaacctatttggccgaggcatggacatcgagcgggtgaacattgcttttaattatgacatgcctgaggattctgacacctacctgcatcgggtggccagagcaggccggtttggcaccaagggcttggctatcacatttgtgtccgatgagaatgatgccaagatcctcaatgatgtgcaggatcgctttgaggtcaatattagtgagctgcctgatgagatagacatctcctcctacattgaacagacacggtagaagactcgcccattttggaatgtgaccgtctgtccttcaggagaggacaccagggtgggggtgaaggagacactactgcccccacccctgacagcccccaccccatggcttccatcttttgcatcaccaccactcctgaacccccatttctgatttgtcagaatttttttttaacaaaactaaaaatgaaacacatgtgtctgtggtatctataa

SEQ ID NO: 232046 - DNA, 2133 bp, Artificial Sequence
  derived and/or modified sequence
ctcagctagggcctgccggttcctagtgcgtgcccagcagtcctcaggtcaccttcactaccgggccaaggaccccgtgggaactcgcagccttcgccacactcgttcctcgcgcatccacggaggggtgcctacagagaagacctgcgtggcaaaaacctaaacgaagagatgaggggcatggagaggagtaggataagagaataaagataacagtgggggggagacgttagtttcctttatatcttttgttactggcggtagcagtgaagttagaaacggttttaaaacaaatttcagacaggcattttccaaaggcaagcctggagcgcacggatctgtataaccgcggaaggccctgtttccggtcccttgcgcctgcgctcttgcagccaagaaggcgggaggctggagtagagggaagcctgcaaccggaagtgaaggcagatttccctccttcgtcgctgttgctgccgccatacgcgctctccctgtttagctcttctgttagaaatagtatctttgttttcctttgctgttcctcaatcccctactcttcaccccttgttttcacctattttgcgagaacccatccagatcccccttcccttcttcccctgccggcccagttatggcagagaacgatgtggacaatgagctcttggactatgaagatgatgaggtggagacagcagctgggggagatggggctgaggcccctgccaagaaggatgtcaagggctcctatgtctccatccacagctctggctttcgtgacttcctgctcaagccagagttgctccgggccattgtcgactgtggctttgagcatccgtcagaagtccagcatgagtgcatccctcaggccattctgggaatggatgtcctgtgccaggccaagtcgggcatgggaaagacagcagtgtttgtcttggccacactgcaacagctggagccagttactgggcaggtgtctgtgctggtgatgtgtcacactcgggagttggcttttcagatcagcaaggaatatgagcgcttctctaaatacatgcccaatgtcaaggttgctgttttttttggtggtctgtctatcaagaaggatgaagaggtgctgaagaagaactgcccgcatatcgtcgtggggactccaggccgtatcctagccctggctcgaaataagagcctcaacctcaaacacattaaacactttattttggatgaatgtgataagatgcttgaacagctcgacatgcgtcgggatgtccaggaaatttttcgcatgaccccccacgagaagcaggtcatgatgttcagtgctaccttgagcaaagagatccgtccagtctgccgcaagttcatgcaagatccaatggagatcttcgtggatgatgagacgaagttgacgctgcatgggttgcagcagtactacgtgaaactgaaggacaacgagaagaaccggaagctctttgaccttctggatgtccttgagttcaaccaggtggtgatctttgtgaagtctgtgcagcggtgcattgccttggcccagctactagtggagcagaacttcccagccattgccatccaccgtgggatgccccaggaggagaggctttctcggtatcagcagtttaaagattttcaacgacgaattcttgtggctaccaacctatttggccgaggcatggacatcgagcgggtgaacattgcttttaattatgacatgcctgaggattctgacacctacctgcatcgggtggccagagcaggccggtttggcaccaagggcttggctatcacatttgtgtccgatgagaatgatgccaagatcctcaatgatgtgcaggatcgctttgaggtcaatattagtgagctgcctgatgagatagacatctcctcctacattgaacagacacggtagaagactcgcccattttggaatgtgaccgtctgtccttcaggagaggacaccagggtgggggtgaaggagacactactgcccccacccctgacagcccccaccccatggcttccatcttttgcatcaccaccactcctgaacccccatttctgatttgtcagaatttttttttaacaaaactaaaaatgaaacacatgtgtctgtggtatctataa

SEQ ID NO: 232047 - DNA, 591 bp, Artificial Sequence
  derived and/or modified sequence
cattgtgttcgttttgctcccttcttccaatgggttcttctcatattggaggcctcagcatcaatgagaggcggtgctcggcgtcccttggtcttgttatggcagagaacgatgtggacaatgagctcttggactatgaagatgatgaggtggagacagcagctgggggagatggggctgaggcccctgccaagaaggatgtcaagggctcctatgtctccatccacagctctggctttcgtgacttcctgctcaagccagagttgctccgggccattgtcgactgtggctttgagcatccgtcagaagtccagcatgagtgcatccctcaggccattctgggaatggatgtcctgtgccaggccaagtcgggcatgggaaagacagcagtgtttgtcttggccacactgcaacagctggagccagttactgggcaggtgtctgtgctggtgatgtgtcacactcgggagttggcttttcagatcagcaaggaatatgagcgcttctctaaatacatgcccaatgtcaaggttgctgttttttttggtggtctgtctatcaagaaggatgaagaggtgctgaagaagaact

SEQ ID NO: 232048 - DNA, 2039 bp, Artificial Sequence
  derived and/or modified sequence
cagcatcggccataacaacagaaatggccagtcagtcccaaggtatccagcagcttctgcaagctgagaagcgggcagctgagaaggtggcagatgccagaaagaggaaggcccggcgactgaagcaggcaaaggaggaggcacagatggaggtggagcaataccgcagagagcgagagcacgaattccagagcaagcagcaggcgacaggcattttccaaaggcaagcctggagcgcacggatctgtataaccgcggaaggccctgtttccggtcccttgcgcctgcgctcttgcagccaagaaggcgggaggctggagtagagggaagcctgcaaccggaagtgaaggcacatttccctccttcgtcgctgttgctgccgccatacgcgctctccctgtttagctcttctgttagaaatagtatctttgttttcctttgctgttcctcaatcccctactcttcaccccttgttttcacctattttgcgagaacccatccagatcccccttcccttcttcccctgccggcccagttatggcagagaacgatgtggacaatgagctcttggactatgaagatgatgaggtggagacagcagctgggggagatggggctgaggcccctgccaagaaggatgtcaagggctcctatgtctccatccacagctctggctttcgtgacttcctgctcaagccagagttgctccgggccattgtcgactgtggctttgagcatccgtcagaagtccagcatgagtgcatccctcaggccattctgggaatggatgtcctgtgccaggccaagtcgggcatgggaaagacagcagtgtttgtcttggccacactgcaacagctggagccagttactgggcaggtgtctgtgctggtgatgtgtcacactcgggagttggcttttcagatcagcaaggaatatgagcgcttctctaaatacatgcccaatgtcaaggttgctgttttttttggtggtctgtctatcaagaaggatgaagaggtgctgaagaagaactgcccgcatatcgtcgtggggactccaggccgtatcctagccctggctcgaaataagagcctcaacctcaaacacattaaacactttattttggatgaatgtgataagatgcttgaacagctcgacatgcgtcgggatgtccaggaaatttttcgcatgaccccccacgagaagcaggtcatgatgttcagtgctaccttgagcaaagagatccgtccagtctgccgcaagttcatgcaagatccaatggagatcttcgtggatgatgagacgaagttgacgctgcatgggttgcagcagtactacgtgaaactgaaggacaacgagaagaaccggaagctctttgaccttctggatgtccttgagttcaaccaggtggtgatctttgtgaagtctgtgcagcggtgcattgccttggcccagctactagtggagcagaacttcccagccattgccatccaccgtgggatgccccaggaggagaggctttctcggtatcagcagtttaaagattttcaacgacgaattcttgtggctaccaacctatttggccgaggcatggacatcgagcgggtgaacattgcttttaattatgacatgcctgaggattctgacacctacctgcatcgggtggccagagcaggccggtttggcaccaagggcttggctatcacatttgtgtccgatgagaatgatgccaagatcctcaatgatgtgcaggatcgctttgaggtcaatattagtgagctgcctgatgagatagacatctcctcctacattgaacagacacggtagaagactcgcccattttggaatgtgaccgtctgtccttcaggagaggacaccagggtgggggtgaaggagacactactgcccccacccctgacagcccccaccccatggcttccatcttttgcatcaccaccactcctgaacccccatttctgatttgtcagaatttttttttaacaaaactaaaaatgaaacacatgtgtctgtggtatctataa

SEQ ID NO: 232049 - DNA, 720 bp, Artificial Sequence
  derived and/or modified sequence
cgctgttgctgccgccatacgcgctctccctgtttagggtggagacatgaattttgtttttttgtggccgagccatttgtcttgcaccgcccctcccccccatgctaattacacaaggcttgcttaaacagcggaagggaggatactgagaagtgggaggctgagagctatgggaggtggacggcggccatatgatgttttcttttcgaaagctcttctgttagaaatagtatctttgttttcctttgctgttcctcaatcccctactcttcaccccttgttttcacctattttgcgagaacccatccagatcccccttcccttcttcccctgccggcccagttatggcagagaacgatgtggacaatgagctcttggactatgaagatgatgaggtggagacagcagctgggggagatggggctgaggcccctgccaagaaggatgtcaagggctcctatgtctccatccacagctctggctttcgtgacttcctgctcaagccagagttgctccgggccattgtcgactgtggctttgagcatccgtcagaagtccagcatgagtgcatccctcaggccattctgggaatggatgtcctgtgccaggccaagtcgggcatgggaaagacagcagtgtttgtcttggccacactgcaacagctggagccagttactgggcaggtgtctgtgctggtgatgtgtcacactcgggagttgg

SEQ ID NO: 232050 - DNA, 2003 bp, Artificial Sequence
  derived and/or modified sequence
ctcagctagggcctgccggttcctagtgcgtgcccagcagtcctcaggtcaccttcactaccgggccaaggaccccgtgggaactcgcagccttcgccacactcgttcctcgcgcatccacggaggggtgcctacagagaagacctgcgtggcaaaaacctaaacgaagagatgaggggcatggagaggagtaggataagagaataaagataacagtggggggcagacgttagtttcctttatatcttttgttactggcggtagcagtgaagttagaaacggttttaaaacaaatttcagacaggcattttccaaaggcaagcctggagcgcacggatctgtataaccgcggaaggccctgtttccggtcccttgcgcctgcgctcttgcagccaagaaggcgggaggctggagtagagggaagcctgcaaccggaagtgaaggcagatttccctccttcgtcgctgttgctgccgccatacgcgctctccctgtttagttatggcagagaacgatgtggacaatgagctcttggactatgaagatgatgaggtggagacagcagctgggggagatggggctgaggcccctgccaagaaggatgtcaagggctcctatgtctccatccacagctctggctttcgtgacttcctgctcaagccagagttgctccgggccattgtcgactgtggctttgagcatccgtcagaagtccagcatgagtgcatccctcaggccattctgggaatggatgtcctgtgccaggccaagtcgggcatgggaaagacagcagtgtttgtcttggccacactgcaacagctggagccagttactgggcaggtgtctgtgctggtgatgtgtcacactcgggagttggcttttcagatcagcaaggaatatgagcgcttctctaaatacatgcccaatgtcaaggttgctgttttttttggtggtctgtctatcaagaaggatgaagaggtgctgaagaagaactgcccgcatatcgtcgtggggactccaggccgtatcctagccctggctcgaaataagagcctcaacctcaaacacattaaacactttattttggatgaatgtgataagatgcttgaacagctcgacatgcgtcgggatgtccaggaaatttttcgcatgaccccccacgagaagcaggtcatgatgttcagtgctaccttgagcaaagagatccgtccagtctgccgcaagttcatgcaagatccaatggagatcttcgtggatgatgagacgaagttgacgctgcatgggttgcagcagtactacgtgaaactgaaggacaacgagaagaaccggaagctctttgaccttctggatgtccttgagttcaaccaggtggtgatctttgtgaagtctgtgcagcggtgcattgccttggcccagctactagtggagcagaacttcccagccattgccatccaccgtgggatgccccaggaggagaggctttctcggtatcagcagtttaaagattttcaacgacgaattcttgtggctaccaacctatttggccgaggcatggacatcgagcgggtgaacattgcttttaattatgacatgcctgaggattctgacacctacctgcatcgggtggccagagcaggccggtttggcaccaagggcttggctatcacatttgtgtccgatgagaatgatgccaagatcctcaatgatgtgcaggatcgctttgaggtcaatattagtgagctgcctgatgagatagacatctcctcctacattgaacagacacggtagaagactcgcccattttggaatgtgaccgtctgtccttcaggagaggacaccagggtgggggtgaaggagacactactgcccccacccctgacagcccccaccccatggcttccatcttttgcatcaccaccactcctgaacccccatttctgatttgtcagaatttttttttaacaaaactaaaaatgaaacacatgtgtctgtggtatctataa

SEQ ID NO: 232051 - DNA, 561 bp, Artificial Sequence
  derived and/or modified sequence
actcagaggagagggacataggaaagccaatggagatcttcgtggatgatgagacgaagttgacgctgcatgggttgcagcagtactacgtgaaactgaaggacaacgagaagaaccggaagctctttgaccttctggatgtccttgagttcaaccaggtggtgatctttgtgaagtctgtgcagcggtgcattgccttggcccagctactagtggagcagaacttcccagccattgccatccaccgtgggatgccccaggaggagaggctttctcggtatcagcagtttaaagattttcaacgacgaattcttgtggctaccaacctatttggccgaggcatggacatcgagcgggtgaacattgcttttaattatgacatgcctgaggattctgacacctacctgcatcgggtggccagagcaggccggtttggcaccaagggcttggctatcacatttgtgtccgatgagaatgatgccaagatcctcaatgatgtgcaggatcgctttgaggtcaatattagtgagctgcctgatgagatagacatctcctcctaca

SEQ ID NO: 232052 - DNA, 2133 bp, Artificial Sequence
  derived and/or modified sequence
ctcagctagggcctgccggttcctagtgcgtgcccagcagtcctcaggtcaccttcactaccgggccaaggaccccgtgggaactcgcagccttcgccacactcgttcctcgcgcatccacggaggggtgcctacagagaagacctgcgtggcaaaaacctaaacgaagagatgaggggcatggagaggagtaggataagagaataaagataacagtgggggggagacgttagtttcctttatatcttttgttactggaggtagcagtgaagttagaaacggttttaaaacaaatttcagacaggcattttccaaaggcaagcctggagcgcacggatctgtataaccgcggaaggccctgtttccggtcccttgcgcctgcgctcttgcagccaagaaggcgggaggctggagtagagggaagcctgcaaccggaagtgaaggcagatttccctccttcgtcgctgttgctgccgccatacgcgctctccctgtttagctcttctgttagaaatagtatctttgttttcctttgctgttcctcaatcccctactcttcaccccttgttttcacctattttgcgagaacccatccagatcccccttcccttcttcccctgccggcccagttatggcagagaacgatgtggacaatgagctcttggactatgaagatgatgaggtggagacagcagctgggggagatggggctgaggcccctgccaagaaggatgtcaagggctcctatgtctccatccacagctctggctttcgtgacttcctgctcaagccagagttgctccgggccattgtcgactgtggctttgagcatccgtcagaagtccagcatgagtgcatccctcaggccattctgggaatggatgtcctgtgccaggccaagtcgggcatgggaaagacagcagtgtttgtcttggccacactgcaacagctggagccagttactgggcaggtgtctgtgctggtgatgtgtcacactcgggagttggcttttcagatcagcaaggaatatgagcgcttctctaaatacatgcccaatgtcaaggttgctgttttttttggtggtctgtctatcaagaaggatgaagaggtgctgaagaagaactgcccgcatatcgtcgtggggactccaggccgtatcctagccctggctcgaaataagagcctcaacctcaaacacattaaacactttattttggatgaatgtgataagatgcttgaacagctcgacatgcgtcgggatgtccaggaaatttttcgcatgaccccccacgagaagcaggtcatgatgttcagtgctaccttgagcaaagagatccgtccagtctgccgcaagttcatgcaagatccaatggagatcttcgtggatgatgagacgaagttgacgctgcatgggttgcagcagtactacgtgaaactgaaggacaacgagaagaaccggaagctctttgaccttctggatgtccttgagttcaaccaggtggtgatctttgtgaagtctgtgcagcggtgcattgccttggcccagctactagtggagcagaacttcccagccattgccatccaccgtgggatgccccaggaggagaggctttctcggtatcagcagtttaaagattttcaacgacgaattcttgtggctaccaacctatttggccgaggcatggacatcgagcgggtgaacattgcttttaattatgacatgcctgaggattctgacacctacctgcatcgggtggccagagcaggccggtttggcaccaagggcttggctatcacatttgtgtccgatgagaatgatgccaagatcctcaatgatgtgcaggatcgctttgaggtcaatattagtgagctgcctgatgagatagacatctcctcctacattgaacagacacggtagaagactcgcccattttggaatgtgaccgtctgtccttcaggagaggacaccagggtgggggtgaaggagacactactgcccccacccctgacagcccccaccccatggcttccatcttttgcatcaccaccactcctgaacccccatttctgatttgtcagaatttttttttaacaaaactaaaaatgaaacacatgtgtctgtggtatctataa

SEQ ID NO: 232053 - DNA, 1005 bp, Artificial Sequence
  derived and/or modified sequence
ttggatttttctcaccttgacttgcccaacttaatttggagtgccttccaagtgtttacgatacgattggtgtcattgtatgtttctccaaaaggagtctcaccttcgtagcgtaacagtgatgtgagaccacttgttatggcagagaacgatgtggacaatgagctcttggactatgaagatgatgaggtggagacagcagctgggggagatggggctgaggcccctgccaagaaggatgtcaagggctcctatgtctccatccacagctctggctttcgtgacttcctgctcaagccagagttgctccgggccattgtcgactgtggctttgagcatccgtcagaagtccagcatgagtgcatccctcaggccattctgggaatggatgtcctgtgccaggccaagtcgggcatgggaaagacagcagtgtttgtcttggccacactgcaacagctggagccagttactgggcaggtgtctgtgctggtgatgtgtcacactcgggagttggcttttcagatcagcaaggaatatgagcgcttctctaaatacatgcccaatgtcaaggttgctgttttttttggtggtctgtctatcaagaaggatgaagaggtgctgaagaagaactgcccgcatatcgtcgtggggactccaggccgtatcctagccctggctcgaaataagagcctcaacctcaaacacattaaacactttattttggatgaatgtgataagatgcttgaacagctcgacatgcgtcgggatgtccaggaaatttttcgcatgaccccccacgagaagcaggtcatgatgttcagtgctaccttgagcaaagagatccgtccagtctgccgcaagttcatgcaagatccaatggagatcttcgtggatgatgagacgaagttgacgctgcatgggttgcagcagtactacgtgaaactgaaggacaacgagaagaaccggaagctctttgaccttctggatgtccttgagttcaaccag

SEQ ID NO: 232054 - DNA, 659 bp, Artificial Sequence
  derived and/or modified sequence
cccttttcacaggcgatggtctggtcgctggggcctagttggttcgctatttccttagcttgcatccctttcgagagcaaagagctcctgggggaaggaagggaagctaaggggggacccaatccaagatggtgtcctcggcgccattgtgttcgttttgctcccttcttccaatgggttcttctcatattggaggcctcagcatcaatgagaggcggtgctcggcgtcccttggtcttgctcttctgttagaaatagtatctttgttttcctttgctgttcctcaatcccctactcttcaccccttgttttcacctattttgcgagaacccatccagatcccccttcccttcttcccctgccggcccagttatggcagagaacgatgtggacaatgagctcttggactatgaagatgatgaggtggagacagcagctgggggagatggggctgaggcccctgccaagaaggatgtcaagggctcctatgtctccatccacagctctggctttcgtgacttcctgctcaagccagagttgctccgggccattgtcgactgtggctttgagcatccgtcagaagtccagcatgagtgcatccctcaggccattctgggaatggatgtcctgtgccaggccaagtcgggcatgggaaagac

SEQ ID NO: 232055 - DNA, 932 bp, Artificial Sequence
  derived and/or modified sequence
cttcgctacaatccgtttccatctgcgcttctccgcacccatcccgtcacatgggttcctgatacccttttcacaggcgatggtctggtcgctggggcctagttgctcttctgttagaaatagtatctttgttttcctttgctgttcctcaatcccctactcttcaccccttgttttcacctattttgcgagaacccatccagatcccccttcccttcttcccctgccggcccagttatggcagagaacgatgtggacaatgagctcttggactatgaagatgatgaggtggagacagcagctgggggagatggggctgaggcccctgccaagaaggatgtcaagggctcctatgtctccatccacagctctggctttcgtgacttcctgctcaagccagagttgctccgggccattgtcgactgtggctttgagcatccgtcagaagtccagcatgagtgcatccctcaggccattctgggaatggatgtcctgtgccaggccaagtcgggcatgggaaagacagcagtgtttgtcttggccacactgcaacagctggagccagttactgggcaggtgtctgtgctggtgatgtgtcacactcgggagttggcttttcagatcagcaaggaatatgagcgcttctctaaatacatgcccaatgtcaaggttgctgttttttttggtggtctgtctatcaagaaggatgaagaggtgctgaagaagaactgcccgcatatcgtcgtggggactccaggccgtatcctagccctggctcgaaataagagcctcaacctcaaacacattaaacactttattttggatgaatgtgataagatgcttgaacagctcgacatgcgtcgggatgtccaggaaatttttcgcatgaccccccacgagaagcaggtcatgatgttcagtgctaccttgag

SEQ ID NO: 232056 - DNA, 583 bp, Artificial Sequence
  derived and/or modified sequence
acatttccctccttcgtcgctgttgctgccgccatacgcgctctccctgtttagctcttctgttagaaatagtatctttgttttcctttgctgttcctcaatcccctactcttcaccccttgttttcacctattttgcgagaacccatccagatcccccttcccttcttcccctgccggcccagttatggcagagaacgatgtggacaatgagctcttggactatgaagatgatgaggtggagacagcagctgggggagatggggctgaggcccctgccaagaaggatgtcaagggctcctatgtctccatccacagctctggctttcgtgacttcctgctcaagccagagttgctccgggccattgtcgactgtggctttgagcatccgtcagaagtccagcatgagtgcatccctcaggccattctgggaatggatgtcctgtgccaggccaagtcgggcatgggaaagacagcagtgtttgtcttggccacactgcaacagctggagccagttactgggcaggtgtgtttttgtgacagtcacttccctagaggggataatgaagagctacatttaccat

SEQ ID NO: 232057 - DNA, 1433 bp, Artificial Sequence
  derived and/or modified sequence
agatttccctccttcgtcgctgttgctgccgccatacgcgctctccctgtttagctcttctgttagaaatagtatctttgttttcctttgctgttcctcaatcccctactcttcaccccttgttttcacctattttgcgagaacccatccagatcccccttcccttcttcccctgccggcccagttatggcagagaacgatgtggacaatgagctcttggactatgaagatgatgaggtggagacagcagctgggggagatggggctgaggcccctgccaagaaggatgtcaagggctcctatgtctccatccacagctctggctttcgtgacttcctgctcaagccagagttgctccgggccattgtcgactgtggctttgagcatccgtcagaaggttgctgttttttttggtggtctgtctatcaagaaggatgaagaggtgctgaagaagaactgcccgcatatcgtcgtggggactccaggccgtatcctagccctggctcgaaataagagcctcaacctcaaacacattaaacactttattttggatgaatgtgataagatgcttgaacagctcgacatgcgtcgggatgtccaggaaatttttcgcatgaccccccacgagaagcaggtcatgatgttcagtgctaccttgagcaaagagatccgtccagtctgccgcaagttcatgcaagatccaatggagatcttcgtggatgatgagacgaagttgacgctgcatgggttgcagcagtactacgtgaaactgaaggacaacgagaagaaccggaagctctttgaccttctggatgtccttgagttcaaccaggtggtgatctttgtgaagtctgtgcagcggtgcattgccttggcccagctactagtggagcagaacttcccagccattgccatccaccgtgggatgccccaggaggagaggctttctcggtatcagcagtttaaagattttcaacgacgaattcttgtggctaccaacctatttggccgaggcatggacatcgagcgggtgaacattgcttttaattatgacatgcctgaggattctgacacctacctgcatcgggtggccagagcaggccggtttggcaccaagggcttggctatcacatttgtgtccgatgagaatgatgccaagatcctcaatgatgtgcaggatcgctttgaggtcaatattagtgagctgcctgatgagatagacatctcctcctacattgaacagacacggtagaagactcgcccattttggaatgtgaccgtctgtccttcaggagaggacaccagggtgggggtgaaggagacactactgcccccacccctgacagcccccaccccatggcttccatcttttgcatcaccaccactcctgaacccccatttctgatttgtcagaatttttttttaacaaaact

SEQ ID NO: 232058 - DNA, 914 bp, Artificial Sequence
  derived and/or modified sequence
ttgctgccgccatacgcgctctccctgtttagctcttctgttagaaatagtatctttgttttcctttgctgttcctcaatcccctactcttcaccccttgttttcacctattttgcgagaacccatccagatcccccttcccttcttcccctgccggcccagttatggcagagaacgatgtggacaatgagctcttggactatgaagatgatgaggtggagacagcagctgggggagatggggctgaggcccctgccaagaaggatgtcaagggctcctatgtctccatccacagctctggctttcgtgacttcctgctcaagccagagttgctccgggccattgtcgactgtggctttgagcatccgtcagaaggttgctgttttttttggtggtctgtctatcaagaaggatgaagaggtgctgaagaagaactgcccgcatatcgtcgtggggactccaggccgtatcctagccctggctcgaaataagagcctcaacctcaaacacattaaacactttattttggatgaatgtgataagatgcttgaacagctcgacatgcgtcgggatgtccaggaaatttttcgcatgaccccccacgagaagcaggtcatgatgttcagtgctaccttgagcaaagagatccgtccagtctgccgcaagttcatgcaagatccaatggagatcttcgtggatgatgagacgaagttgacgctgcatgggttgcagcagtactacgtgaaactgaaggacaacgagaagaaccggaagctctttgaccttctggatgtccttgagttcaaccaggtggtgatctttgtgaagtctgtgcagcggtgcattgccttggcccagctactagtggagcagaacttcccagccattgccatccaccgtgggatgccccagga

SEQ ID NO: 232059 - DNA, 583 bp, Artificial Sequence
  derived and/or modified sequence
ttcgtcgctgttgctgccgccatacgcgctctccctgtttagggtggagacatgaattttgtttttttgtggccgagccatttgtcttgcaccgcccctcccccccatgctaattacacaaggcttgcttaaacagcggaagggaggatactgagaagtgggaggctgagagctatgggaggtggacggcggccatatgatgttttcttttcgaaagttatggcagagaacgatgtggacaatgagctcttggactatgaagatgatgaggtggagacagcagctgggggagatggggctgaggcccctgccaagaaggatgtcaagggctcctatgtctccatccacagctctggctttcgtgacttcctgctcaagccagagttgctccgggccattgtcgactgtggctttgagcatccgtcagaagtccagcatgagtgcatccctcaggccattctgggaatggatgtcctgtgccaggccaagtcgggcatgggaaagacagcagtgtttgtcttggccacactgcaacagctggagccagttactgggcaggtgtctgtgctggtgatgtgtcaca

SEQ ID NO: 232060 - DNA, 2133 bp, Artificial Sequence
  derived and/or modified sequence
ctcagctagggcctgccggttcctagtgcgtgcccagcagtcctcaggtcaccttcactaccgggccaaggaccccgtgggaactcgcagccttcgccacactcgttcctcgcgcatccacggaggggtgcctacagagaagacctgcgtggcaaaaacctaaacgaagagatgaggggcatggagaggagtaggataagagaataaagataacagtgggggggagacgttagtttcctttatatcttttgttactggcggtagcagtgaagttagaaacggttttaaaacaaatttcagacaggcattttccaaaggcaagcctggagcgcacggatctgtataaccgcggaaggccctgtttccggtcccttgcgcctgcgctcttgcagccaagaaggcgggaggctggagtagagggaagcctgcaaccggaagtgaaggcacatttccctccttcgtcgctgttgctgccgccatacgcgctctccctgtttagctcttctgttagaaatagtatctttgttttcctttgctgttcctcaatcccctactcttcaccccttgttttcacctattttgcgagaacccatccagatcccccttcccttcttcccctgccggcccagttatggcagagaacgatgtggacaatgagctcttggactatgaagatgatgaggtggagacagcagctgggggagatggggctgaggcccctgccaagaaggatgtcaagggctcctatgtctccatccacagctctggctttcgtgacttcctgctcaagccagagttgctccgggccattgtcgactgtggctttgagcatccgtcagaagtccagcatgagtgcatccctcaggccattctgggaatggatgtcctgtgccaggccaagtcgggcatgggaaagacagcagtgtttgtcttggccacactgcaacagctggagccagttactgggcaggtgtctgtgctggtgatgtgtcacactcgggagttggcttttcagatcagcaaggaatatgagcgcttctctaaatacatgcccaatgtcaaggttgctgttttttttggtggtctgtctatcaagaaggatgaagaggtgctgaagaagaactgcccgcatatcgtcgtggggactccaggccgtatcctagccctggctcgaaataagagcctcaacctcaaacacattaaacactttattttggatgaatgtgataagatgcttgaacagctcgacatgcgtcgggatgtccaggaaatttttcgcatgaccccccacgagaagcaggtcatgatgttcagtgctaccttgagcaaagagatccgtccagtctgccgcaagttcatgcaagatccaatggagatcttcgtggatgatgagacgaagttgacgctgcatgggttgcagcagtactacgtgaaactgaaggacaacgagaagaaccggaagctctttgaccttctggatgtccttgagttcaaccaggtggtgatctttgtgaagtctgtgcagcggtgcattgccttggcccagctactagtggagcagaacttcccagccattgccatccaccgtgggatgccccaggaggagaggctttctcggtatcagcagtttaaagattttcaacgacgaattcttgtggctaccaacctatttggccgaggcatggacatcgagcgggtgaacattgcttttaattatgacatgcctgaggattctgacacctacctgcatcgggtggccagagcaggccggtttggcaccaagggcttggctatcacatttgtgtccgatgagaatgatgccaagatcctcaatgatgtgcaggatcgctttgaggtcaatattagtgagctgcctgatgagatagacatctcctcctacattgaacagacacggtagaagactcgcccattttggaatgtgaccgtctgtccttcaggagaggacaccagggtgggggtgaaggagacactactgcccccacccctgacagcccccaccccatggcttccatcttttgcatcaccaccactcctgaacccccatttctgatttgtcagaatttttttttaacaaaactaaaaatgaaacacatgtgtctgtggtatctataa

SEQ ID NO: 232061 - DNA, 633 bp, Artificial Sequence
  derived and/or modified sequence
cgtcgctgttgctgccgccatacgcgctctccctgtttagttatggcagagaacgatgtggacaatgagctcttggactatgaagatgatgaggtggagacagcagctgggggagatggggctgaggcccctgccaagaaggatgtcaagggctcctatgtctccatccacagctctggctttcgtgacttcctgctcaagccagagttgctccgggccattgtcgactgtggctttgagcatccgtcagaagtccagcatgagtgcatccctcaggccattctgggaatggatgtcctgtgccaggccaagtcgggcatgggaaagacagcagtgtttgtcttggccacactgcaacagctggagccagttactgggcaggtgtgtttttgtgacagtcacttccctagaggggataatgaagagctacatttaccatatgtctccgtatacttcctgcctaaggtgtctgtgctggtgatgtgtcacactcgggagttggcttttcagatcagcaaggaatatgagcgcttctctaaatacatgcccaatgtcaaggttgctgttttttttggtggtctgtctatcaagaaggatgaagaggtgctgaagaagaactgcccgcatatcgtc

SEQ ID NO: 232062 - DNA, 566 bp, Artificial Sequence
  derived and/or modified sequence
tggccacactgcaacagctggagccagttactgggcaggtgtctgtactggtgatgtgtcacactcgggagttggcttttcagatcagcaaggaatatgagcgcttctctaaatacatgcccaatgtcaaggttgctgttttttttggtggtctgtctatcaagaaggatgaagaggtgctgaagaagaactgcccgcatatcgtcgtggggactccaggccgtatcctagccctggctcgaaataagagcctcaacctcaaacacattaaacactttattttggatgaatgtgataagatgcttgaacagctcgacatgcgtcgggatgtccaggaaatttttcgcatgaccccccacgagaagcaggtcatgatgttcagtgctaccttgagcaaagagatccgtccagtctgccgcaagttcatgcaagatccaatggagatcttcgtggatgatgagacgaagttgacgctgcatgggttgcagcagtactacgtgaaactgaaggacaacgagaagaaccggaagctctttgaccttctggatgtccttgagttcaaccag

SEQ ID NO: 232063 - DNA, 2003 bp, Artificial Sequence
  derived and/or modified sequence
ctcagctagggcctgccggttcctagtgcgtgcccagcagtcctcaggtcaccttcactaccgggccaaggaccccgtgggaactcgcagccttcgccacactcgttcctcgcgcatccacggaggggtgcctacagagaagacctgcgtggcaaaaacctaaacgaagagatgaggggcatggagaggagtaggataagagaataaagataacagtgggggggagacgttagtttcctttatatcttttgttactggaggtagcagtgaagttagaaacggttttaaaacaaatttcagacaggcattttccaaaggcaagcctggagcgcacggatctgtataaccgcggaaggccctgtttccggtcccttgcgcctgcgctcttgcagccaagaaggcgggaggctggagtagagggaagcctgcaaccggaagtgaaggcagatttccctccttcgtcgctgttgctgccgccatacgcgctctccctgtttagttatggcagagaacgatgtggacaatgagctcttggactatgaagatgatgaggtggagacagcagctgggggagatggggctgaggcccctgccaagaaggatgtcaagggctcctatgtctccatccacagctctggctttcgtgacttcctgctcaagccagagttgctccgggccattgtcgactgtggctttgagcatccgtcagaagtccagcatgagtgcatccctcaggccattctgggaatggatgtcctgtgccaggccaagtcgggcatgggaaagacagcagtgtttgtcttggccacactgcaacagctggagccagttactgggcaggtgtctgtgctggtgatgtgtcacactcgggagttggcttttcagatcagcaaggaatatgagcgcttctctaaatacatgcccaatgtcaaggttgctgttttttttggtggtctgtctatcaagaaggatgaagaggtgctgaagaagaactgcccgcatatcgtcgtggggactccaggccgtatcctagccctggctcgaaataagagcctcaacctcaaacacattaaacactttattttggatgaatgtgataagatgcttgaacagctcgacatgcgtcgggatgtccaggaaatttttcgcatgaccccccacgagaagcaggtcatgatgttcagtgctaccttgagcaaagagatccgtccagtctgccgcaagttcatgcaagatccaatggagatcttcgtggatgatgagacgaagttgacgctgcatgggttgcagcagtactacgtgaaactgaaggacaacgagaagaaccggaagctctttgaccttctggatgtccttgagttcaaccaggtggtgatctttgtgaagtctgtgcagcggtgcattgccttggcccagctactagtggagcagaacttcccagccattgccatccaccgtgggatgccccaggaggagaggctttctcggtatcagcagtttaaagattttcaacgacgaattcttgtggctaccaacctatttggccgaggcatggacatcgagcgggtgaacattgcttttaattatgacatgcctgaggattctgacacctacctgcatcgggtggccagagcaggccggtttggcaccaagggcttggctatcacatttgtgtccgatgagaatgatgccaagatcctcaatgatgtgcaggatcgctttgaggtcaatattagtgagctgcctgatgagatagacatctcctcctacattgaacagacacggtagaagactcgcccattttggaatgtgaccgtctgtccttcaggagaggacaccagggtgggggtgaaggagacactactgcccccacccctgacagcccccaccccatggcttccatcttttgcatcaccaccactcctgaacccccatttctgatttgtcagaatttttttttaacaaaactaaaaatgaaacacatgtgtctgtggtatctataa

SEQ ID NO: 232064 - DNA, 928 bp, Artificial Sequence
  derived and/or modified sequence
ccaagtgtttacgatacgattggtgtcattgtatgtttctccaaaaggagtctcaccttcgtagcgtaacagtgatgtgagaccacttgctcttctgttagaaatagtatctttgttttcctttgctgttcctcaatcccctactcttcaccccttgttttcacctattttgcgagaacccatccagatcccccttcccttcttcccctgccggcccagttatggcagagaacgatgtggacaatgagctcttggactatgaagatgatgaggtggagacagcagctgggggagatggggctgaggcccctgccaagaaggatgtcaagggctcctatgtctccatccacagctctggctttcgtgacttcctgctcaagccagagttgctccgggccattgtcgactgtggctttgagcatccgtcagaagtccagcatgagtgcatccctcaggccattctgggaatggatgtcctgtgccaggccaagtcgggcatgggaaagacagcagtgtttgtcttggccacactgcaacagctggagccagttactgggcaggtgtctgtgctggtgatgtgtcacactcgggagttggcttttcagatcagcaaggaatatgagcgcttctctaaatacatgcccaatgtcaaggttgctgttttttttggtggtctgtctatcaagaaggatgaagaggtgctgaagaagaactgcccgcatatcgtcgtggggactccaggccgtatcctagccctggctcgaaataagagcctcaacctcaaacacattaaacactttattttggatgaatgtgataagatgcttgaacagctcgacatgcgtcgggatgtccaggaaatttttcgcatgaccccccacgagaagcaggtcatgatgttcagtgctaccttgagcaaagagatccg

SEQ ID NO: 232065 - DNA, 591 bp, Artificial Sequence
  derived and/or modified sequence
cattgtgttcgttttgctcccttcttccaatgggttcttctcatattggaggcctcagcatcaatgagaggcggcgctcggcgtcccttggtcttgttatggcagagaacgatgtggacaatgagctcttggactatgaagatgatgaggtggagacagcagctgggggagatggggctgaggcccctgccaagaaggatgtcaagggctcctatgtctccatccacagctctggctttcgtgacttcctgctcaagccagagttgctccgggccattgtcgactgtggctttgagcatccgtcagaagtccagcatgagtgcatccctcaggccattctgggaatggatgtcctgtgccaggccaagtcgggcatgggaaagacagcagtgtttgtcttggccacactgcaacagctggagccagttactgggcaggtgtctgtactggtgatgtgtcacactcgggagttggcttttcagatcagcaaggaatatgagcgcttctctaaatacatgcccaatgtcaaggttgctgttttttttggtggtctgtctatcaagaaggatgaagaggtgctgaagaagaact

SEQ ID NO: 232066 - DNA, 583 bp, Artificial Sequence
  derived and/or modified sequence
agatttccctccttcgtcgctgttgctgccgccatacgcgctctccctgtttagctcttctgttagaaatagtatctttgttttcctttgctgttcctcaatcccctactcttcaccccttgttttcacctattttgcgagaacccatccagatcccccttcccttcttcccctgccggcccagttatggcagagaacgatgtggacaatgagctcttggactatgaagatgatgaggtggagacagcagctgggggagatggggctgaggcccctgccaagaaggatgtcaagggctcctatgtctccatccacagctctggctttcgtgacttcctgctcaagccagagttgctccgggccattgtcgactgtggctttgagcatccgtcagaagtccagcatgagtgcatccctcaggccattctgggaatggatgtcctgtgccaggccaagtcgggcatgggaaagacagcagtgtttgtcttggccacactgcaacagctggagccagttactgggcaggtgtgtttttgtgacagtcacttccctagaggggataatgaagagctacatttaccat

SEQ ID NO: 232067 - DNA, 2178 bp, Artificial Sequence
  derived and/or modified sequence
ctcagctagggcctgccggttcctagtgcgtgcccagcagtcctcaggtcaccttcactaccgggccaaggaccccgtgggaactcgcagccttcgccacactcgttcctcgcgcatccatggaggggtgcctacagagaagacctgcgtggcaaaaacctaaacgaagagatgaggggcatggagaggagtaggataagagaataaagataacagtgggggggagacgttagtttcctttatatcttttgttactggcggtagcagtgaagttagaaacggttttaaaacaaatttcagacaggcattttccaaaggcaagcctggagcgcacggatctgtataaccgcggaaggccctgtttccggtcccttgcgcctgcgctcttgcagccaagaaggcgggaggctggagtagagggaagcctgcaaccggaagtgaaggcagatttccctccttcgtcgctgttgctgccgccatacgcgctctccctgtttagctcttctgttagaaatagtatctttgttttcctttgctgttcctcaatcccctactcttcaccccttgttttcacctattttgcgagaacccatccagatcccccttcccttcttcccctgccggcccagttatggcagagaacgatgtggacaatgagctcttggactatgaagatgatgaggtggagacagcagctgggggagatggggctgaggcccctgccaagaaggatgtcaagggctcctatgtctccatccacagctctggctttcgtgacttcctgctcaagccagagttgctccgggccattgtcgactgtggctttgagcatccgtcagaagtccagcatgagtgcatccctcaggccattctgggaatggatgtcctgtgccaggccaagtcgggcatgggaaagacagcagtgtttgtcttggccacactgcaacagctggagccagttactgggcaggtatatttggggagagtgctggggaggggattttggtgtgtttttgtgtctgtactggtgatgtgtcacactcgggagttggcttttcagatcagcaaggaatatgagcgcttctctaaatacatgcccaatgtcaaggttgctgttttttttggtggtctgtctatcaagaaggatgaagaggtgctgaagaagaactgcccgcatatcgtcgtggggactccaggccgtatcctagccctggctcgaaataagagcctcaacctcaaacacattaaacactttattttggatgaatgtgataagatgcttgaacagctcgacatgcgtcgggatgtccaggaaatttttcgcatgaccccccacgagaagcaggtcatgatgttcagtgctaccttgagcaaagagatccgtccagtctgccgcaagttcatgcaagatccaatggagatcttcgtggatgatgagacgaagttgacgctgcatgggttgcagcagtactacgtgaaactgaaggacaacgagaagaaccggaagctctttgaccttctggatgtccttgagttcaaccaggtggtgatctttgtgaagtctgtgcagcggtgcattgccttggcccagctactagtggagcagaacttcccagccattgccatccaccgtgggatgccccaggaggagaggctttctcggtatcagcagtttaaagattttcaacgacgaattcttgtggctaccaacctatttggccgaggcatggacatcgagcgggtgaacattgcttttaattatgacatgcctgaggattctgacacctacctgcatcgggtggccagagcaggccggtttggcaccaagggcttggctatcacatttgtgtccgatgagaatgatgccaagatcctcaatgatgtgcaggatcgctttgaggtcaatattagtgagctgcctgatgagatagacatctcctcctacattgaacagacacggtagaagactcgcccattttggaatgtgaccgtctgtccttcaggagaggacaccagggtgggggtgaaggagacactactgcccccacccctgacagcccccaccccatggcttccatcttttgcatcaccaccactcctgaacccccatttctgatttgtcagaatttttttttaacaaaactaaaaatgaaacacatgtgtctgtggtatctataa

SEQ ID NO: 232068 - DNA, 583 bp, Artificial Sequence
  derived and/or modified sequence
ttcgtcgctgttgctgccgccatacgcgctctccctgtttagggtggagacatgaattttgtttttttgtggccgagccatttgtcttgcaccgcccctcccccccatgctaattacacaaggcttgcttaaacagcggaagggaggatactgagaagtgggaggctgagagctatgggaggtggacggcggccatatgatgttttcttttcgaaagttatggcagagaacgatgtggacaatgagctcttggactatgaagatgatgaggtggagacagcagctgggggagatggggctgaggcccctgccaagaaggatgtcaagggctcctatgtctccatccacagctctggctttcgtgacttcctgctcaagccagagttgctccgggccattgtcgactgtggctttgagcatccgtcagaagtccagcatgagtgcatccctcaggccattctgggaatggatgtcctgtgccaggccaagtcgggcatgggaaagacagcagtgtttgtcttggccacactgcaacagctggagccagttactgggcaggtgtctgtactggtgatgtgtcaca

SEQ ID NO: 232069 - DNA, 928 bp, Artificial Sequence
  derived and/or modified sequence
ccaagtgtttacgatacgattggtgtcattgtatgtttctccaaaaggagtctcaccttcgtagcgtaacagtgatgtgagaccacttgctcttctgttagaaatagtatctttgttttcctttgctgttcctcaatcccctactcttcaccccttgttttcacctattttgcgagaacccatccagatcccccttcccttcttcccctgccggcccagttatggcagagaacgatgtggacaatgagctcttggactatgaagatgatgaggtggagacagcagctgggggagatggggctgaggcccctgccaagaaggatgtcaagggctcctatgtctccatccacagctctggctttcgtgacttcctgctcaagccagagttgctccgggccattgtcgactgtggctttgagcatccgtcagaagtccagcatgagtgcatccctcaggccattctgggaatggatgtcctgtgccaggccaagtcgggcatgggaaagacagcagtgtttgtcttggccacactgcaacagctggagccagttactgggcaggtgtctgtactggtgatgtgtcacactcgggagttggcttttcagatcagcaaggaatatgagcgcttctctaaatacatgcccaatgtcaaggttgctgttttttttggtggtctgtctatcaagaaggatgaagaggtgctgaagaagaactgcccgcatatcgtcgtggggactccaggccgtatcctagccctggctcgaaataagagcctcaacctcaaacacattaaacactttattttggatgaatgtgataagatgcttgaacagctcgacatgcgtcgggatgtccaggaaatttttcgcatgaccccccacgagaagcaggtcatgatgttcagtgctaccttgagcaaagagatccg

SEQ ID NO: 232070 - DNA, 720 bp, Artificial Sequence
  derived and/or modified sequence
cgctgttgctgccgccatacgcgctctccctgtttagggtggagacatgaattttgtttttttgtggccgagccatttgtcttgcaccgcccctcccccccatgctaattacacaaggcttgcttaaacagcggaagggaggatactgagaagtgggaggctgagagctatgggaggtggacggcggccatatgatgttttcttttcgaaagctcttctgttagaaatagtatctttgttttcctttgctgttcctcaatcccctactcttcaccccttgttttcacctattttgcgagaacccatccagatcccccttcccttcttcccctgccggcccagttatggcagagaacgatgtggacaatgagctcttggactatgaagatgatgaggtggagacagcagctgggggagatggggctgaggcccctgccaagaaggatgtcaagggctcctatgtctccatccacagctctggctttcgtgacttcctgctcaagccagagttgctccgggccattgtcgactgtggctttgagcatccgtcagaagtccagcatgagtgcatccctcaggccattctgggaatggatgtcctgtgccaggccaagtcgggcatgggaaagacagcagtgtttgtcttggccacactgcaacagctggagccagttactgggcaggtgtctgtactggtgatgtgtcacactcgggagttgg

SEQ ID NO: 232071 - DNA, 1201 bp, Artificial Sequence
  derived and/or modified sequence
tggccacactgcaacagctggagccagttactgggcaggtgtctgtactggtgatgtgtcacactcgggagttggcttttcagatcagcaaggaatatgagcgcttctctaaatacatgcccaatgtcaaggttgctgttttttttggtggtctgtctatcaagaaggatgaagaggtgctgaagaagaactgcccgcatatcgtcgtggggactccaggccgtatcctagccctggctcgaaataagagcctcaacctcaaacacattaaacactttattttggatgaatgtgataagatgcttgaacagctcgacatgcgtcgggatgtccaggaaatttttcgcatgaccccccacgagaagcaggtcatgatgttcagtgctaccttgagcaaagagatccgtccagtctgccgcaagttcatgcaagatccaatggagatcttcgtggatgatgagacgaagttgacgctgcatgggttgcagcagtactacgtgaaactgaaggacaacgagaagaaccggaagctctttgaccttctggatgtccttgagttcaaccaggtggtgatctttgtgaagtctgtgcagcggtgcattgccttggcccagctactagtggagcagaacttcccagccattgccatccaccgtgggatgccccaggaggagaggctttctcggtatcagcagtttaaagattttcaacgacgaattcttgtggctaccaacctatttggccgaggcatggacatcgagcgggtgaacattgcttttaattatgacatgcctgaggattctgacacctacctgcatcgggtggccagagcaggccggtttggcaccaagggcttggctatcacatttgtgtccgatgagaatgatgccaagatcctcaatgatgtgcaggatcgctttgaggtcaatattagtgagctgcctgatgagatagacatctcctcctacattgaacagacacggtagaagactcgcccattttggaatgtgaccgtctgtccttcaggagaggacaccagggtgggggtgaaggagacactactgcccccacccctgacagcccccaccccatggcttccatcttttgcatcaccaccactcctgaacccccatttctgatttgtcagaatttttttttaacaaaactaaaaatgaaacacatgtgtctgtggtatctataa

SEQ ID NO: 232072 - DNA, 1005 bp, Artificial Sequence
  derived and/or modified sequence
ttggatttttctcaccttgacttgcccaacttaatttggagtgccttccaagtgtttacgatacgattggtgtcattgtatgtttctccaaaaggagtctcaccttcgtagcgtaacagtgatgtgagaccacttgttatggcagagaacgatgtggacaatgagctcttggactatgaagatgatgaggtggagacagcagctgggggagatggggctgaggcccctgccaagaaggatgtcaagggctcctatgtctccatccacagctctggctttcgtgacttcctgctcaagccagagttgctccgggccattgtcgactgtggctttgagcatccgtcagaagtccagcatgagtgcatccctcaggccattctgggaatggatgtcctgtgccaggccaagtcgggcatgggaaagacagcagtgtttgtcttggccacactgcaacagctggagccagttactgggcaggtgtctgtactggtgatgtgtcacactcgggagttggcttttcagatcagcaaggaatatgagcgcttctctaaatacatgcccaatgtcaaggttgctgttttttttggtggtctgtctatcaagaaggatgaagaggtgctgaagaagaactgcccgcatatcgtcgtggggactccaggccgtatcctagccctggctcgaaataagagcctcaacctcaaacacattaaacactttattttggatgaatgtgataagatgcttgaacagctcgacatgcgtcgggatgtccaggaaatttttcgcatgaccccccacgagaagcaggtcatgatgttcagtgctaccttgagcaaagagatccgtccagtctgccgcaagttcatgcaagatccaatggagatcttcgtggatgatgagacgaagttgacgctgcatgggttgcagcagtactacgtgaaactgaaggacaacgagaagaaccggaagctctttgaccttctggatgtccttgagttcaaccag

SEQ ID NO: 232073 - DNA, 394 bp, Artificial Sequence
  derived and/or modified sequence
tggccacactgcaacagctggagccagttactgggcaggtgtctgtactggtgatgtgtcacactcgggagttggcttttcagatcagcaaggaatatgagcgcttctctaaatacatgcccaatgtcaaggttgctgttttttttggtggtctgtctatcaagaaggatgaagaggtgctgaagaagaactgcccgcatatcgtcgtggggactccaggccgtatcctagccctggctcgaaataagagcctcaacctcaaacacattaaacactttattttggatgaatgtgataagatgcttgaacagctcgacatgcgtcgggatgtccaggaaatttttcgcatgaccccccacgagaagcaggtcatgatgttcagtgctaccttgag

SEQ ID NO: 232074 - DNA, 406 bp, Artificial Sequence
  derived and/or modified sequence
tggccacactgcaacagctggagccagttactgggcaggtgtctgtactggtgatgtgtcacactcgggagttggcttttcagatcagcaaggaatatgagcgcttctctaaatacatgcccaatgtcaaggttgctgttttttttggtggtctgtctatcaagaaggatgaagaggtgctgaagaagaactgcccgcatatcgtcgtggggactccaggccgtatcctagccctggctcgaaataagagcctcaacctcaaacacattaaacactttattttggatgaatgtgataagatgcttgaacagctcgacatgcgtcgggatgtccaggaaatttttcgcatgaccccccacgagaagcaggtcatgatgttcagtgctaccttgagcaaagagatccg

SEQ ID NO: 232075 - DNA, 817 bp, Artificial Sequence
  derived and/or modified sequence
accggaagtgaaggcagatttccctccttcgtcgctgttgctgccgccatacgcgctctccctgtttagatcccccttcccttcttcccctgccggcccagttatggcagagaacgatgtggacaatgagctcttggactatgaagatgatgaggtggagacagcagctgggggagatggggctgaggcccctgccaagaaggatgtcaagggctcctatgtctccatccacagctctggctttcgtgacttcctgctcaagccagagttgctccgggccattgtcgactgtggctttgagcatccgtcagaagtccagcatgagtgcatccctcaggccattctgggaatggatgtcctgtgccaggccaagtcgggcatgggaaagacagcagtgtttgtcttggccacactgcaacagctggagccagttactgggcaggtgtctgtactggtgatgtgtcacactcgggagttggcttttcagatcagcaaggaatatgagcgcttctctaaatacatgcccaatgtcaaggttgctgttttttttggtggtctgtctatcaagaaggatgaagaggtgctgaagaagaactgcccgcatatcgtcgtggggactccaggccgtatcctagccctggctcgaaataagagcctcaacctcaaacacattaaacactttattttggatgaatgtgataagatgcttgaacagctcgacatgcgtcgggatgtccaggaaatttttcgcatgaccccccacgagaagcaggtcatgatgttcagtgctaccttgagcaaagagatccgtccagtc

SEQ ID NO: 232076 - DNA, 633 bp, Artificial Sequence
  derived and/or modified sequence
cgtcgctgttgctgccgccatacgcgctctccctgtttagttatggcagagaacgatgtggacaatgagctcttggactatgaagatgatgaggtggagacagcagctgggggagatggggctgaggcccctgccaagaaggatgtcaagggctcctatgtctccatccacagctctggctttcgtgacttcctgctcaagccagagttgctccgggccattgtcgactgtggctttgagcatccgtcagaagtccagcatgagtgcatccctcaggccattctgggaatggatgtcctgtgccaggccaagtcgggcatgggaaagacagcagtgtttgtcttggccacactgcaacagctggagccagttactgggcaggtgtgtttttgtgacagtcacttccctagaggggataatgaagagctacatttaccatatgtctccgtctacttcctgcctaaggtgtctgtactggtgatgtgtcacactcgggagttggcttttcagatcagcaaggaatatgagcgcttctctaaatacatgcccaatgtcaaggttgctgttttttttggtggtctgtctatcaagaaggatgaagaggtgctgaagaagaactgcccgcatatcgtc

SEQ ID NO: 232077 - DNA, 2003 bp, Artificial Sequence
  derived and/or modified sequence
ctcagctagggcctgccggttcctagtgcgtgcccagcagtcctcaggtcaccttcactaccgggccaaggaccccgtgggaactcgcagccttcgccacactcgttcctcgcgcatccatggaggggtgcctacagagaagacctgcgtggcaaaaacctaaacgaagagatgaggggcatggagaggagtaggataagagaataaagataacagtgggggggagacgttagtttcctttatatcttttgttactggcggtagcagtgaagttagaaacggttttaaaacaaatttcagacaggcattttccaaaggcaagcctggagcgcacggatctgtataaccgcggaaggccctgtttccggtcccttgcgcctgcgctcttgcagccaagaaggcgggaggctggagtagagggaagcctgcaaccggaagtgaaggcagatttccctccttcgtcgctgttgctgccgccatacgcgctctccctgtttagttatggcagagaacgatgtggacaatgagctcttggactatgaagatgatgaggtggagacagcagctgggggagatggggctgaggcccctgccaagaaggatgtcaagggctcctatgtctccatccacagctctggctttcgtgacttcctgctcaagccagagttgctccgggccattgtcgactgtggctttgagcatccgtcagaagtccagcatgagtgcatccctcaggccattctgggaatggatgtcctgtgccaggccaagtcgggcatgggaaagacagcagtgtttgtcttggccacactgcaacagctggagccagttactgggcaggtgtctgtactggtgatgtgtcacactcgggagttggcttttcagatcagcaaggaatatgagcgcttctctaaatacatgcccaatgtcaaggttgctgttttttttggtggtctgtctatcaagaaggatgaagaggtgctgaagaagaactgcccgcatatcgtcgtggggactccaggccgtatcctagccctggctcgaaataagagcctcaacctcaaacacattaaacactttattttggatgaatgtgataagatgcttgaacagctcgacatgcgtcgggatgtccaggaaatttttcgcatgaccccccacgagaagcaggtcatgatgttcagtgctaccttgagcaaagagatccgtccagtctgccgcaagttcatgcaagatccaatggagatcttcgtggatgatgagacgaagttgacgctgcatgggttgcagcagtactacgtgaaactgaaggacaacgagaagaaccggaagctctttgaccttctggatgtccttgagttcaaccaggtggtgatctttgtgaagtctgtgcagcggtgcattgccttggcccagctactagtggagcagaacttcccagccattgccatccaccgtgggatgccccaggaggagaggctttctcggtatcagcagtttaaagattttcaacgacgaattcttgtggctaccaacctatttggccgaggcatggacatcgagcgggtgaacattgcttttaattatgacatgcctgaggattctgacacctacctgcatcgggtggccagagcaggccggtttggcaccaagggcttggctatcacatttgtgtccgatgagaatgatgccaagatcctcaatgatgtgcaggatcgctttgaggtcaatattagtgagctgcctgatgagatagacatctcctcctacattgaacagacacggtagaagactcgcccattttggaatgtgaccgtctgtccttcaggagaggacaccagggtgggggtgaaggagacactactgcccccacccctgacagcccccaccccatggcttccatcttttgcatcaccaccactcctgaacccccatttctgatttgtcagaatttttttttaacaaaactaaaaatgaaacacatgtgtctgtggtatctataa

SEQ ID NO: 232078 - DNA, 539 bp, Artificial Sequence
  derived and/or modified sequence
gttgctgttttttttggtggtctgtctatcaagaaggatgaagaggtgctgaagaagaactgcccgcatatcgtcgtggggactccaggccgtatcctagccctggctcgaaataagagcctcaacctcaaacacattaaacactttattttggatgaatgtgataagatgcttgaacagctcgacatgcgtcgggatgtccaggaaatttttcgcatgaccccccacgagaagcaggtcatgatgttcagtgctaccttgagcaaagagatccgtccagtctgccgcaagttcatgcaagatccaatggagatcttcgtggatgatgagacgaagttgacgctgcatgggttgcagcagtactacgtgaaactgaaggacaacgagaagaaccggaagctctttgaccttctggatgtccttgagttcaaccaggtggtgatctttgtgaagtctgtgcagcggtgcattgccttggcccagctactagtggagcagaacttcccagccattgccatccaccgtgggatgccccagga

SEQ ID NO: 232079 - DNA, 192 bp, Artificial Sequence
  derived and/or modified sequence
tggccacactgcaacagctggagccagttactgggcaggtgtctgtactggtgatgtgtcacactcgggagttggcttttcagatcagcaaggaatatgagcgcttctctaaatacatgcccaatgtcaaggttgctgttttttttggtggtctgtctatcaagaaggatgaagaggtgctgaagaagaact

SEQ ID NO: 232080 - DNA, 75 bp, Artificial Sequence
  derived and/or modified sequence
tggccacactgcaacagctggagccagttactgggcaggtgtctgtactggtgatgtgtcacactcgggagttgg

SEQ ID NO: 232081 - DNA, 63 bp, Artificial Sequence
  derived and/or modified sequence
tggccacactgcaacagctggagccagttactgggcaggtgtctgtactggtgatgtgtcaca

SEQ ID NO: 232082 - DNA, 1224 bp, Artificial Sequence
  derived and/or modified sequence
tggccacactgcaacagctggagccagttactgggcaggtgtctgtactggtgatgtgtcacactcgggagttggcttttcagatcagcaaggaatatgagcgcttctctaaatacatgcccaatgtcaaggttgctgttttttttggtggtctgtctatcaagaaggatgaagaggtgctgaagaagaactgcccgcatatcgtcgtggggactccaggccgtatcctagccctggctcgaaataagagcctcaacctcaaacacattaaacactttattttggatgaatgtgataagatgcttgaacagctcgacatgcgtcgggatgtccaggaaatttttcgcatgaccccccacgagaagcaggtcatgatgttcagtgctaccttgagcaaagagatccgtccagtctgccgcaagttcatgcaagatccaatggagatcttcgtggatgatgagacgaagttgacgctgcatgggttgcagcagtactacgtgaaactgaaggacaacgagaagaaccggaagctctttgaccttctggatgtccttgagttcaaccaggtggtgatctttgtgaagtctgtgcagcggtgcattgccttggcccagctactagtggagcagaacttcccagccattgccatccaccgtgggatgccccaggaggagaggctttctcggtatcagcagtttaaagattttcaacgacgaattcttgtggctaccaacctatttggccgaggcatggacatcgagcgggtgaacattgcttttaattatgacatgcctgaggattctgacacctacctgcatcggtgctaccctctgtctccctccaggtggccagagcaggccggtttggcaccaagggcttggctatcacatttgtgtccgatgagaatgatgccaagatcctcaatgatgtgcaggatcgctttgaggtcaatattagtgagctgcctgatgagatagacatctcctcctacattgaacagacacggtagaagactcgcccattttggaatgtgaccgtctgtccttcaggagaggacaccagggtgggggtgaaggagacactactgcccccacccctgacagcccccaccccatggcttccatcttttgcatcaccaccactcctgaacccccatttctgatttgtcagaatttttttttaacaaaactaaaaatgaaacacatgtgtctgtggtatctataa

SEQ ID NO: 232083 - DNA, 817 bp, Artificial Sequence
  derived and/or modified sequence
accggaagtgaaggcagatttccctccttcgtcgctgttgctgccgccatacgcgctctccctgtttagatcccccttcccttcttcccctgccggcccagttatggcagagaacgatgtggacaatgagctcttggactatgaagatgatgaggtggagacagcagctgggggagatggggctgaggcccctgccaagaaggatgtcaagggctcctatgtctccatccacagctctggctttcgtgacttcctgctcaagccagagttgctccgggccattgtcgactgtggctttgagcatccgtcagaagtccagcatgagtgcatccctcaggccattctgggaatggatgtcctgtgccaggccaagtcgggcatgggaaagacagcagtgtttgtcttggccacactgcaacagctggagccagttactgggcaggtgtctgtgctggtgatgtgtcacactcgggagttggcttttcagatcagcaaggaatatgagcgcttctctaaatacatgcccaatgtcaaggttgctgttttttttggtggtctgtctatcaagaaggatgaagaggtgctgaagaagaactgcccgcatatcgtcgtggggactccaggccgtatcctagccctggctcgaaataagagcctcaacctcaaacacattaaacactttattttggatgaatgtgataagatgcttgaacagctcgacatgcgtcgggatgtccaggaaatttttcgcatgaccccccacgagaagcaggtcatgatgttcagtgctaccttgagcaaagagatccgtccagtc

SEQ ID NO: 232084 - DNA, 1005 bp, Artificial Sequence
  derived and/or modified sequence
ttggatttttctcaccttgacttggccaacttaatttggagtgccttccaagtgtttacgatacgattggtgtcattgtatgtttctccaaaaggagtctcaccttcgtagcgtaacagtgatgtgagaccacttgttatggcagagaacgatgtggacaatgagctcttggactatgaagatgatgaggtggagacagcagctgggggagatggggctgaggcccctgccaagaaggatgtcaagggctcctatgtctccatccacagctctggctttcgtgacttcctgctcaagccagagttgctccgggccattgtcgactgtggctttgagcatccgtcagaagtccagcatgagtgcatccctcaggccattctgggaatggatgtcctgtgccaggccaagtcgggcatgggaaagacagcagtgtttgtcttggccacactgcaacagctggagccagttactgggcaggtgtctgtgctggtgatgtgtcacactcgggagttggcttttcagatcagcaaggaatatgagcgcttctctaaatacatgcccaatgtcaaggttgctgttttttttggtggtctgtctatcaagaaggatgaagaggtgctgaagaagaactgcccgcatatcgtcgtggggactccaggccgtatcctagccctggctcgaaataagagcctcaacctcaaacacattaaacactttattttggatgaatgtgataagatgcttgaacagctcgacatgcgtcgggatgtccaggaaatttttcgcatgaccccccacgagaagcaggtcatgatgttcagtgctaccttgagcaaagagatccgtccagtctgccgcaagttcatgcaagatccaatggagatcttcgtggatgatgagacgaagttgacgctgcatgggttgcagcagtactacgtgaaactgaaggacaacgagaagaaccggaagctctttgaccttctggatgtccttgagttcaaccag

SEQ ID NO: 232085 - DNA, 2003 bp, Artificial Sequence
  derived and/or modified sequence
ctcagctagggcctgccggttcctagtgcgtgcccagcagtcctcaggtcaccttcactaccgggccaaggaccccgtgggaactcgcagccttcgccacactcgttcctcgcgcatccacggaggggtgcctacagagaagacctgcgtggcaaaaacctaaacgaagagatgaggggcatggagaggagtaggataagagaataaagataacagtgggggggagacgttagtttcctttatatattttgttactggcggtagcagtgaagttagaaacggttttaaaacaaatttcagacaggcattttccaaaggcaagcctggagcgcacggatctgtataaccgcggaaggccctgtttccggtcccttgcgcctgcgctcttgcagccaagaaggcgggaggctggagtagagggaagcctgcaaccggaagtgaaggcagatttccctccttcgtcgctgttgctgccgccatacgcgctctccctgtttagttatggcagagaacgatgtggacaatgagctcttggactatgaagatgatgaggtggagacagcagctgggggagatggggctgaggcccctgccaagaaggatgtcaagggctcctatgtctccatccacagctctggctttcgtgacttcctgctcaagccagagttgctccgggccattgtcgactgtggctttgagcatccgtcagaagtccagcatgagtgcatccctcaggccattctgggaatggatgtcctgtgccaggccaagtcgggcatgggaaagacagcagtgtttgtcttggccacactgcaacagctggagccagttactgggcaggtgtctgtgctggtgatgtgtcacactcgggagttggcttttcagatcagcaaggaatatgagcgcttctctaaatacatgcccaatgtcaaggttgctgttttttttggtggtctgtctatcaagaaggatgaagaggtgctgaagaagaactgcccgcatatcgtcgtggggactccaggccgtatcctagccctggctcgaaataagagcctcaacctcaaacacattaaacactttattttggatgaatgtgataagatgcttgaacagctcgacatgcgtcgggatgtccaggaaatttttcgcatgaccccccacgagaagcaggtcatgatgttcagtgctaccttgagcaaagagatccgtccagtctgccgcaagttcatgcaagatccaatggagatcttcgtggatgatgagacgaagttgacgctgcatgggttgcagcagtactacgtgaaactgaaggacaacgagaagaaccggaagctctttgaccttctggatgtccttgagttcaaccaggtggtgatctttgtgaagtctgtgcagcggtgcattgccttggcccagctactagtggagcagaacttcccagccattgccatccaccgtgggatgccccaggaggagaggctttctcggtatcagcagtttaaagattttcaacgacgaattcttgtggctaccaacctatttggccgaggcatggacatcgagcgggtgaacattgcttttaattatgacatgcctgaggattctgacacctacctgcatcgggtggccagagcaggccggtttggcaccaagggcttggctatcacatttgtgtccgatgagaatgatgccaagatcctcaatgatgtgcaggatcgctttgaggtcaatattagtgagctgcctgatgagatagacatctcctcctacattgaacagacacggtagaagactcgcccattttggaatgtgaccgtctgtccttcaggagaggacaccagggtgggggtgaaggagacactactgcccccacccctgacagcccccaccccatggcttccatcttttgcatcaccaccactcctgaacccccatttctgatttgtcagaatttttttttaacaaaactaaaaatgaaacacatgtgtctgtggtatctataa

SEQ ID NO: 232086 - DNA, 932 bp, Artificial Sequence
  derived and/or modified sequence
cttcgctacaatccgtttccatctgcgcttctccgcacccatcccgtcacatgggttcctgatacccttttcacaggcgatggtctggtcgctggggcctagttgctcttctgttagaaatagtatctttgttttcctttgctgttcctcaatcccctactcttcaccccttgttttcacctattttgcgagaacccatccagatcccccttcccttcttcccctgccggcccagttatggcagagaacgatgtggacaatgagctcttggactatgaagatgatgaggtggagacagcagctgggggagatggggctgaggcccctgccaagaaggatgtcaagggctcctatgtctccatccacagctctggctttcgtgacttcctgctcaagccagagttgctccgggccattgtcgactgtggctttgagcatccgtcagaagtccagcatgagtgcatccctcaggccattctgggaatggatgtcctgtgccaggccaagtcgggcatgggaaagacagcagtgtttgtcttggccacactgcaacagctggagccagttactgggcaggtgtctgtactggtgatgtgtcacactcgggagttggcttttcagatcagcaaggaatatgagcgcttctctaaatacatgcccaatgtcaaggttgctgttttttttggtggtctgtctatcaagaaggatgaagaggtgctgaagaagaactgcccgcatatcgtcgtggggactccaggccgtatcctagccctggctcgaaataagagcctcaacctcaaacacattaaacactttattttggatgaatgtgataagatgcttgaacagctcgacatgcgtcgggatgtccaggaaatttttcgcatgaccccccacgagaagcaggtcatgatgttcagtgctaccttgag

SEQ ID NO: 232087 - DNA, 2133 bp, Artificial Sequence
  derived and/or modified sequence
ctcagctagggcctgccggttcctagtgcgtgcccagcagtcctcaggtcaccttcactaccgggccaaggaccccgtgggaactcgcagccttcgccacactcgttcctcgcgcatccacggaggggtgcctacagagaagacctgcgtggcaaaaacctaaacgaagagatgaggggcatggagaggagtaggataagagaataaagataacagtggggggcagacgttagtttcctttatatcttttgttactggcggtagcagtgaagttagaaacggttttaaaacaaatttcagacaggcattttccaaaggcaagcctggagcgcacggatctgtataaccgcggaaggccctgtttccggtcccttgcgcctgcgctcttgcagccaagaaggcgggaggctggagtagagggaagcctgcaaccggaagtgaaggcagatttccctccttcgtcgctgttgctgccgccatacgcgctctccctgtttagctcttctgttagaaatagtatctttgttttcctttgctgttcctcaatcccctactcttcaccccttgttttcacctattttgcgagaacccatccagatcccccttcccttcttcccctgccggcccagttatggcagagaacgatgtggacaatgagctcttggactatgaagatgatgaggtggagacagcagctgggggagatggggctgaggcccctgccaagaaggatgtcaagggctcctatgtctccatccacagctctggctttcgtgacttcctgctcaagccagagttgctccgggccattgtcgactgtggctttgagcatccgtcagaagtccagcatgagtgcatccctcaggccattctgggaatggatgtcctgtgccaggccaagtcgggcatgggaaagacagcagtgtttgtcttggccacactgcaacagctggagccagttactgggcaggtgtctgtgctggtgatgtgtcacactcgggagttggcttttcagatcagcaaggaatatgagcgcttctctaaatacatgcccaatgtcaaggttgctgttttttttggtggtctgtctatcaagaaggatgaagaggtgctgaagaagaactgcccgcatatcgtcgtggggactccaggccgtatcctagccctggctcgaaataagagcctcaacctcaaacacattaaacactttattttggatgaatgtgataagatgcttgaacagctcgacatgcgtcgggatgtccaggaaatttttcgcatgaccccccacgagaagcaggtcatgatgttcagtgctaccttgagcaaagagatccgtccagtctgccgcaagttcatgcaagatccaatggagatcttcgtggatgatgagacgaagttgacgctgcatgggttgcagcagtactacgtgaaactgaaggacaacgagaagaaccggaagctctttgaccttctggatgtccttgagttcaaccaggtggtgatctttgtgaagtctgtgcagcggtgcattgccttggcccagctactagtggagcagaacttcccagccattgccatccaccgtgggatgccccaggaggagaggctttctcggtatcagcagtttaaagattttcaacgacgaattcttgtggctaccaacctatttggccgaggcatggacatcgagcgggtgaacattgcttttaattatgacatgcctgaggattctgacacctacctgcatcgggtggccagagcaggccggtttggcaccaagggcttggctatcacatttgtgtccgatgagaatgatgccaagatcctcaatgatgtgcaggatcgctttgaggtcaatattagtgagctgcctgatgagatagacatctcctcctacattgaacagacacggtagaagactcgcccattttggaatgtgaccgtctgtccttcaggagaggacaccagggtgggggtgaaggagacactactgcccccacccctgacagcccccaccccatggcttccatcttttgcatcaccaccactcctgaacccccatttctgatttgtcagaatttttttttaacaaaactaaaaatgaaacacatgtgtctgtggtatctataa

SEQ ID NO: 232088 - DNA, 867 bp, Artificial Sequence
  derived and/or modified sequence
agatttccctccttcgtcgctgttgctgccgccatacgcgctctccctgtttagctcttctgttagaaatagtatctttgttttcctttgctgttcctcaatcccctactcttcaccccttgttttcacctattttgcgagaacccatccagatcccccttcccttcttcccctgccggcccagttatggcagagaacgatgtggacaatgagctcttggactatgaagatgatgaggtggagacagcagctgggggagatggggctgaggcccctgccaagaaggatgtcaagggctcctatgtctccatccacagctctggctttcgtgacttcctgctcaagccagagttgctccgggccattgtcgactgtggctttgagcatccgtcagaagtccagcatgagtgcatccctcaggccattctgggaatggatgtcctgtgccaggccaagtcgggcatgggaaagacagcagtgtttgtcttggccacactgcaacagctggagccagttactgggcagagccatgagcacatgacctctgttacccttgacaacctgacagctgtgggggatgttctgtcgcaagcgtggggttcatgatttagatcacataattgaagtcatttattatcggcccaggtgtctgtactggtgatgtgtcacactcgggagttggcttttcagatcagcaaggaatatgagcgcttctctaaatacatgcccaatgtcaaggttgctgttttttttggtggtctgtctatcaagaaggatgaagaggtgctgaagaagaactgcccgcatatcgtcgtggggactccaggccgtatcctagccctggctcgaaataagagcctcaacctc

SEQ ID NO: 232089 - DNA, 96 bp, Artificial Sequence
  derived and/or modified sequence
tggccacactgcaacagctggagccagttactgggcaggtgtgtttttgtgacagtcacttccctagaggggataatgaagagctacatttaccat

SEQ ID NO: 232090 - DNA, 2133 bp, Artificial Sequence
  derived and/or modified sequence
ctcagctagggcctgccggttcctagtgcgtgcccagcagtcctcaggtcaccttcactaccgggccaaggaccccgtgggaactcgcagccttcgccacactcgttcctcgcgcatccacggaggggtgcctacagagaagacctgcgtggcaaaaacctaaacgaagagatgaggggcatggagaggagtaggataagagaataaagataacagtgggggggagacgttagtttcctttatatattttgttactggcggtagcagtgaagttagaaacggttttaaaacaaatttcagacaggcattttccaaaggcaagcctggagcgcacggatctgtataaccgcggaaggccctgtttccggtcccttgcgcctgcgctcttgcagccaagaaggcgggaggctggagtagagggaagcctgcaaccggaagtgaaggcagatttccctccttcgtcgctgttgctgccgccatacgcgctctccctgtttagctcttctgttagaaatagtatctttgttttcctttgctgttcctcaatcccctactcttcaccccttgttttcacctattttgcgagaacccatccagatcccccttcccttcttcccctgccggcccagttatggcagagaacgatgtggacaatgagctcttggactatgaagatgatgaggtggagacagcagctgggggagatggggctgaggcccctgccaagaaggatgtcaagggctcctatgtctccatccacagctctggctttcgtgacttcctgctcaagccagagttgctccgggccattgtcgactgtggctttgagcatccgtcagaagtccagcatgagtgcatccctcaggccattctgggaatggatgtcctgtgccaggccaagtcgggcatgggaaagacagcagtgtttgtcttggccacactgcaacagctggagccagttactgggcaggtgtctgtgctggtgatgtgtcacactcgggagttggcttttcagatcagcaaggaatatgagcgcttctctaaatacatgcccaatgtcaaggttgctgttttttttggtggtctgtctatcaagaaggatgaagaggtgctgaagaagaactgcccgcatatcgtcgtggggactccaggccgtatcctagccctggctcgaaataagagcctcaacctcaaacacattaaacactttattttggatgaatgtgataagatgcttgaacagctcgacatgcgtcgggatgtccaggaaatttttcgcatgaccccccacgagaagcaggtcatgatgttcagtgctaccttgagcaaagagatccgtccagtctgccgcaagttcatgcaagatccaatggagatcttcgtggatgatgagacgaagttgacgctgcatgggttgcagcagtactacgtgaaactgaaggacaacgagaagaaccggaagctctttgaccttctggatgtccttgagttcaaccaggtggtgatctttgtgaagtctgtgcagcggtgcattgccttggcccagctactagtggagcagaacttcccagccattgccatccaccgtgggatgccccaggaggagaggctttctcggtatcagcagtttaaagattttcaacgacgaattcttgtggctaccaacctatttggccgaggcatggacatcgagcgggtgaacattgcttttaattatgacatgcctgaggattctgacacctacctgcatcgggtggccagagcaggccggtttggcaccaagggcttggctatcacatttgtgtccgatgagaatgatgccaagatcctcaatgatgtgcaggatcgctttgaggtcaatattagtgagctgcctgatgagatagacatctcctcctacattgaacagacacggtagaagactcgcccattttggaatgtgaccgtctgtccttcaggagaggacaccagggtgggggtgaaggagacactactgcccccacccctgacagcccccaccccatggcttccatcttttgcatcaccaccactcctgaacccccatttctgatttgtcagaatttttttttaacaaaactaaaaatgaaacacatgtgtctgtggtatctataa

SEQ ID NO: 232091 - DNA, 659 bp, Artificial Sequence
  derived and/or modified sequence
cccttttcacaggcgatggtctggtcgctggggcctagttggttcgctatttccttagcttgcatccctttcgagagcaaagagctcctgggggaaggaagggaagctaaggggggacccaatccaagatggtgtcctcggcgccattgtgttcgttttgctcccttcttccaatgggttcttctcatattggaggcctcagcatcaatgagaggcggcgctcggcgtcccttggtcttgctcttctgttagaaatagtatctttgttttcctttgctgttcctcaatcccctactcttcaccccttgttttcacctattttgcgagaacccatccagatcccccttcccttcttcccctgccggcccagttatggcagagaacgatgtggacaatgagctcttggactatgaagatgatgaggtggagacagcagctgggggagatggggctgaggcccctgccaagaaggatgtcaagggctcctatgtctccatccacagctctggctttcgtgacttcctgctcaagccagagttgctccgggccattgtcgactgtggctttgagcatccgtcagaagtccagcatgagtgcatccctcaggccattctgggaatggatgtcctgtgccaggccaagtcgggcatgggaaagac

SEQ ID NO: 232092 - DNA, 817 bp, Artificial Sequence
  derived and/or modified sequence
accggaagtgaaggcacatttccctccttcgtcgctgttgctgccgccatacgcgctctccctgtttagatcccccttcccttcttcccctgccggcccagttatggcagagaacgatgtggacaatgagctcttggactatgaagatgatgaggtggagacagcagctgggggagatggggctgaggcccctgccaagaaggatgtcaagggctcctatgtctccatccacagctctggctttcgtgacttcctgctcaagccagagttgctccgggccattgtcgactgtggctttgagcatccgtcagaagtccagcatgagtgcatccctcaggccattctgggaatggatgtcctgtgccaggccaagtcgggcatgggaaagacagcagtgtttgtcttggccacactgcaacagctggagccagttactgggcaggtgtctgtgctggtgatgtgtcacactcgggagttggcttttcagatcagcaaggaatatgagcgcttctctaaatacatgcccaatgtcaaggttgctgttttttttggtggtctgtctatcaagaaggatgaagaggtgctgaagaagaactgcccgcatatcgtcgtggggactccaggccgtatcctagccctggctcgaaataagagcctcaacctcaaacacattaaacactttattttggatgaatgtgataagatgcttgaacagctcgacatgcgtcgggatgtccaggaaatttttcgcatgaccccccacgagaagcaggtcatgatgttcagtgctaccttgagcaaagagatccgtccagtc

SEQ ID NO: 232093 - DNA, 413 bp, Artificial Sequence
  derived and/or modified sequence
tggccacactgcaacagctggagccagttactgggcaggtgtctgtactggtgatgtgtcacactcgggagttggcttttcagatcagcaaggaatatgagcgcttctctaaatacatgcccaatgtcaaggttgctgttttttttggtggtctgtctatcaagaaggatgaagaggtgctgaagaagaactgcccgcatatcgtcgtggggactccaggccgtatcctagccctggctcgaaataagagcctcaacctcaaacacattaaacactttattttggatgaatgtgataagatgcttgaacagctcgacatgcgtcgggatgtccaggaaatttttcgcatgaccccccacgagaagcaggtcatgatgttcagtgctaccttgagcaaagagatccgtccagtc

SEQ ID NO: 232094 - DNA, 2003 bp, Artificial Sequence
  derived and/or modified sequence
ctcagctagggcctgccggttcctagtgcgtgcccagcagtcctcaggtcaccttcactaccgggccaaggaccccgtgggaactcgcagccttcgccacactcgttcctcgcgcatccacggaggggtgcctacagagaagacctgcgtggcaaaaacctaaacgaagagatgaggggcatggagaggagtaggataagagaataaagataacagtgggggggagacgttagtttcctttatatcttttgttactggcggtagcagtgaagttagaaacggttttaaaacaaatttcagacaggcattttccaaaggcaagcctggagcgcacggatctgtataaccgcggaaggccctgtttccggtcccttgcgcctgcgctcttgcagccaagaaggcgggaggctggagtagagggaagcctgcaaccggaagtgaaggcacatttccctccttcgtcgctgttgctgccgccatacgcgctctccctgtttagttatggcagagaacgatgtggacaatgagctcttggactatgaagatgatgaggtggagacagcagctgggggagatggggctgaggcccctgccaagaaggatgtcaagggctcctatgtctccatccacagctctggctttcgtgacttcctgctcaagccagagttgctccgggccattgtcgactgtggctttgagcatccgtcagaagtccagcatgagtgcatccctcaggccattctgggaatggatgtcctgtgccaggccaagtcgggcatgggaaagacagcagtgtttgtcttggccacactgcaacagctggagccagttactgggcaggtgtctgtgctggtgatgtgtcacactcgggagttggcttttcagatcagcaaggaatatgagcgcttctctaaatacatgcccaatgtcaaggttgctgttttttttggtggtctgtctatcaagaaggatgaagaggtgctgaagaagaactgcccgcatatcgtcgtggggactccaggccgtatcctagccctggctcgaaataagagcctcaacctcaaacacattaaacactttattttggatgaatgtgataagatgcttgaacagctcgacatgcgtcgggatgtccaggaaatttttcgcatgaccccccacgagaagcaggtcatgatgttcagtgctaccttgagcaaagagatccgtccagtctgccgcaagttcatgcaagatccaatggagatcttcgtggatgatgagacgaagttgacgctgcatgggttgcagcagtactacgtgaaactgaaggacaacgagaagaaccggaagctctttgaccttctggatgtccttgagttcaaccaggtggtgatctttgtgaagtctgtgcagcggtgcattgccttggcccagctactagtggagcagaacttcccagccattgccatccaccgtgggatgccccaggaggagaggctttctcggtatcagcagtttaaagattttcaacgacgaattcttgtggctaccaacctatttggccgaggcatggacatcgagcgggtgaacattgcttttaattatgacatgcctgaggattctgacacctacctgcatcgggtggccagagcaggccggtttggcaccaagggcttggctatcacatttgtgtccgatgagaatgatgccaagatcctcaatgatgtgcaggatcgctttgaggtcaatattagtgagctgcctgatgagatagacatctcctcctacattgaacagacacggtagaagactcgcccattttggaatgtgaccgtctgtccttcaggagaggacaccagggtgggggtgaaggagacactactgcccccacccctgacagcccccaccccatggcttccatcttttgcatcaccaccactcctgaacccccatttctgatttgtcagaatttttttttaacaaaactaaaaatgaaacacatgtgtctgtggtatctataa

SEQ ID NO: 232095 - DNA, 290 bp, Artificial Sequence
  derived and/or modified sequence
tggccacactgcaacagctggagccagttactgggcaggtgtgtttttgtgacagtcacttccctagaggggataatgaagagctacatttaccatatgtctccgtctacttcctgcctaaggtgtctgtactggtgatgtgtcacactcgggagttggcttttcagatcagcaaggaatatgagcgcttctctaaatacatgcccaatgtcaaggttgctgttttttttggtggtctgtctatcaagaaggatgaagaggtgctgaagaagaactgcccgcatatcgtc

SEQ ID NO: 232096 - DNA, 1603 bp, Artificial Sequence
  derived and/or modified sequence
ctcagctagggcctgccggttcctagtgcgtgcccagcagtcctcaggtcaccttcactaccgggccaaggaccccgtgggaactcgcagccttcgccacactcgttcctcgcgcatccacggaggggtgcctacagagaagacctgcgtggcaaaaacctaaacgaagagatgaggggcatggagaggagtaggataagagaataaagataacagtgggggggagacgttagtttcctttatatattttgttactggcggtagcagtgaagttagaaacggttttaaaacaaatttcagacaggcattttccaaaggcaagcctggagcgcacggatctgtataaccgcggaaggccctgtttccggtcccttgcgcctgcgctcttgcagccaagaaggcgggaggctggagtagagggaagcctgcaaccggaagtgaaggcagatttccctccttcgtcgctgttgctgccgccatacgcgctctccctgtttagctcttctgttagaaatagtatctttgttttcctttgctgttcctcaatcccctactcttcaccccttgttttcacctattttgcgagaacccatccagatcccccttcccttcttcccctgccggcccagttatggcagagaacgatgtggacaatgagctcttggactatgaagatgatgaggtggagacagcagctgggggagatggggctgaggcccctgccaagaaggatgtcaagggctcctatgtctccatccacagctctggctttcgtgacttcctgctcaagccagagttgctccgggccattgtcgactgtggctttgagcatccgtcagaagtccagcatgagtgcatccctcaggccattctgggaatggatgtcctgtgccaggccaagtcgggcatgggaaagacagcagtgtttgtcttggccacactgcaacagctggagccagttactgggcaggtgtctgtgctggtgatgtgtcacactcgggagttggcttttcagatcagcaaggaatatgagcgcttctctaaatacatgcccaatgtcaaggttgctgttttttttggtggtctgtctatcaagaaggatgaagaggtgctgaagaagaactgcccgcatatcgtcgtggggactccaggccgtatcctagccctggctcgaaataagagcctcaacctcaaacacattaaacactttattttggatgaatgtgataagatgcttgaacagctcgacatgcgtcgggatgtccaggaaatttttcgcatgaccccccacgagaagcaggtcatgatgttcagtgctaccttgagcaaagagatccgtccagtctgccgcaagttcatgcaagatccaatggagatcttcgtggatgatgagacgaagttgacgctgcatgggttgcagcagtactacgtgaaactgaaggacaacgagaagaaccggaagctctttgaccttctggatgtccttgagttcaaccaggaaatcacatgtaagtctgtgcagcgattttcaacgacgaattcttgtggctaccaacctatttggccgaggcatggacatcgagcgggtgaacattgcttttaa

SEQ ID NO: 232097 - DNA, 1603 bp, Artificial Sequence
  derived and/or modified sequence
ctcagctagggcctgccggttcctagtgcgtgcccagcagtcctcaggtcaccttcactaccgggccaaggaccccgtgggaactcgcagccttcgccacactcgttcctcgcgcatccacggaggggtgcctacagagaagacctgcgtggcaaaaacctaaacgaagagatgaggggcatggagaggagtaggataagagaataaagataacagtggggggcagacgttagtttcctttatatcttttgttactggcggtagcagtgaagttagaaacggttttaaaacaaatttcagacaggcattttccaaaggcaagcctggagcgcacggatctgtataaccgcggaaggccctgtttccggtcccttgcgcctgcgctcttgcagccaagaaggcgggaggctggagtagagggaagcctgcaaccggaagtgaaggcagatttccctccttcgtcgctgttgctgccgccatacgcgctctccctgtttagctcttctgttagaaatagtatctttgttttcctttgctgttcctcaatcccctactcttcaccccttgttttcacctattttgcgagaacccatccagatcccccttcccttcttcccctgccggcccagttatggcagagaacgatgtggacaatgagctcttggactatgaagatgatgaggtggagacagcagctgggggagatggggctgaggcccctgccaagaaggatgtcaagggctcctatgtctccatccacagctctggctttcgtgacttcctgctcaagccagagttgctccgggccattgtcgactgtggctttgagcatccgtcagaagtccagcatgagtgcatccctcaggccattctgggaatggatgtcctgtgccaggccaagtcgggcatgggaaagacagcagtgtttgtcttggccacactgcaacagctggagccagttactgggcaggtgtctgtgctggtgatgtgtcacactcgggagttggcttttcagatcagcaaggaatatgagcgcttctctaaatacatgcccaatgtcaaggttgctgttttttttggtggtctgtctatcaagaaggatgaagaggtgctgaagaagaactgcccgcatatcgtcgtggggactccaggccgtatcctagccctggctcgaaataagagcctcaacctcaaacacattaaacactttattttggatgaatgtgataagatgcttgaacagctcgacatgcgtcgggatgtccaggaaatttttcgcatgaccccccacgagaagcaggtcatgatgttcagtgctaccttgagcaaagagatccgtccagtctgccgcaagttcatgcaagatccaatggagatcttcgtggatgatgagacgaagttgacgctgcatgggttgcagcagtactacgtgaaactgaaggacaacgagaagaaccggaagctctttgaccttctggatgtccttgagttcaaccaggaaatcacatgtaagtctgtgcagcgattttcaacgacgaattcttgtggctaccaacctatttggccgaggcatggacatcgagcgggtgaacattgcttttaa

SEQ ID NO: 232098 - DNA, 1571 bp, Artificial Sequence
  derived and/or modified sequence
cgccatacgcgctctccctgtttagttatggcagagaacgatgtggacaatgagctcttggactatgaagatgatgaggtggagacagcagctgggggagatggggctgaggcccctgccaagaaggatgtcaagggctcctatgtctccatccacagctctggctttcgtgacttcctgctcaagccagagttgctccgggccattgtcgactgtggctttgagcatccgtcagaagtccagcatgagtgcatccctcaggccattctgggaatggatgtcctgtgccaggccaagtcgggcatgggaaagacagcagtgtttgtcttggccacactgcaacagctggagccagttactgggcaggtatatttggggagagtgctggggaggggattttggtgtgtttttgtgtctgtgctggtgatgtgtcacactcgggagttggcttttcagatcagcaaggaatatgagcgcttctctaaatacatgcccaatgtcaaggttgctgttttttttggtggtctgtctatcaagaaggatgaagaggtgctgaagaagaactgcccgcatatcgtcgtggggactccaggccgtatcctagccctggctcgaaataagagcctcaacctcaaacacattaaacactttattttggatgaatgtgataagatgcttgaacagctcgacatgcgtcgggatgtccaggaaatttttcgcatgaccccccacgagaagcaggtcatgatgttcagtgctaccttgagcaaagagatccgtccagtctgccgcaagttcatgcaagatccaatggagatcttcgtggatgatgagacgaagttgacgctgcatgggttgcagcagtactacgtgaaactgaaggacaacgagaagaaccggaagctctttgaccttctggatgtccttgagttcaaccaggtggtgatctttgtgaagtctgtgcagcggtgcattgccttggcccagctactagtggagcagaacttcccagccattgccatccaccgtgggatgccccaggaggagaggctttctcggtatcagcagtttaaagattttcaacgacgaattcttgtggctaccaacctatttggccgaggcatggacatcgagcgggtgaacattgcttttaattatgacatgcctgaggattctgacacctacctgcatcgggtggccagagcaggccggtttggcaccaagggcttggctatcacatttgtgtccgatgagaatgatgccaagatcctcaatgatgtgcaggatcgctttgaggtcaatattagtgagctgcctgatgagatagacatctcctcctacattgaacagacacggtagaagactcgcccattttggaatgtgaccgtctgtccttcaggagaggacaccagggtgggggtgaaggagacactactgcccccacccctgacagcccccaccccatggcttccatcttttgcatcaccaccactcctgaacccccatttctgatttgtcagaatttttttttaacaaaactaaaaatgaaacacatgtgtctgtggtatcta

SEQ ID NO: 232099 - DNA, 1552 bp, Artificial Sequence
  derived and/or modified sequence
cgctgttgctgccgccatacgcgctctccctgtttagttatggcagagaacgatgtggacaatgagctcttggactatgaagatgatgaggtggagacagcagctgggggagatggggctgaggcccctgccaagaaggatgtcaagggctcctatgtctccatccacagctctggctttcgtgacttcctgctcaagccagagttgctccgggccattgtcgactgtggctttgagcatccgtcagaagtccagcatgagtgcatccctcaggccattctgggaatggatgtcctgtgccaggccaagtcgggcatgggaaagacagcagtgtttgtcttggccacactgcaacagctggagccagttactgggcaggtatatttggggagagtgctggggaggggattttggtgtgtttttgtgtctgtgctggtgatgtgtcacactcgggagttggcttttcagatcagcaaggaatatgagcgcttctctaaatacatgcccaatgtcaaggttgctgttttttttggtggtctgtctatcaagaaggatgaagaggtgctgaagaagaactgcccgcatatcgtcgtggggactccaggccgtatcctagccctggctcgaaataagagcctcaacctcaaacacattaaacactttattttggatgaatgtgataagatgcttgaacagctcgacatgcgtcgggatgtccaggaaatttttcgcatgaccccccacgagaagcaggtcatgatgttcagtgctaccttgagcaaagagatccgtccagtctgccgcaagttcatgcaagatccaatggagatcttcgtggatgatgagacgaagttgacgctgcatgggttgcagcagtactacgtgaaactgaaggacaacgagaagaaccggaagctctttgaccttctggatgtccttgagttcaaccaggtggtgatctttgtgaagtctgtgcagcggtgcattgccttggcccagctactagtggagcagaacttcccagccattgccatccaccgtgggatgccccaggaggagaggctttctcggtatcagcagtttaaagattttcaacgacgaattcttgtggctaccaacctatttggccgaggcatggacatcgagcgggtgaacattgcttttaattatgacatgcctgaggattctgacacctacctgcatcgggtggccagagcaggccggtttggcaccaagggcttggctatcacatttgtgtccgatgagaatgatgccaagatcctcaatgatgtgcaggatcgctttgaggtcaatattagtgagctgcctgatgagatagacatctcctcctacattgaacagacacggtagaagactcgcccattttggaatgtgaccgtctgtccttcaggagaggacaccagggtgggggtgaaggagacactactgcccccacccctgacagcccccaccccatggcttccatcttttgcatcaccaccactcctgaacccccatttctgatttgtcagaatttttttttaacaaaact

SEQ ID NO: 232100 - DNA, 867 bp, Artificial Sequence
  derived and/or modified sequence
agatttccctccttcgtcgctgttgctgccgccatacgcgctctccctgtttagctcttctgttagaaatagtatctttgttttcctttgctgttcctcaatcccctactcttcaccccttgttttcacctattttgcgagaacccatccagatcccccttcccttcttcccctgccggcccagttatggcagagaacgatgtggacaatgagctcttggactatgaagatgatgaggtggagacagcagctgggggagatggggctgaggcccctgccaagaaggatgtcaagggctcctatgtctccatccacagctctggctttcgtgacttcctgctcaagccagagttgctccgggccattgtcgactgtggctttgagcatccgtcagaagtccagcatgagtgcatccctcaggccattctgggaatggatgtcctgtgccaggccaagtcgggcatgggaaagacagcagtgtttgtcttggccacactgcaacagctggagccagttactgggcagagccatgagcacatgacctctgttacccttgacaacctgacagctgtgggggatgttctgtcgcaagcgtggggttcatgatttagatcacagaattgaagtcatttattatcggcccaggtgtctgtgctggtgatgtgtcacactcgggagttggcttttcagatcagcaaggaatatgagcgcttctctaaatacatgcccaatgtcaaggttgctgttttttttggtggtctgtctatcaagaaggatgaagaggtgctgaagaagaactgcccgcatatcgtcgtggggactccaggccgtatcctagccctggctcgaaataagagcctcaacctc

SEQ ID NO: 232101 - DNA, 1011 bp, Artificial Sequence
  derived and/or modified sequence
cgctgttgctgccgccatacgcgctctccctgtttagttatggcagagaacgatgtggacaatgagctcttggactatgaagatgatgaggtggagacagcagctgggggagatggggctgaggcccctgccaagaaggatgtcaagggctcctatgtctccatccacagctctggctttcgtgacttcctgctcaagccagagttgctccgggccattgtcgactgtggctttgagcatccgtcagaagtccagcatgagtgcatccctcaggccattctgggaatggatgtcctgtgccaggccaagtcgggcatgggaaagacagcagtgtttgtcttggccacactgcaacagctggagccagttactgggcaggtgtctgtgctggtgatgtgtcacactcgggagttggcttttcagatcagcaaggaatatgagcgcttctctaaatacatgcccaatgtcaaggttgctgttttttttggtggtctgtctatcaagaaggatgaagaggtgctgaagaagaactgcccgcatatcgtcgtggggactccaggccgtatcctagccctggctcgaaataagagcctcaacctcaaacacattaaacactttattttggatgaatgtgataagatgcttgaacagctcgacatgcgtcgggatgtccaggaaatttttcgcatgaccccccacgagaagcaggtcatgatgttcagtgctaccttgagcaaagagatccgtccagtctgccgcaagttcatgcaagatccaatggagatcttcgtggatgatgagacgaagttgacgctgcatgggttgcagcagtactacgtgaaactgaaggacaacgagaagaaccggaagctctttgaccttctggatgtccttgagttcaaccaggaaatcacatgtaagtctgtgcagcgattttcaacgacgaattcttgtggctaccaacctatttggccgaggcatggacatcgagcgggtgaacattgcttttaa

SEQ ID NO: 232102 - DNA, 2178 bp, Artificial Sequence
  derived and/or modified sequence
ctcagctagggcctgccggttcctagtgcgtgcccagcagtcctcaggtcaccttcactaccgggccaaggaccccgtgggaactcgcagccttcgccacactcgttcctcgcgcatccacggaggggtgcctacagagaagacctgcgtggcaaaaacctaaacgaagagatgaggggcatggagaggagtaggataagagaataaagataacagtggggggcagacgttagtttcctttatatcttttgttactggcggtagcagtgaagttagaaacggttttaaaacaaatttcagacaggcattttccaaaggcaagcctggagcgcacggatctgtataaccgcggaaggccctgtttccggtcccttgcgcctgcgctcttgcagccaagaaggcgggaggctggagtagagggaagcctgcaaccggaagtgaaggcagatttccctccttcgtcgctgttgctgccgccatacgcgctctccctgtttagctcttctgttagaaatagtatctttgttttcctttgctgttcctcaatcccctactcttcaccccttgttttcacctattttgcgagaacccatccagatcccccttcccttcttcccctgccggcccagttatggcagagaacgatgtggacaatgagctcttggactatgaagatgatgaggtggagacagcagctgggggagatggggctgaggcccctgccaagaaggatgtcaagggctcctatgtctccatccacagctctggctttcgtgacttcctgctcaagccagagttgctccgggccattgtcgactgtggctttgagcatccgtcagaagtccagcatgagtgcatccctcaggccattctgggaatggatgtcctgtgccaggccaagtcgggcatgggaaagacagcagtgtttgtcttggccacactgcaacagctggagccagttactgggcaggtatatttggggagagtgctggggaggggattttggtgtgtttttgtgtctgtgctggtgatgtgtcacactcgggagttggcttttcagatcagcaaggaatatgagcgcttctctaaatacatgcccaatgtcaaggttgctgttttttttggtggtctgtctatcaagaaggatgaagaggtgctgaagaagaactgcccgcatatcgtcgtggggactccaggccgtatcctagccctggctcgaaataagagcctcaacctcaaacacattaaacactttattttggatgaatgtgataagatgcttgaacagctcgacatgcgtcgggatgtccaggaaatttttcgcatgaccccccacgagaagcaggtcatgatgttcagtgctaccttgagcaaagagatccgtccagtctgccgcaagttcatgcaagatccaatggagatcttcgtggatgatgagacgaagttgacgctgcatgggttgcagcagtactacgtgaaactgaaggacaacgagaagaaccggaagctctttgaccttctggatgtccttgagttcaaccaggtggtgatctttgtgaagtctgtgcagcggtgcattgccttggcccagctactagtggagcagaacttcccagccattgccatccaccgtgggatgccccaggaggagaggctttctcggtatcagcagtttaaagattttcaacgacgaattcttgtggctaccaacctatttggccgaggcatggacatcgagcgggtgaacattgcttttaattatgacatgcctgaggattctgacacctacctgcatcgggtggccagagcaggccggtttggcaccaagggcttggctatcacatttgtgtccgatgagaatgatgccaagatcctcaatgatgtgcaggatcgctttgaggtcaatattagtgagctgcctgatgagatagacatctcctcctacattgaacagacacggtagaagactcgcccattttggaatgtgaccgtctgtccttcaggagaggacaccagggtgggggtgaaggagacactactgcccccacccctgacagcccccaccccatggcttccatcttttgcatcaccaccactcctgaacccccatttctgatttgtcagaatttttttttaacaaaactaaaaatgaaacacatgtgtctgtggtatctataa

SEQ ID NO: 232103 - DNA, 1603 bp, Artificial Sequence
  derived and/or modified sequence
ctcagctagggcctgccggttcctagtgcgtgcccagcagtcctcaggtcaccttcactaccgggccaaggaccccgtgggaactcgcagccttcgccacactcgttcctcgcgcatccatggaggggtgcctacagagaagacctgcgtggcaaaaacctaaacgaagagatgaggggcatggagaggagtaggataagagaataaagataacagtgggggggagacgttagtttcctttatatcttttgttactggcggtagcagtgaagttagaaacggttttaaaacaaatttcagacaggcattttccaaaggcaagcctggagcgcacggatctgtataaccgcggaaggccctgtttccggtcccttgcgcctgcgctcttgcagccaagaaggcgggaggctggagtagagggaagcctgcaaccggaagtgaaggcagatttccctccttcgtcgctgttgctgccgccatacgcgctctccctgtttagctcttctgttagaaatagtatctttgttttcctttgctgttcctcaatcccctactcttcaccccttgttttcacctattttgcgagaacccatccagatcccccttcccttcttcccctgccggcccagttatggcagagaacgatgtggacaatgagctcttggactatgaagatgatgaggtggagacagcagctgggggagatggggctgaggcccctgccaagaaggatgtcaagggctcctatgtctccatccacagctctggctttcgtgacttcctgctcaagccagagttgctccgggccattgtcgactgtggctttgagcatccgtcagaagtccagcatgagtgcatccctcaggccattctgggaatggatgtcctgtgccaggccaagtcgggcatgggaaagacagcagtgtttgtcttggccacactgcaacagctggagccagttactgggcaggtgtctgtactggtgatgtgtcacactcgggagttggcttttcagatcagcaaggaatatgagcgcttctctaaatacatgcccaatgtcaaggttgctgttttttttggtggtctgtctatcaagaaggatgaagaggtgctgaagaagaactgcccgcatatcgtcgtggggactccaggccgtatcctagccctggctcgaaataagagcctcaacctcaaacacattaaacactttattttggatgaatgtgataagatgcttgaacagctcgacatgcgtcgggatgtccaggaaatttttcgcatgaccccccacgagaagcaggtcatgatgttcagtgctaccttgagcaaagagatccgtccagtctgccgcaagttcatgcaagatccaatggagatcttcgtggatgatgagacgaagttgacgctgcatgggttgcagcagtactacgtgaaactgaaggacaacgagaagaaccggaagctctttgaccttctggatgtccttgagttcaaccaggaaatcacatgtaagtctgtgcagcgattttcaacgacgaattcttgtggctaccaacctatttggccgaggcatggacatcgagcgggtgaacattgcttttaa

SEQ ID NO: 232104 - DNA, 867 bp, Artificial Sequence
  derived and/or modified sequence
agatttccctccttcgtcgctgttgctgccgccatacgcgctctccctgtttagctcttctgttagaaatagtatctttgttttcctttgctgttcctcaatcccctactcttcaccccttgttttcacctattttgcgagaacccatccagatcccccttcccttcttcccctgccggcccagttatggcagagaacgatgtggacaatgagctcttggactatgaagatgatgaggtggagacagcagctgggggagatggggctgaggcccctgccaagaaggatgtcaagggctcctatgtctccatccacagctctggctttcgtgacttcctgctcaagccagagttgctccgggccattgtcgactgtggctttgagcatccgtcagaagtccagcatgagtgcatccctcaggccattctgggaatggatgtcctgtgccaggccaagtcgggcatgggaaagacagcagtgtttgtcttggccacactgcaacagctggagccagttactgggcagagccatgagcacatgacctctgttacccttgacaatctgacagctgtgggggatgttctgtcgcaagcgtggggttcatgatttagatcacagaattgaagtcatttattatcggcccaggtgtctgtgctggtgatgtgtcacactcgggagttggcttttcagatcagcaaggaatatgagcgcttctctaaatacatgcccaatgtcaaggttgctgttttttttggtggtctgtctatcaagaaggatgaagaggtgctgaagaagaactgcccgcatatcgtcgtggggactccaggccgtatcctagccctggctcgaaataagagcctcaacctc

SEQ ID NO: 232105 - DNA, 999 bp, Artificial Sequence
  derived and/or modified sequence
cgccatacgcgctctccctgtttagttatggcagagaacgatgtggacaatgagctcttggactatgaagatgatgaggtggagacagcagctgggggagatggggctgaggcccctgccaagaaggatgtcaagggctcctatgtctccatccacagctctggctttcgtgacttcctgctcaagccagagttgctccgggccattgtcgactgtggctttgagcatccgtcagaagtccagcatgagtgcatccctcaggccattctgggaatggatgtcctgtgccaggccaagtcgggcatgggaaagacagcagtgtttgtcttggccacactgcaacagctggagccagttactgggcaggtgtctgtgctggtgatgtgtcacactcgggagttggcttttcagatcagcaaggaatatgagcgcttctctaaatacatgcccaatgtcaaggttgctgttttttttggtggtctgtctatcaagaaggatgaagaggtgctgaagaagaactgcccgcatatcgtcgtggggactccaggccgtatcctagccctggctcgaaataagagcctcaacctcaaacacattaaacactttattttggatgaatgtgataagatgcttgaacagctcgacatgcgtcgggatgtccaggaaatttttcgcatgaccccccacgagaagcaggtcatgatgttcagtgctaccttgagcaaagagatccgtccagtctgccgcaagttcatgcaagatccaatggagatcttcgtggatgatgagacgaagttgacgctgcatgggttgcagcagtactacgtgaaactgaaggacaacgagaagaaccggaagctctttgaccttctggatgtccttgagttcaaccaggaaatcacatgtaagtctgtgcagcgattttcaacgacgaattcttgtggctaccaacctatttggccgaggcatggacatcgagcgggtgaacattgcttttaa

SEQ ID NO: 232106 - DNA, 1433 bp, Artificial Sequence
  derived and/or modified sequence
acatttccctccttcgtcgctgttgctgccgccatacgcgctctccctgtttagctcttctgttagaaatagtatctttgttttcctttgctgttcctcaatcccctactcttcaccccttgttttcacctattttgcgagaacccatccagatcccccttcccttcttcccctgccggcccagttatggcagagaacgatgtggacaatgagctcttggactatgaagatgatgaggtggagacagcagctgggggagatggggctgaggcccctgccaagaaggatgtcaagggctcctatgtctccatccacagctctggctttcgtgacttcctgctcaagccagagttgctccgggccattgtcgactgtggctttgagcatccgtcagaaggttgctgttttttttggtggtctgtctatcaagaaggatgaagaggtgctgaagaagaactgcccgcatatcgtcgtggggactccaggccgtatcctagccctggctcgaaataagagcctcaacctcaaacacattaaacactttattttggatgaatgtgataagatgcttgaacagctcgacatgcgtcgggatgtccaggaaatttttcgcatgaccccccacgagaagcaggtcatgatgttcagtgctaccttgagcaaagagatccgtccagtctgccgcaagttcatgcaagatccaatggagatcttcgtggatgatgagacgaagttgacgctgcatgggttgcagcagtactacgtgaaactgaaggacaacgagaagaaccggaagctctttgaccttctggatgtccttgagttcaaccaggtggtgatctttgtgaagtctgtgcagcggtgcattgccttggcccagctactagtggagcagaacttcccagccattgccatccaccgtgggatgccccaggaggagaggctttctcggtatcagcagtttaaagattttcaacgacgaattcttgtggctaccaacctatttggccgaggcatggacatcgagcgggtgaacattgcttttaattatgacatgcctgaggattctgacacctacctgcatcgggtggccagagcaggccggtttggcaccaagggcttggctatcacatttgtgtccgatgagaatgatgccaagatcctcaatgatgtgcaggatcgctttgaggtcaatattagtgagctgcctgatgagatagacatctcctcctacattgaacagacacggtagaagactcgcccattttggaatgtgaccgtctgtccttcaggagaggacaccagggtgggggtgaaggagacactactgcccccacccctgacagcccccaccccatggcttccatcttttgcatcaccaccactcctgaacccccatttctgatttgtcagaatttttttttaacaaaact

SEQ ID NO: 232107 - DNA, 867 bp, Artificial Sequence
  derived and/or modified sequence
acatttccctccttcgtcgctgttgctgccgccatacgcgctctccctgtttagctcttctgttagaaatagtatctttgttttcctttgctgttcctcaatcccctactcttcaccccttgttttcacctattttgcgagaacccatccagatcccccttcccttcttcccctgccggcccagttatggcagagaacgatgtggacaatgagctcttggactatgaagatgatgaggtggagacagcagctgggggagatggggctgaggcccctgccaagaaggatgtcaagggctcctatgtctccatccacagctctggctttcgtgacttcctgctcaagccagagttgctccgggccattgtcgactgtggctttgagcatccgtcagaagtccagcatgagtgcatccctcaggccattctgggaatggatgtcctgtgccaggccaagtcgggcatgggaaagacagcagtgtttgtcttggccacactgcaacagctggagccagttactgggcagagccatgagcacatgacctctgttacccttgacaacctgacagctgtgggggatgttctgtcgcaagcgtggggttcatgatttagatcacagaattgaagtcatttattatcggcccaggtgtctgtgctggtgatgtgtcacactcgggagttggcttttcagatcagcaaggaatatgagcgcttctctaaatacatgcccaatgtcaaggttgctgttttttttggtggtctgtctatcaagaaggatgaagaggtgctgaagaagaactgcccgcatatcgtcgtggggactccaggccgtatcctagccctggctcgaaataagagcctcaacctc

SEQ ID NO: 232108 - DNA, 1278 bp, Artificial Sequence
  derived and/or modified sequence
atggccgagaacgacgtggacaacgagctgctggactacgaggacgacgaggtggagaccgccgccggcggcgacggcgccgaggcccccgccaagaaggacgtgaagggcagctacgtgagcatccacagcagcggcttcagagacttcctgctgaagcccgagctgctgagagccatcgtggactgcggcttcgagcaccccagcgaggtgcagcacgagtgcatcccccaggccatcctgggcatggacgtgctgtgccaggccaagagcggcatgggcaagaccgccgtgttcgtgctggccaccctgcagcagctggagcccgtgaccggccaggtgagcgtgctggtgatgtgccacaccagagagctggccttccagatcagcaaggagtacgagagattcagcaagtacatgcccaacgtgaaggtggccgtgttcttcggcggcctgagcatcaagaaggacgaggaggtgctgaagaagaactgcccccacatcgtggtgggcacccccggcagaatcctggccctggccagaaacaagagcctgaacctgaagcacatcaagcacttcatcctggacgagtgcgacaagatgctggagcagctggacatgagaagagacgtgcaggagatcttcagaatgaccccccacgagaagcaggtgatgatgttcagcgccaccctgagcaaggagatcagacccgtgtgcagaaagttcatgcaggaccccatggagatcttcgtggacgacgagaccaagctgaccctgcacggcctgcagcagtactacgtgaagctgaaggacaacgagaagaacagaaagctgttcgacctgctggacgtgctggagttcaaccaggtggtgatcttcgtgaagagcgtgcagagatgcatcgccctggcccagctgctggtggagcagaacttccccgccatcgccatccacagaggcatgccccaggaggagagactgagcagataccagcagttcaaggacttccagagaagaatcctggtggccaccaacctgttcggcagaggcatggacatcgagagagtgaacatcgccttcaactacgacatgcccgaggacagcgacacctacctgcacagatgctaccccctgagccccagcagatggcccgagcaggccggcctggcccccagagcctggctgagccacctgtgccccatgagaatgatgcccagaagcagcatgatgtgcagaatcgccctgagaagcatcctggtgagctgcctgatgagatag

SEQ ID NO: 232109 - DNA, 1287 bp, Artificial Sequence
  derived and/or modified sequence
atggccgagaacgacgtggacaacgagctgctggactacgaggacgacgaggtggagaccgccgccggcggcgacggcgccgaggcccccgccaagaaggacgtgaagggcagctacgtgagcatccacagcagcggcttcagagacttcctgctgaagcccgagctgctgagagccatcgtggactgcggcttcgagcaccccagcgaggtgcagcacgagtgcatcccccaggccatcctgggcatggacgtgctgtgccaggccaagagcggcatgggcaagaccgccgtgttcgtgctggccaccctgcagcagctggagcccgtgaccggccaggtgagcgtgctggtgatgtgccacaccagagagctggccttccagatcagcaaggagtacgagagattcagcaagtacatgcccaacgtgaaggtggccgtgttcttcggcggcctgagcatcaagaaggacgaggaggtgctgaagaagaactgcccccacatcgtggtgggcacccccggcagaatcctggccctggccagaaacaagagcctgaacctgaagcacatcaagcacttcatcctggacgagtgcgacaagatgctggagcagctggacatgagaagagacgtgcaggagatcttcagaatgaccccccacgagaagcaggtgatgatgttcagcgccaccctgagcaaggagatcagacccgtgtgcagaaagttcatgcaggaccccatggagatcttcgtggacgacgagaccaagctgaccctgcacggcctgcagcagtactacgtgaagctgaaggacaacgagaagaacagaaagctgttcgacctgctggacgtgctggagttcaaccaggtggtgatcttcgtgaagagcgtgcagagatgcatcgccctggcccagctgctggtggagcagaacttccccgccatcgccatccacagaggcatgccccaggaggagagactgagcagataccagcagttcaaggacttccagagaagaatcctggtggccaccaacctgttcggcagaggcatggacatcgagagagtgaacatcgccttcaactacgacatgcccgaggacagcgacacctacctgcacagagtggccagagccggcagattcggcaccaagggcctggccatcaccttcgtgagcgacgagaacgacgccaagatcctgaacgacgtgcaggacagattcgaggtgaacatcagcgagctgcccgacgagatcgacatcagcagctacatcgagcagaccagatag

SEQ ID NO: 232110 - DNA, 2178 bp, Artificial Sequence
  derived and/or modified sequence
ctcagctagggcctgccggttcctagtgcgtgcccagcagtcctcaggtcaccttcactaccgggccaaggaccccgtgggaactcgcagccttcgccacactcgttcctcgcgcatccacggaggggtgcctacagagaagacctgcgtggcaaaaacctaaacgaagagatgaggggcatggagaggagtaggataagagaataaagataacagtgggggggagacgttagtttcctttatatattttgttactggcggtagcagtgaagttagaaacggttttaaaacaaatttcagacaggcattttccaaaggcaagcctggagcgcacggatctgtataaccgcggaaggccctgtttccggtcccttgcgcctgcgctcttgcagccaagaaggcgggaggctggagtagagggaagcctgcaaccggaagtgaaggcagatttccctccttcgtcgctgttgctgccgccatacgcgctctccctgtttagctcttctgttagaaatagtatctttgttttcctttgctgttcctcaatcccctactcttcaccccttgttttcacctattttgcgagaacccatccagatcccccttcccttcttcccctgccggcccagttatggcagagaacgatgtggacaatgagctcttggactatgaagatgatgaggtggagacagcagctgggggagatggggctgaggcccctgccaagaaggatgtcaagggctcctatgtctccatccacagctctggctttcgtgacttcctgctcaagccagagttgctccgggccattgtcgactgtggctttgagcatccgtcagaagtccagcatgagtgcatccctcaggccattctgggaatggatgtcctgtgccaggccaagtcgggcatgggaaagacagcagtgtttgtcttggccacactgcaacagctggagccagttactgggcaggtatatttggggagagtgctggggaggggattttggtgtgtttttgtgtctgtgctggtgatgtgtcacactcgggagttggcttttcagatcagcaaggaatatgagcgcttctctaaatacatgcccaatgtcaaggttgctgttttttttggtggtctgtctatcaagaaggatgaagaggtgctgaagaagaactgcccgcatatcgtcgtggggactccaggccgtatcctagccctggctcgaaataagagcctcaacctcaaacacattaaacactttattttggatgaatgtgataagatgcttgaacagctcgacatgcgtcgggatgtccaggaaatttttcgcatgaccccccacgagaagcaggtcatgatgttcagtgctaccttgagcaaagagatccgtccagtctgccgcaagttcatgcaagatccaatggagatcttcgtggatgatgagacgaagttgacgctgcatgggttgcagcagtactacgtgaaactgaaggacaacgagaagaaccggaagctctttgaccttctggatgtccttgagttcaaccaggtggtgatctttgtgaagtctgtgcagcggtgcattgccttggcccagctactagtggagcagaacttcccagccattgccatccaccgtgggatgccccaggaggagaggctttctcggtatcagcagtttaaagattttcaacgacgaattcttgtggctaccaacctatttggccgaggcatggacatcgagcgggtgaacattgcttttaattatgacatgcctgaggattctgacacctacctgcatcgggtggccagagcaggccggtttggcaccaagggcttggctatcacatttgtgtccgatgagaatgatgccaagatcctcaatgatgtgcaggatcgctttgaggtcaatattagtgagctgcctgatgagatagacatctcctcctacattgaacagacacggtagaagactcgcccattttggaatgtgaccgtctgtccttcaggagaggacaccagggtgggggtgaaggagacactactgcccccacccctgacagcccccaccccatggcttccatcttttgcatcaccaccactcctgaacccccatttctgatttgtcagaatttttttttaacaaaactaaaaatgaaacacatgtgtctgtggtatctataa

SEQ ID NO: 232111 - DNA, 564 bp, Artificial Sequence
  derived and/or modified sequence
atgggcagcagccacatcggcggcctgagcatcaacgagagaagatgcagcgccagcctgggcctggtgatggccgagaacgacgtggacaacgagctgctggactacgaggacgacgaggtggagaccgccgccggcggcgacggcgccgaggcccccgccaagaaggacgtgaagggcagctacgtgagcatccacagcagcggcttcagagacttcctgctgaagcccgagctgctgagagccatcgtggactgcggcttcgagcaccccagcgaggtgcagcacgagtgcatcccccaggccatcctgggcatggacgtgctgtgccaggccaagagcggcatgggcaagaccgccgtgttcgtgctggccaccctgcagcagctggagcccgtgaccggccaggtgagcgtgctggtgatgtgccacaccagagagctggccttccagatcagcaaggagtacgagagattcagcaagtacatgcccaacgtgaaggtggccgtgttcttcggcggcctgagcatcaagaaggacgaggaggtgctgaagaagaactag

SEQ ID NO: 232112 - DNA, 378 bp, Artificial Sequence
  derived and/or modified sequence
atggccgagaacgacgtggacaacgagctgctggactacgaggacgacgaggtggagaccgccgccggcggcgacggcgccgaggcccccgccaagaaggacgtgaagggcagctacgtgagcatccacagcagcggcttcagagacttcctgctgaagcccgagctgctgagagccatcgtggactgcggcttcgagcaccccagcgaggtgcagcacgagtgcatcccccaggccatcctgggcatggacgtgctgtgccaggccaagagcggcatgggcaagaccgccgtgttcgtgctggccaccctgcagcagctggagcccgtgaccggccaggtgagcgtgctggtgatgtgccacaccagagagctgtag

SEQ ID NO: 232113 - DNA, 564 bp, Artificial Sequence
  derived and/or modified sequence
tgaagcgaggagagagacatcggcaagcccatggagatcttcgtggacgacgagaccaagctgaccctgcacggcctgcagcagtactacgtgaagctgaaggacaacgagaagaacagaaagctgttcgacctgctggacgtgctggagttcaaccaggtggtgatcttcgtgaagagcgtgcagagatgcatcgccctggcccagctgctggtggagcagaacttccccgccatcgccatccacagaggcatgccccaggaggagagactgagcagataccagcagttcaaggacttccagagaagaatcctggtggccaccaacctgttcggcagaggcatggacatcgagagagtgaacatcgccttcaactacgacatgcccgaggacagcgacacctacctgcacagagtggccagagccggcagattcggcaccaagggcctggccatcaccttcgtgagcgacgagaacgacgccaagatcctgaacgacgtgcaggacagattcgaggtgaacatcagcgagctgcccgacgagatcgacatcagcagctactag

SEQ ID NO: 232114 - DNA, 747 bp, Artificial Sequence
  derived and/or modified sequence
atggagatcttcgtggatgatgagacgaagttgacgctgcatgggttgcagcagtactacgtgaaactgaaggacaacgagaagaaccggaagctctttgaccttctggatgtccttgagttcaaccaggtggtgatctttgtgaagtctgtgcagcggtgcattgccttggcccagctactagtggagcagaacttcccagccattgccatccaccgtgggatgccccaggaggagaggtggctttctcggtatcagcagtttaaagattttcaacgacgaattcttgtggctaccaacctatttggccgaggcatggacatcgagcgggtgaacattgcttttaattatgacatgcctgaggattctgacacctacctgcatcgggtggccagagcaggccggtttggcaccaagggcttggctatcacatttgtgtccgatgagaatgatgccaagatcctcaatgatgtgcaggatcgctttgaggtcaatattagtgagctgcctgatgagatagacatctcctcctacattgaacagacacggtagaagactcgcccattttggaatgtgaccgtctgtccttcaggagaggacaccagggtgggggtgaaggagacactactgcccccacccctgacagcccccaccccatggcttccatcttttgcatcaccaccactcctgaacccccatttctgatttgtcagaatttttttttaacaaaactaaaaatgaaacaca

SEQ ID NO: 232115 - DNA, 870 bp, Artificial Sequence
  derived and/or modified sequence
atggccgagaacgacgtggacaacgagctgctggactacgaggacgacgaggtggagaccgccgccggcggcgacggcgccgaggcccccgccaagaaggacgtgaagggcagctacgtgagcatccacagcagcggcttcagagacttcctgctgaagcccgagctgctgagagccatcgtggactgcggcttcgagcaccccagcgaggtgcagcacgagtgcatcccccaggccatcctgggcatggacgtgctgtgccaggccaagagcggcatgggcaagaccgccgtgttcgtgctggccaccctgcagcagctggagcccgtgaccggccaggtgagcgtgctggtgatgtgccacaccagagagctggccttccagatcagcaaggagtacgagagattcagcaagtacatgcccaacgtgaaggtggccgtgttcttcggcggcctgagcatcaagaaggacgaggaggtgctgaagaagaactgcccccacatcgtggtgggcacccccggcagaatcctggccctggccagaaacaagagcctgaacctgaagcacatcaagcacttcatcctggacgagtgcgacaagatgctggagcagctggacatgagaagagacgtgcaggagatcttcagaatgaccccccacgagaagcaggtgatgatgttcagcgccaccctgagcaaggagatcagacccgtgtgcagaaagttcatgcaggaccccatggagatcttcgtggacgacgagaccaagctgaccctgcacggcctgcagcagtactacgtgaagctgaaggacaacgagaagaacagaaagctgttcgacctgctggacgtgctggagttcaaccagtag

SEQ ID NO: 232116 - DNA, 291 bp, Artificial Sequence
  derived and/or modified sequence
atggccgagaacgacgtggacaacgagctgctggactacgaggacgacgaggtggagaccgccgccggcggcgacggcgccgaggcccccgccaagaaggacgtgaagggcagctacgtgagcatccacagcagcggcttcagagacttcctgctgaagcccgagctgctgagagccatcgtggactgcggcttcgagcaccccagcgaggtgcagcacgagtgcatcccccaggccatcctgggcatggacgtgctgtgccaggccaagagcggcatgggcaagacctag

SEQ ID NO: 232117 - DNA, 696 bp, Artificial Sequence
  derived and/or modified sequence
atggccgagaacgacgtggacaacgagctgctggactacgaggacgacgaggtggagaccgccgccggcggcgacggcgccgaggcccccgccaagaaggacgtgaagggcagctacgtgagcatccacagcagcggcttcagagacttcctgctgaagcccgagctgctgagagccatcgtggactgcggcttcgagcaccccagcgaggtgcagcacgagtgcatcccccaggccatcctgggcatggacgtgctgtgccaggccaagagcggcatgggcaagaccgccgtgttcgtgctggccaccctgcagcagctggagcccgtgaccggccaggtgagcgtgctggtgatgtgccacaccagagagctggccttccagatcagcaaggagtacgagagattcagcaagtacatgcccaacgtgaaggtggccgtgttcttcggcggcctgagcatcaagaaggacgaggaggtgctgaagaagaactgcccccacatcgtggtgggcacccccggcagaatcctggccctggccagaaacaagagcctgaacctgaagcacatcaagcacttcatcctggacgagtgcgacaagatgctggagcagctggacatgagaagagacgtgcaggagatcttcagaatgaccccccacgagaagcaggtgatgatgttcagcgccaccctgtag

SEQ ID NO: 232118 - DNA, 399 bp, Artificial Sequence
  derived and/or modified sequence
atggccgagaacgacgtggacaacgagctgctggactacgaggacgacgaggtggagaccgccgccggcggcgacggcgccgaggcccccgccaagaaggacgtgaagggcagctacgtgagcatccacagcagcggcttcagagacttcctgctgaagcccgagctgctgagagccatcgtggactgcggcttcgagcaccccagcgaggtgcagcacgagtgcatcccccaggccatcctgggcatggacgtgctgtgccaggccaagagcggcatgggcaagaccgccgtgttcgtgctggccaccctgcagcagctggagcccgtgaccggccaggtgtgcttctgcgacagccacttccccagaggcgacaacgaggagctgcacctgccctag

SEQ ID NO: 232119 - DNA, 1053 bp, Artificial Sequence
  derived and/or modified sequence
atgtggaccatgagcagctggaccatgaagatgatgagatggagacagcagctgggcgagatgggcctgagacccctgcccagaagaatgagcagagcccccatgagccccagcaccgccctggccttcgtgaccagctgcagcagccagagctgcagcggccccctgagcaccgtggccctgagcatcagacagaaggtggccgtgttcttcggcggcctgagcatcaagaaggacgaggaggtgctgaagaagaactgcccccacatcgtggtgggcacccccggcagaatcctggccctggccagaaacaagagcctgaacctgaagcacatcaagcacttcatcctggacgagtgcgacaagatgctggagcagctggacatgagaagagacgtgcaggagatcttcagaatgaccccccacgagaagcaggtgatgatgttcagcgccaccctgagcaaggagatcagacccgtgtgcagaaagttcatgcaggaccccatggagatcttcgtggacgacgagaccaagctgaccctgcacggcctgcagcagtactacgtgaagctgaaggacaacgagaagaacagaaagctgttcgacctgctggacgtgctggagttcaaccaggtggtgatcttcgtgaagagcgtgcagagatgcatcgccctggcccagctgctggtggagcagaacttccccgccatcgccatccacagaggcatgccccaggaggagagactgagcagataccagcagttcaaggacttccagagaagaatcctggtggccaccaacctgttcggcagaggcatggacatcgagagagtgaacatcgccttcaactacgacatgcccgaggacagcgacacctacctgcacagagtggccagagccggcagattcggcaccaagggcctggccatcaccttcgtgagcgacgagaacgacgccaagatcctgaacgacgtgcaggacagattcgaggtgaacatcagcgagctgcccgacgagatcgacatcagcagctacatcgagcagaccagatag

SEQ ID NO: 232120 - DNA, 738 bp, Artificial Sequence
  derived and/or modified sequence
atgtggaccatgagcagctggaccatgaagatgatgagatggagacagcagctgggcgagatgggcctgagacccctgcccagaagaatgagcagagcccccatgagccccagcaccgccctggccttcgtgaccagctgcagcagccagagctgcagcggccccctgagcaccgtggccctgagcatcagacagaaggtggccgtgttcttcggcggcctgagcatcaagaaggacgaggaggtgctgaagaagaactgcccccacatcgtggtgggcacccccggcagaatcctggccctggccagaaacaagagcctgaacctgaagcacatcaagcacttcatcctggacgagtgcgacaagatgctggagcagctggacatgagaagagacgtgcaggagatcttcagaatgaccccccacgagaagcaggtgatgatgttcagcgccaccctgagcaaggagatcagacccgtgtgcagaaagttcatgcaggaccccatggagatcttcgtggacgacgagaccaagctgaccctgcacggcctgcagcagtactacgtgaagctgaaggacaacgagaagaacagaaagctgttcgacctgctggacgtgctggagttcaaccaggtggtgatcttcgtgaagagcgtgcagagatgcatcgccctggcccagctgctggtggagcagaacttccccgccatcgccatccacagaggcatgccccagtag

SEQ ID NO: 232121 - DNA, 411 bp, Artificial Sequence
  derived and/or modified sequence
atgggcggcggcagaagaccctacgacgtgttcttcagcaaggtgatggccgagaacgacgtggacaacgagctgctggactacgaggacgacgaggtggagaccgccgccggcggcgacggcgccgaggcccccgccaagaaggacgtgaagggcagctacgtgagcatccacagcagcggcttcagagacttcctgctgaagcccgagctgctgagagccatcgtggactgcggcttcgagcaccccagcgaggtgcagcacgagtgcatcccccaggccatcctgggcatggacgtgctgtgccaggccaagagcggcatgggcaagaccgccgtgttcgtgctggccaccctgcagcagctggagcccgtgaccggccaggtgagcgtgctggtgatgtgccactag

SEQ ID NO: 232122 - DNA, 594 bp, Artificial Sequence
  derived and/or modified sequence
atggccgagaacgacgtggacaacgagctgctggactacgaggacgacgaggtggagaccgccgccggcggcgacggcgccgaggcccccgccaagaaggacgtgaagggcagctacgtgagcatccacagcagcggcttcagagacttcctgctgaagcccgagctgctgagagccatcgtggactgcggcttcgagcaccccagcgaggtgcagcacgagtgcatcccccaggccatcctgggcatggacgtgctgtgccaggccaagagcggcatgggcaagaccgccgtgttcgtgctggccaccctgcagcagctggagcccgtgaccggccaggtgtgcttctgcgacagccacttccccagaggcgacaacgaggagctgcacctgccctacgtgagcgtgtacttcctgcccaaggtgagcgtgctggtgatgtgccacaccagagagctggccttccagatcagcaaggagtacgagagattcagcaagtacatgcccaacgtgaaggtggccgtgttcttcggcggcctgagcatcaagaaggacgaggaggtgctgaagaagaactgcccccacatcgtgtag

SEQ ID NO: 232123 - DNA, 570 bp, Artificial Sequence
  derived and/or modified sequence
tgagccaccctgcagcagctggagcccgtgaccggccaggtgagcgtgctggtgatgtgccacaccagagagctggccttccagatcagcaaggagtacgagagattcagcaagtacatgcccaacgtgaaggtggccgtgttcttcggcggcctgagcatcaagaaggacgaggaggtgctgaagaagaactgcccccacatcgtggtgggcacccccggcagaatcctggccctggccagaaacaagagcctgaacctgaagcacatcaagcacttcatcctggacgagtgcgacaagatgctggagcagctggacatgagaagagacgtgcaggagatcttcagaatgaccccccacgagaagcaggtgatgatgttcagcgccaccctgagcaaggagatcagacccgtgtgcagaaagttcatgcaggaccccatggagatcttcgtggacgacgagaccaagctgaccctgcacggcctgcagcagtactacgtgaagctgaaggacaacgagaagaacagaaagctgttcgacctgctggacgtgctggagttcaaccagtag

SEQ ID NO: 232124 - DNA, 711 bp, Artificial Sequence
  derived and/or modified sequence
atggccgagaacgacgtggacaacgagctgctggactacgaggacgacgaggtggagaccgccgccggcggcgacggcgccgaggcccccgccaagaaggacgtgaagggcagctacgtgagcatccacagcagcggcttcagagacttcctgctgaagcccgagctgctgagagccatcgtggactgcggcttcgagcaccccagcgaggtgcagcacgagtgcatcccccaggccatcctgggcatggacgtgctgtgccaggccaagagcggcatgggcaagaccgccgtgttcgtgctggccaccctgcagcagctggagcccgtgaccggccaggtgagcgtgctggtgatgtgccacaccagagagctggccttccagatcagcaaggagtacgagagattcagcaagtacatgcccaacgtgaaggtggccgtgttcttcggcggcctgagcatcaagaaggacgaggaggtgctgaagaagaactgcccccacatcgtggtgggcacccccggcagaatcctggccctggccagaaacaagagcctgaacctgaagcacatcaagcacttcatcctggacgagtgcgacaagatgctggagcagctggacatgagaagagacgtgcaggagatcttcagaatgaccccccacgagaagcaggtgatgatgttcagcgccaccctgagcaaggagatcagatag

SEQ ID NO: 232125 - DNA, 564 bp, Artificial Sequence
  derived and/or modified sequence
atgggcagcagccacatcggcggcctgagcatcaacgagagaagaagaagcgccagcctgggcctggtgatggccgagaacgacgtggacaacgagctgctggactacgaggacgacgaggtggagaccgccgccggcggcgacggcgccgaggcccccgccaagaaggacgtgaagggcagctacgtgagcatccacagcagcggcttcagagacttcctgctgaagcccgagctgctgagagccatcgtggactgcggcttcgagcaccccagcgaggtgcagcacgagtgcatcccccaggccatcctgggcatggacgtgctgtgccaggccaagagcggcatgggcaagaccgccgtgttcgtgctggccaccctgcagcagctggagcccgtgaccggccaggtgagcgtgctggtgatgtgccacaccagagagctggccttccagatcagcaaggagtacgagagattcagcaagtacatgcccaacgtgaaggtggccgtgttcttcggcggcctgagcatcaagaaggacgaggaggtgctgaagaagaactag

SEQ ID NO: 232126 - DNA, 1332 bp, Artificial Sequence
  derived and/or modified sequence
atggccgagaacgacgtggacaacgagctgctggactacgaggacgacgaggtggagaccgccgccggcggcgacggcgccgaggcccccgccaagaaggacgtgaagggcagctacgtgagcatccacagcagcggcttcagagacttcctgctgaagcccgagctgctgagagccatcgtggactgcggcttcgagcaccccagcgaggtgcagcacgagtgcatcccccaggccatcctgggcatggacgtgctgtgccaggccaagagcggcatgggcaagaccgccgtgttcgtgctggccaccctgcagcagctggagcccgtgaccggccaggtgtacctgggcagagtgctgggcagaggcttctggtgcgtgttcgtgagcgtgctggtgatgtgccacaccagagagctggccttccagatcagcaaggagtacgagagattcagcaagtacatgcccaacgtgaaggtggccgtgttcttcggcggcctgagcatcaagaaggacgaggaggtgctgaagaagaactgcccccacatcgtggtgggcacccccggcagaatcctggccctggccagaaacaagagcctgaacctgaagcacatcaagcacttcatcctggacgagtgcgacaagatgctggagcagctggacatgagaagagacgtgcaggagatcttcagaatgaccccccacgagaagcaggtgatgatgttcagcgccaccctgagcaaggagatcagacccgtgtgcagaaagttcatgcaggaccccatggagatcttcgtggacgacgagaccaagctgaccctgcacggcctgcagcagtactacgtgaagctgaaggacaacgagaagaacagaaagctgttcgacctgctggacgtgctggagttcaaccaggtggtgatcttcgtgaagagcgtgcagagatgcatcgccctggcccagctgctggtggagcagaacttccccgccatcgccatccacagaggcatgccccaggaggagagactgagcagataccagcagttcaaggacttccagagaagaatcctggtggccaccaacctgttcggcagaggcatggacatcgagagagtgaacatcgccttcaactacgacatgcccgaggacagcgacacctacctgcacagagtggccagagccggcagattcggcaccaagggcctggccatcaccttcgtgagcgacgagaacgacgccaagatcctgaacgacgtgcaggacagattcgaggtgaacatcagcgagctgcccgacgagatcgacatcagcagctacatcgagcagaccagatag

SEQ ID NO: 232127 - DNA, 987 bp, Artificial Sequence
  derived and/or modified sequence
tgagccaccctgcagcagctggagcccgtgaccggccaggtgagcgtgctggtgatgtgccacaccagagagctggccttccagatcagcaaggagtacgagagattcagcaagtacatgcccaacgtgaaggtggccgtgttcttcggcggcctgagcatcaagaaggacgaggaggtgctgaagaagaactgcccccacatcgtggtgggcacccccggcagaatcctggccctggccagaaacaagagcctgaacctgaagcacatcaagcacttcatcctggacgagtgcgacaagatgctggagcagctggacatgagaagagacgtgcaggagatcttcagaatgaccccccacgagaagcaggtgatgatgttcagcgccaccctgagcaaggagatcagacccgtgtgcagaaagttcatgcaggaccccatggagatcttcgtggacgacgagaccaagctgaccctgcacggcctgcagcagtactacgtgaagctgaaggacaacgagaagaacagaaagctgttcgacctgctggacgtgctggagttcaaccaggtggtgatcttcgtgaagagcgtgcagagatgcatcgccctggcccagctgctggtggagcagaacttccccgccatcgccatccacagaggcatgccccaggaggagagactgagcagataccagcagttcaaggacttccagagaagaatcctggtggccaccaacctgttcggcagaggcatggacatcgagagagtgaacatcgccttcaactacgacatgcccgaggacagcgacacctacctgcacagagtggccagagccggcagattcggcaccaagggcctggccatcaccttcgtgagcgacgagaacgacgccaagatcctgaacgacgtgcaggacagattcgaggtgaacatcagcgagctgcccgacgagatcgacatcagcagctacatcgagcagaccagatag

SEQ ID NO: 232128 - DNA, 396 bp, Artificial Sequence
  derived and/or modified sequence
tgagccaccctgcagcagctggagcccgtgaccggccaggtgagcgtgctggtgatgtgccacaccagagagctggccttccagatcagcaaggagtacgagagattcagcaagtacatgcccaacgtgaaggtggccgtgttcttcggcggcctgagcatcaagaaggacgaggaggtgctgaagaagaactgcccccacatcgtggtgggcacccccggcagaatcctggccctggccagaaacaagagcctgaacctgaagcacatcaagcacttcatcctggacgagtgcgacaagatgctggagcagctggacatgagaagagacgtgcaggagatcttcagaatgaccccccacgagaagcaggtgatgatgttcagcgccaccctgtag

SEQ ID NO: 232129 - DNA, 411 bp, Artificial Sequence
  derived and/or modified sequence
tgagccaccctgcagcagctggagcccgtgaccggccaggtgagcgtgctggtgatgtgccacaccagagagctggccttccagatcagcaaggagtacgagagattcagcaagtacatgcccaacgtgaaggtggccgtgttcttcggcggcctgagcatcaagaaggacgaggaggtgctgaagaagaactgcccccacatcgtggtgggcacccccggcagaatcctggccctggccagaaacaagagcctgaacctgaagcacatcaagcacttcatcctggacgagtgcgacaagatgctggagcagctggacatgagaagagacgtgcaggagatcttcagaatgaccccccacgagaagcaggtgatgatgttcagcgccaccctgagcaaggagatcagatag

SEQ ID NO: 232130 - DNA, 717 bp, Artificial Sequence
  derived and/or modified sequence
atggccgagaacgacgtggacaacgagctgctggactacgaggacgacgaggtggagaccgccgccggcggcgacggcgccgaggcccccgccaagaaggacgtgaagggcagctacgtgagcatccacagcagcggcttcagagacttcctgctgaagcccgagctgctgagagccatcgtggactgcggcttcgagcaccccagcgaggtgcagcacgagtgcatcccccaggccatcctgggcatggacgtgctgtgccaggccaagagcggcatgggcaagaccgccgtgttcgtgctggccaccctgcagcagctggagcccgtgaccggccaggtgagcgtgctggtgatgtgccacaccagagagctggccttccagatcagcaaggagtacgagagattcagcaagtacatgcccaacgtgaaggtggccgtgttcttcggcggcctgagcatcaagaaggacgaggaggtgctgaagaagaactgcccccacatcgtggtgggcacccccggcagaatcctggccctggccagaaacaagagcctgaacctgaagcacatcaagcacttcatcctggacgagtgcgacaagatgctggagcagctggacatgagaagagacgtgcaggagatcttcagaatgaccccccacgagaagcaggtgatgatgttcagcgccaccctgagcaaggagatcagacccgtgtag

SEQ ID NO: 232131 - DNA, 540 bp, Artificial Sequence
  derived and/or modified sequence
gtggccgtgttcttcggcggcctgagcatcaagaaggacgaggaggtgctgaagaagaactgcccccacatcgtggtgggcacccccggcagaatcctggccctggccagaaacaagagcctgaacctgaagcacatcaagcacttcatcctggacgagtgcgacaagatgctggagcagctggacatgagaagagacgtgcaggagatcttcagaatgaccccccacgagaagcaggtgatgatgttcagcgccaccctgagcaaggagatcagacccgtgtgcagaaagttcatgcaggaccccatggagatcttcgtggacgacgagaccaagctgaccctgcacggcctgcagcagtactacgtgaagctgaaggacaacgagaagaacagaaagctgttcgacctgctggacgtgctggagttcaaccaggtggtgatcttcgtgaagagcgtgcagagatgcatcgccctggcccagctgctggtggagcagaacttccccgccatcgccatccacagaggcatgccccagtag

SEQ ID NO: 232132 - DNA, 195 bp, Artificial Sequence
  derived and/or modified sequence
tgagccaccctgcagcagctggagcccgtgaccggccaggtgagcgtgctggtgatgtgccacaccagagagctggccttccagatcagcaaggagtacgagagattcagcaagtacatgcccaacgtgaaggtggccgtgttcttcggcggcctgagcatcaagaaggacgaggaggtgctgaagaagaactag

SEQ ID NO: 232133 - DNA, 78 bp, Artificial Sequence
  derived and/or modified sequence
tgagccaccctgcagcagctggagcccgtgaccggccaggtgagcgtgctggtgatgtgccacaccagagagctgtag

SEQ ID NO: 232134 - DNA, 66 bp, Artificial Sequence
  derived and/or modified sequence
tgagccaccctgcagcagctggagcccgtgaccggccaggtgagcgtgctggtgatgtgccactag

SEQ ID NO: 232135 - DNA, 978 bp, Artificial Sequence
  derived and/or modified sequence
tgagccaccctgcagcagctggagcccgtgaccggccaggtgagcgtgctggtgatgtgccacaccagagagctggccttccagatcagcaaggagtacgagagattcagcaagtacatgcccaacgtgaaggtggccgtgttcttcggcggcctgagcatcaagaaggacgaggaggtgctgaagaagaactgcccccacatcgtggtgggcacccccggcagaatcctggccctggccagaaacaagagcctgaacctgaagcacatcaagcacttcatcctggacgagtgcgacaagatgctggagcagctggacatgagaagagacgtgcaggagatcttcagaatgaccccccacgagaagcaggtgatgatgttcagcgccaccctgagcaaggagatcagacccgtgtgcagaaagttcatgcaggaccccatggagatcttcgtggacgacgagaccaagctgaccctgcacggcctgcagcagtactacgtgaagctgaaggacaacgagaagaacagaaagctgttcgacctgctggacgtgctggagttcaaccaggtggtgatcttcgtgaagagcgtgcagagatgcatcgccctggcccagctgctggtggagcagaacttccccgccatcgccatccacagaggcatgccccaggaggagagactgagcagataccagcagttcaaggacttccagagaagaatcctggtggccaccaacctgttcggcagaggcatggacatcgagagagtgaacatcgccttcaactacgacatgcccgaggacagcgacacctacctgcacagatgctaccccctgagccccagcagatggcccgagcaggccggcctggcccccagagcctggctgagccacctgtgccccatgagaatgatgcccagaagcagcatgatgtgcagaatcgccctgagaagcatcctggtgagctgcctgatgagatag

SEQ ID NO: 232136 - DNA, 420 bp, Artificial Sequence
  derived and/or modified sequence
atggccgagaacgacgtggacaacgagctgctggactacgaggacgacgaggtggagaccgccgccggcggcgacggcgccgaggcccccgccaagaaggacgtgaagggcagctacgtgagcatccacagcagcggcttcagagacttcctgctgaagcccgagctgctgagagccatcgtggactgcggcttcgagcaccccagcgaggtgcagcacgagtgcatcccccaggccatcctgggcatggacgtgctgtgccaggccaagagcggcatgggcaagaccgccgtgttcgtgctggccaccctgcagcagctggagcccgtgaccggccagagccacgagcacatgaccagcgtgaccctggacaacctgaccgccgtgggcgacgtgctgagccaggcctggggcagctag

SEQ ID NO: 232137 - DNA, 732 bp, Artificial Sequence
  derived and/or modified sequence
atgtggaccatgagcagctggaccatgaagatgatgagatggagacagcagctgggcgagatgggcctgagacccctgcccagaagaatgagcagagcccccatgagccccagcaccgccctggccttcgtgaccagctgcagcagccagagctgcagcggccccctgagcaccgtggccctgagcatcagacagaaggtgagcgtgctggtgatgtgccacaccagagagctggccttccagatcagcaaggagtacgagagattcagcaagtacatgcccaacgtgaaggtggccgtgttcttcggcggcctgagcatcaagaaggacgaggaggtgctgaagaagaactgcccccacatcgtggtgggcacccccggcagaatcctggccctggccagaaacaagagcctgaacctgaagcacatcaagcacttcatcctggacgagtgcgacaagatgctggagcagctggacatgagaagagacgtgcaggagatcttcagaatgaccccccacgagaagcaggtgatgatgttcagcgccaccctgagcaaggagatcagacccgtgtgcagaaagttcatgcaggacgtgaacaccctgctgcccagcctgccccccctgcccgccagatgcctgctgcccttcctggccctgttcctgagactgccctgccacagcagcgccaagaaggccgcctgcgcccagctgggcgtgatgaccccctag

SEQ ID NO: 232138 - DNA, 417 bp, Artificial Sequence
  derived and/or modified sequence
tgagccaccctgcagcagctggagcccgtgaccggccaggtgagcgtgctggtgatgtgccacaccagagagctggccttccagatcagcaaggagtacgagagattcagcaagtacatgcccaacgtgaaggtggccgtgttcttcggcggcctgagcatcaagaaggacgaggaggtgctgaagaagaactgcccccacatcgtggtgggcacccccggcagaatcctggccctggccagaaacaagagcctgaacctgaagcacatcaagcacttcatcctggacgagtgcgacaagatgctggagcagctggacatgagaagagacgtgcaggagatcttcagaatgaccccccacgagaagcaggtgatgatgttcagcgccaccctgagcaaggagatcagacccgtgtag

SEQ ID NO: 232139 - DNA, 294 bp, Artificial Sequence
  derived and/or modified sequence
tgagccaccctgcagcagctggagcccgtgaccggccaggtgtgcttctgcgacagccacttccccagaggcgacaacgaggagctgcacctgccctacgtgagcgtgtacttcctgcccaaggtgagcgtgctggtgatgtgccacaccagagagctggccttccagatcagcaaggagtacgagagattcagcaagtacatgcccaacgtgaaggtggccgtgttcttcggcggcctgagcatcaagaaggacgaggaggtgctgaagaagaactgcccccacatcgtgtag

SEQ ID NO: 232140 - DNA, 972 bp, Artificial Sequence
  derived and/or modified sequence
atggccgagaacgacgtggacaacgagctgctggactacgaggacgacgaggtggagaccgccgccggcggcgacggcgccgaggcccccgccaagaaggacgtgaagggcagctacgtgagcatccacagcagcggcttcagagacttcctgctgaagcccgagctgctgagagccatcgtggactgcggcttcgagcaccccagcgaggtgcagcacgagtgcatcccccaggccatcctgggcatggacgtgctgtgccaggccaagagcggcatgggcaagaccgccgtgttcgtgctggccaccctgcagcagctggagcccgtgaccggccaggtgagcgtgctggtgatgtgccacaccagagagctggccttccagatcagcaaggagtacgagagattcagcaagtacatgcccaacgtgaaggtggccgtgttcttcggcggcctgagcatcaagaaggacgaggaggtgctgaagaagaactgcccccacatcgtggtgggcacccccggcagaatcctggccctggccagaaacaagagcctgaacctgaagcacatcaagcacttcatcctggacgagtgcgacaagatgctggagcagctggacatgagaagagacgtgcaggagatcttcagaatgaccccccacgagaagcaggtgatgatgttcagcgccaccctgagcaaggagatcagacccgtgtgcagaaagttcatgcaggaccccatggagatcttcgtggacgacgagaccaagctgaccctgcacggcctgcagcagtactacgtgaagctgaaggacaacgagaagaacagaaagctgttcgacctgctggacgtgctggagttcaaccaggagatcacctgcaagagcgtgcagagattcagcaccaccaacagctgcggctaccagcccatctggcccagacacggccacagagccggcgagcactgcttctag

SEQ ID NO: 232141 - DNA, 552 bp, Artificial Sequence
  derived and/or modified sequence
atggagatcttcgtggacgacgagaccaagctgaccctgcacggcctgcagcagtactacgtgaagctgaaggacaacgagaagaacagaaagctgttcgacctgctggacgtgctggagttcaaccaggtggtgatcttcgtgaagagcgtgcagagatgcatcgccctggcccagctgctggtggagcagaacttccccgccatcgccatccacagaggcatgccccaggaggagagatggctgagcagataccagcagttcaaggacttccagagaagaatcctggtggccaccaacctgttcggcagaggcatggacatcgagagagtgaacatcgccttcaactacgacatgcccgaggacagcgacacctacctgcacagagtggccagagccggcagattcggcaccaagggcctggccatcaccttcgtgagcgacgagaacgacgccaagatcctgaacgacgtgcaggacagattcgaggtgaacatcagcgagctgcccgacgagatcgacatcagcagctacatcgagcagaccagatag

SEQ ID NO: 232142 - protein, 1272 aa, Artificial Sequence
  derived and/or modified sequence
MPAERKKPASMEEKDSLPNNKEKDCSERRTVSSKERPKDDIKLTAKKEVSKAPEDKKKRLEDDKRKKEDKERKKKDEEKVKAEEESKKKEEEEKKKHQEEERKKQEEQAKRQQEEEAAAQMKEKEESIQLHQEAWERHHLRKELRSKNQNAPDSRPEENFFSRLDSSLKKNTAFVKKLKTITEQQRDSLSHDFNGLNLSKYIAEAVASIVEAKLKISDVNCAVHLCSLFHQRYADFAPSLLQVWKKHFEARKEEKTPNITKLRTDLRFIAELTIVGIFTDKEGLSLIYEQLKNIINADRESHTHVSVVISFCRHCGDDIAGLVPRKVKSAAEKFNLSFPPSEIISPEKQQPFQNLLKEYFTSLTKHLKRDHRELQNTERQNRRILHSKGELSEDRHKQYEEFAMSYQKLLANSQSLADLLDENMPDLPQDKPTPEEHGPGIDIFTPGKPGEYDLEGGIWEDEDARNFYENLIDLKAFVPAILFKDNEKSCQNKESNKDDTKEAKESKENKEVSSPDDLELELENLEINDDTLELEGGDEAEDLTKKLLDEQEQEDEEASTGSHLKLIVDAFLQQLPNCVNRDLIDKAAMDFCMNMNTKANRKKLVRALFIVPRQRLDLLPFYARLVATLHPCMSDVAEDLCSMLRGDFRFHVRKKDQINIETKNKTVRFIGELTKFKMFTKNDTLHCLKMLLSDFSHHHIEMACTLLETCGRFLFRSPESHLRTSVLLEQMMRKKQAMHLDARYVTMVENAYYYCNPPPAEKTVKKKRPPLQEYVRKLLYKDLSKVTTEKVLRQMRKLPWQDQEVKDYVICCMINIWNVKYNSIHCVANLLAGLVLYQEDVGIHVVDGVLEDIRLGMEVNQPKFNQRRISSAKFLGELYNYRMVESAVIFRTLYSFTSFGVNPDGSPSSLDPPEHLFRIRLVCTILDTCGQYFDRGSSKRKLDCFLVYFQRYVWWKKSLEVWTKDHPFPIDIDYMISDTLELLRPKIKLCNSLEESIRQVQDLEREFLIKLGLVNDKDSKDSMTEGENLEEDEEEEEGGAETEEQSGNESEVNEPEEEEGSDNDDDEGEEEEEENTDYLTDSNKENETDEENTEVMIKGGGLKHVPCVEDEDFIQALDKMMLENLQQRSGESVKVHQLDVAIPLHLKSQLRKGPPLGGGEGEAESADTMPFVMLTRKGNKQQFKILNVPMSSQLAANHWNQQQAEQEERMRMKKLTLDINERQEQEDYQEMLQSLAQRPAPANTNRERRPRYQHPKGAPNADLIFKTGGRRR

SEQ ID NO: 232143 - DNA, 3819 bp, Artificial Sequence
  derived and/or modified sequence
atgcccgccgagagaaagaagcccgccagcatggaggagaaggacagcctgcccaacaacaaggagaaggactgcagcgagagaagaaccgtgagcagcaaggagagacccaaggacgacatcaagctgaccgccaagaaggaggtgagcaaggcccccgaggacaagaagaagagactggaggacgacaagagaaagaaggaggacaaggagagaaagaagaaggacgaggagaaggtgaaggccgaggaggagagcaagaagaaggaggaggaggagaagaagaagcaccaggaggaggagagaaagaagcaggaggagcaggccaagagacagcaggaggaggaggccgccgcccagatgaaggagaaggaggagagcatccagctgcaccaggaggcctgggagagacaccacctgagaaaggagctgagaagcaagaaccagaacgcccccgacagcagacccgaggagaacttcttcagcagactggacagcagcctgaagaagaacaccgccttcgtgaagaagctgaagaccatcaccgagcagcagagagacagcctgagccacgacttcaacggcctgaacctgagcaagtacatcgccgaggccgtggccagcatcgtggaggccaagctgaagatcagcgacgtgaactgcgccgtgcacctgtgcagcctgttccaccagagatacgccgacttcgcccccagcctgctgcaggtgtggaagaagcacttcgaggccagaaaggaggagaagacccccaacatcaccaagctgagaaccgacctgagattcatcgccgagctgaccatcgtgggcatcttcaccgacaaggagggcctgagcctgatctacgagcagctgaagaacatcatcaacgccgacagagagagccacacccacgtgagcgtggtgatcagcttctgcagacactgcggcgacgacatcgccggcctggtgcccagaaaggtgaagagcgccgccgagaagttcaacctgagcttcccccccagcgagatcatcagccccgagaagcagcagcccttccagaacctgctgaaggagtacttcaccagcctgaccaagcacctgaagagagaccacagagagctgcagaacaccgagagacagaacagaagaatcctgcacagcaagggcgagctgagcgaggacagacacaagcagtacgaggagttcgccatgagctaccagaagctgctggccaacagccagagcctggccgacctgctggacgagaacatgcccgacctgccccaggacaagcccacccccgaggagcacggccccggcatcgacatcttcacccccggcaagcccggcgagtacgacctggagggcggcatctgggaggacgaggacgccagaaacttctacgagaacctgatcgacctgaaggccttcgtgcccgccatcctgttcaaggacaacgagaagagctgccagaacaaggagagcaacaaggacgacaccaaggaggccaaggagagcaaggagaacaaggaggtgagcagccccgacgacctggagctggagctggagaacctggagatcaacgacgacaccctggagctggagggcggcgacgaggccgaggacctgaccaagaagctgctggacgagcaggagcaggaggacgaggaggccagcaccggcagccacctgaagctgatcgtggacgccttcctgcagcagctgcccaactgcgtgaacagagacctgatcgacaaggccgccatggacttctgcatgaacatgaacaccaaggccaacagaaagaagctggtgagagccctgttcatcgtgcccagacagagactggacctgctgcccttctacgccagactggtggccaccctgcacccctgcatgagcgacgtggccgaggacctgtgcagcatgctgagaggcgacttcagattccacgtgagaaagaaggaccagatcaacatcgagaccaagaacaagaccgtgagattcatcggcgagctgaccaagttcaagatgttcaccaagaacgacaccctgcactgcctgaagatgctgctgagcgacttcagccaccaccacatcgagatggcctgcaccctgctggagacctgcggcagattcctgttcagaagccccgagagccacctgagaaccagcgtgctgctggagcagatgatgagaaagaagcaggccatgcacctggacgccagatacgtgaccatggtggagaacgcctactactactgcaaccccccccccgccgagaagaccgtgaagaagaagagaccccccctgcaggagtacgtgagaaagctgctgtacaaggacctgagcaaggtgaccaccgagaaggtgctgagacagatgagaaagctgccctggcaggaccaggaggtgaaggactacgtgatctgctgcatgatcaacatctggaacgtgaagtacaacagcatccactgcgtggccaacctgctggccggcctggtgctgtaccaggaggacgtgggcatccacgtggtggacggcgtgctggaggacatcagactgggcatggaggtgaaccagcccaagttcaaccagagaagaatcagcagcgccaagttcctgggcgagctgtacaactacagaatggtggagagcgccgtgatcttcagaaccctgtacagcttcaccagcttcggcgtgaaccccgacggcagccccagcagcctggacccccccgagcacctgttcagaatcagactggtgtgcaccatcctggacacctgcggccagtacttcgacagaggcagcagcaagagaaagctggactgcttcctggtgtacttccagagatacgtgtggtggaagaagagcctggaggtgtggaccaaggaccaccccttccccatcgacatcgactacatgatcagcgacaccctggagctgctgagacccaagatcaagctgtgcaacagcctggaggagagcatcagacaggtgcaggacctggagagagagttcctgatcaagctgggcctggtgaacgacaaggacagcaaggacagcatgaccgagggcgagaacctggaggaggacgaggaggaggaggagggcggcgccgagaccgaggagcagagcggcaacgagagcgaggtgaacgagcccgaggaggaggagggcagcgacaacgacgacgacgagggcgaggaggaggaggaggagaacaccgactacctgaccgacagcaacaaggagaacgagaccgacgaggagaacaccgaggtgatgatcaagggcggcggcctgaagcacgtgccctgcgtggaggacgaggacttcatccaggccctggacaagatgatgctggagaacctgcagcagagaagcggcgagagcgtgaaggtgcaccagctggacgtggccatccccctgcacctgaagagccagctgagaaagggcccccccctgggcggcggcgagggcgaggccgagagcgccgacaccatgcccttcgtgatgctgaccagaaagggcaacaagcagcagttcaagatcctgaacgtgcccatgagcagccagctggccgccaaccactggaaccagcagcaggccgagcaggaggagagaatgagaatgaagaagctgaccctggacatcaacgagagacaggagcaggaggactaccaggagatgctgcagagcctggcccagagacccgcccccgccaacaccaacagagagagaagacccagataccagcaccccaagggcgcccccaacgccgacctgatcttcaagaccggcggcagaagaagatag

SEQ ID NO: 232144 - DNA, 3819 bp, Artificial Sequence
  derived and/or modified sequence
atgccagcagagcggaagaaacccgcctccatggaggagaaggactcattacctaataataaagagaaagattgttcagagcggcggacggtgtcatccaaggagagaccaaaagatgatattaagctgaccgccaaaaaagaagtttctaaggcacccgaagataaaaaaaaacgtctcgaggacgataaacgaaagaaggaagacaaagaaagaaaaaagaaagatgaggaaaaagttaaagccgaggaagagagtaaaaaaaaggaagaggaggaaaaaaagaagcaccaggaagaagaacggaaaaaacaggaggagcaggccaaaaggcagcaggaggaagaagccgctgctcagatgaaggaaaaagaggagtcaatccaattgcatcaggaggcatgggagcgacatcaccttagaaaagaactacgaagcaaaaatcagaatgctcccgattcacgacccgaggagaactttttctccagactagattctagtctgaaaaaaaatacagcattcgtgaagaaactgaaaactattaccgagcagcagagggattccctaagtcacgattttaacggtctgaacctgagcaaatatattgcagaagcagtggccagcatagtggaggccaaactgaaaatctccgatgttaactgcgctgttcacctgtgttcactgttccaccagagatacgccgatttcgctcccagcttgctgcaggtgtggaagaagcactttgaagcacgtaaggaagaaaagacccccaacattaccaaattgaggacagatcttcgattcatcgctgaactaactatagtggggattttcaccgataaggagggactgagccttatttacgagcagctgaagaacatcataaacgccgatcgagagtcccacacgcacgtatcggtggtcatttccttttgtaggcattgtggtgacgatattgctggcctcgtgccccggaaggtgaagagcgctgccgaaaaatttaacctttcattcccacccagtgagattatatctccagaaaagcagcagccttttcagaatttgttgaaggaatattttacctcactgactaagcatttgaagcgtgaccacagagagcttcaaaatacagaacgacagaaccgcagaatcctccactcgaagggagagctctctgaggaccgccataaacaatacgaagagtttgccatgtcctatcagaaactgctggccaactcccagtcactggctgacctgttggacgaaaatatgcctgacttaccacaggacaagcccactccagaggagcatggcccaggcatagatatttttactccaggcaagccgggcgagtatgacctagagggcggtatatgggaagatgaggatgccaggaatttttatgagaatttaattgatctcaaagcgtttgtacctgcgatcctctttaaagataatgagaagagttgtcagaataaagagtccaataaggatgacacaaaagaggccaaggagtccaaagaaaataaggaggtttcaagccctgacgatctggagctggaactggagaacctggagatcaatgatgacacccttgagctggaaggcggggacgaagccgaggatctgacaaaaaagctgttggatgaacaagaacaagaggatgaagaggcctccacaggatcccatctgaaacttattgtggacgcgtttcttcagcagctacctaattgtgtaaatcgggaccttatagataaggccgctatggacttctgtatgaatatgaataccaaggccaatcgcaagaagcttgttcgggcactgttcatcgttccccgccagcggcttgacctattaccattttacgcaagactcgttgcaaccctgcacccgtgcatgtctgatgtcgcagaggacctgtgctctatgctgaggggcgattttcgattccacgtacggaagaaggatcagattaacattgaaacaaaaaacaagacggtgcgatttatcggcgaactcacaaagtttaagatgtttacaaagaatgacacgctacactgtctgaaaatgctcttgagcgacttttcccaccaccacattgagatggcctgtacccttcttgagacgtgtggccgattcctgttcagaagccctgaatctcacctccgcacatcggtgctcctcgagcagatgatgcgtaaaaaacaagctatgcatttggatgccagatacgtcactatggtcgaaaatgcttattactactgtaatcctccaccagctgaaaaaaccgtgaaaaagaagagaccccccctacaggaatatgttcgcaagttactgtacaaagacctctctaaggttacaacagaaaaagtgctgcggcagatgagaaagctgccatggcaggatcaggaagtgaaagactacgtcatctgctgcatgattaatatctggaatgttaagtacaattccatccattgtgtagcaaatttacttgccggactggttttgtaccaggaggacgttggaattcacgtagtggacggggtgcttgaagacatacgactgggaatggaggtgaaccagcctaaatttaatcagcgacggatctcatctgcaaagtttctcggagagctgtataactaccggatggtggaaagcgcagtaatcttccgcactctttattccttcaccagcttcggcgttaacccagacggcagcccttcctccctcgatccaccagagcatctgtttcgcataaggttagtctgcaccattctggatacatgcgggcagtacttcgatagaggatctagcaaaaggaagctcgactgttttctcgtgtactttcagagatatgtatggtggaaaaaaagcctggaagtgtggactaaagatcaccccttccccatagacattgactatatgatcagtgacaccctggaactactgagacctaagattaagttgtgtaatagtctagaggagtctattaggcaggtgcaggatctcgaacgcgagttcctcataaagctgggccttgtgaatgataaagattctaaggattccatgactgagggcgagaacctggaggaggatgaggaggaggaggagggcggcgccgagactgaggaacagtccggtaatgaatctgaagtgaacgaaccggaggaggaagaaggatccgataacgacgacgacgaaggggaggaggaagaggaagagaacacagattatctgacagattccaataaggagaacgagactgacgaggaaaataccgaagtcatgataaaaggcggcgggttgaaacacgtgccctgcgttgaggacgaggactttatccaggctttagataagatgatgttggaaaatctgcaacaaaggtcgggagaatccgtgaaagtccaccaattggatgtggcaatcccactgcatcttaagagtcagcttcgaaaaggacctcccttgggtggaggggagggagaagcagagtctgccgacacaatgccattcgtcatgctgacgagaaaggggaacaagcaacaattcaaaatcttgaatgtccccatgtcttctcagctcgcagcaaaccactggaaccagcagcaagctgagcaggaggagcggatgcgcatgaagaagctgaccctggacataaacgagcgtcaagagcaggaggattatcaggagatgctgcaatccctcgcccaacgacctgccccggctaataccaaccgtgagcgcaggcctagatatcaacaccccaaaggggcacctaatgcagacctaatattcaaaactggcggcagaaggcgttag

SEQ ID NO: 232145 - DNA, 3819 bp, Artificial Sequence
  derived and/or modified sequence
atgcctgccgaacgcaagaaacccgcaagcatggaagagaaggacagcctgcctaataataaagaaaaagattgctccgagcgaaggaccgtgagttccaaggaaaggccgaaagatgacataaagttaacggcaaaaaaagaggtcagcaaagcgccagaagacaagaaaaagagactggaggacgacaagaggaaaaaggaggacaaggaacgaaaaaagaaagacgaagaaaaagtgaaggccgaggaagagagtaaaaagaaagaggaggaggagaaaaaaaagcaccaagaggaagagagaaaaaagcaagaagaacaggcaaaaaggcagcaggaagaggaggcggctgcccaaatgaaggaaaaggaggagagcatccagctccaccaggaagcttgggagcgacaccacctgcgtaaggagttgagaagtaaaaaccagaatgctcccgacagtaggccggaagaaaacttcttcagtcggcttgactcaagtcttaaaaaaaacacagctttcgtgaaaaaactcaaaaccattaccgagcaacagcgagactccctcagccacgatttcaatgggctcaatctgagtaagtacattgcagaagccgttgcatccatcgtggaagccaagttaaagatttcggacgtgaactgcgcggttcatttgtgcagtctcttccaccagcggtatgccgactttgctccctcattgctgcaggtgtggaaaaagcacttcgaagcacgaaaagaagagaaaactccaaacatcacaaaactgcgcaccgaccttaggttcattgcagagcttactatcgtaggcatcttcacagacaaagagggactctctctcatatatgaacaactcaagaacattatcaacgctgatcgcgagtcccatacacatgtgtctgtcgtaatctcgttttgcagacattgcggagacgatatagccggattggttcctcgcaaggtcaaaagcgctgcagaaaagttcaatctgagctttcctccctccgaaattatatcccctgaaaagcaacagcccttccagaatctccttaaggagtactttacatccctgaccaagcacctcaaaagggaccaccgggagctgcaaaatactgaaagacagaacaggagaattctacactcaaagggagaactgtccgaggaccgtcataaacagtatgaggaattcgcaatgtcttatcaaaaattgctcgcgaactcccaaagtcttgcggatctcctggatgaaaatatgccggacttaccacaggataagcccacaccagaggagcatgggcccgggatcgacatctttacacctggcaagcccggtgaatatgatctagagggaggcatttgggaagatgaagacgccaggaatttttatgagaacctcattgatctgaaagcatttgttccggcaatactttttaaggacaacgaaaagtcatgtcaaaataaagagagtaataaggatgacactaaagaggctaaggaaagtaaggaaaataaagaagtaagcagccctgatgatctggaattggaactggagaatctcgaaatcaatgacgacaccttagaattagaaggaggagacgaagcagaagacctgaccaagaaactgctggatgaacaggagcaggaggatgaggaagcatccacgggaagccatctaaaacttattgttgacgcctttttgcagcagctgccaaattgtgtgaaccgcgacctgatcgacaaagccgcgatggatttttgcatgaatatgaatactaaagccaataggaagaagctagtcagagctttgtttattgtacccaggcaacgcctagatttgttgccattttatgctagactcgtggccaccctgcacccatgtatgagcgacgtggccgaggatctgtgctcaatgctgagaggagacttccggtttcatgtgcggaagaaagatcagattaacatcgaaactaaaaacaagaccgtgcggttcatcggcgaactaaccaaatttaagatgttcaccaagaacgatactctgcactgtttaaagatgctgctgagtgacttttctcatcatcacattgagatggcatgcaccctgcttgagacctgtggacggttcctgttcaggtcccctgagtcccacctgcgcacctccgtactgttggagcagatgatgagaaagaagcaggccatgcatctggatgcacgctacgtcactatggttgagaacgcttactactactgtaacccacctcctgctgaaaagacggtgaagaagaaacgcccaccacttcaagagtatgtgcggaaactgctgtataaggaccttagtaaagttacaacagagaaggtactgaggcaaatgcgcaagctgccatggcaggatcaggaggtgaaagactacgttatttgttgcatgatcaacatatggaatgtgaagtacaatagcatccattgtgtggcaaatttactcgctggactggttttataccaagaagacgtcggcatccatgtggtcgacggcgttttggaggatataaggcttgggatggaggtgaaccagccgaagtttaaccagagacgaattagctctgccaagttcttgggggaactgtacaactatagaatggtcgaatcagctgtcatctttcggactttatactctttcacaagtttcggtgtgaatcccgacggaagcccgagtagtctcgaccctcctgaacacctgttccgaatccgcctagtctgcacaatattggatacttgtggccaatacttcgatagaggaagtagcaaacggaaattggactgcttcctggtctactttcagcgctatgtctggtggaagaagtctctcgaagtgtggaccaaagatcatccgtttcctattgatattgactacatgatctcagacactcttgagctgctcagaccgaagatcaaactgtgcaattcacttgaggaatctattcgacaggtacaggacttggaacgtgaattcttgataaaactgggtctcgtgaatgataaggactccaaagactcaatgacagaaggggagaatcttgaggaggacgaagaggaagaggaaggaggagcagaaaccgaagaacagtccggaaacgagtctgaggtcaacgagccagaagaagaagaaggctccgacaatgatgacgatgagggcgaggaggaagaggaagaaaacacagactaccttactgattctaacaaggagaacgagaccgacgaggaaaacacagaagtgatgataaaagggggtggactgaaacatgttccatgcgttgaggacgaggacttcatccaggctctggataagatgatgctggagaatctgcagcagaggtccggtgagtcagtgaaggtgcatcaactggacgtcgccattccacttcacctgaagtctcagctacgtaaagggcccccccttggcggcggcgagggtgaagcagagtctgcagacaccatgcctttcgtcatgctcactagaaagggcaataagcaacagtttaaaatcttgaacgttcctatgtcaagtcaactcgcggccaatcattggaaccaacagcaggcagaacaggaggaaagaatgcgtatgaagaagctgaccctggatattaatgaaaggcaggagcaggaggactatcaggaaatgctgcagagcttagctcaaaggccagcgccagctaacacgaatagggagcgccgcccccgctatcagcatcccaaaggtgccccgaacgctgatctcatattcaaaacggggggacgaagacggtag

SEQ ID NO: 232146 - DNA, 3819 bp, Artificial Sequence
  derived and/or modified sequence
atgcccgccgagagaaagaagcccgcttctatggaggagaaagacagcctgccaaataataaggaaaaggactgttcagagaggcgcactgtgtcctccaaggagcggcctaaggacgatatcaagcttaccgccaagaaggaagtgagtaaggctcctgaggataaaaagaaacgactggaagacgataaaaggaagaaagaggacaaggaacgcaagaaaaaggatgaggagaaagtgaaggccgaggaggaatcgaagaaaaaagaagaggaggaaaagaaaaaacatcaagaggaggagcgaaaaaaacaagaggagcaggccaaaaggcaacaagaggaggaggcagcagcccagatgaaagagaaagaagagagcatccagctgcatcaggaagcctgggaacgccatcacctgcgaaaggaactacgtagcaaaaaccagaatgctcctgactcacggcctgaggagaacttcttttctaggctcgattcctctctgaaaaagaatacagctttcgtaaaaaagctgaaaacaattaccgagcagcaacgggacagtctcagtcacgatttcaacgggctgaacctgtcaaaatacattgccgaagccgtagcctccatcgttgaggctaaacttaagatctcagacgttaactgtgcagtgcatctgtgctctttgttccaccaaagatacgcggattttgccccatcactgctgcaggtctggaagaaacatttcgaggctcgcaaagaggaaaagaccccaaacatcactaaactgagaactgatctgcggttcatagctgagctgacaatagtgggcatattcaccgacaaggaaggactgtctcttatttacgagcaactaaaaaatattataaatgccgaccgggagtcgcacacacatgtgtctgttgttatctccttttgtcgccactgtggcgatgatattgctggattggtgccccggaaggtgaaatcagccgcggaaaagtttaatctcagcttcccccctagtgagatcatctcgcccgaaaagcaacagcccttccagaatctccttaaagagtacttcaccagcctaacaaaacacttaaagcgggatcaccgcgagctgcagaatacggaacgacaaaatagacgcatcttgcattcgaagggtgaactttcagaggacaggcataagcagtatgaagagttcgcgatgagctatcagaagctgttagcaaactcacagtccttggcggatctgctggacgaaaatatgcccgatctgcctcaggacaagcccacacccgaagagcacgggcccggaatcgatatctttacccctggcaagccaggggaatacgacctcgaaggtgggatttgggaagacgaagacgcacgcaacttttatgagaacctcatcgatttgaaagcctttgtgccagccattttattcaaagacaatgagaaatcttgtcagaataaggaatctaacaaggatgacaccaaagaagcaaaggagtccaaagaaaataaagaggtcagttcccccgacgacctggagctggaattggagaatctggaaattaacgatgacacactcgagctcgagggtggtgatgaagccgaggacctgactaagaagctgctcgacgagcaagagcaagaggatgaagaggccagcaccggaagccacctgaagctgatcgttgacgccttcttacagcagttaccgaattgtgtgaatcgtgacctgatagacaaggctgctatggatttttgcatgaacatgaatacaaaggctaaccgcaaaaagctggtccgggccctgtttattgtgccgagacagcggctggacttgttaccattttacgcacggctggttgctacattgcatccctgtatgagcgacgtcgcagaggatctatgttcaatgcttagaggagattttaggttccatgtccgtaaaaaggaccagattaatatcgaaacaaagaataagaccgtccgttttatcggagaactcaccaagttcaagatgttcaccaagaatgatacattgcactgcctcaaaatgctgttatccgacttcagccaccaccacattgaaatggcgtgtacgctccttgagacatgcggccgttttctttttcgcagtcctgagtcccacctacgaactagtgtgttgcttgagcaaatgatgcgcaaaaaacaagctatgcatctcgacgcgcgctatgtcactatggtggagaatgcatattactactgcaaccctccacctgctgagaagacagtgaaaaagaaaaggcccccactgcaagagtacgtgagaaaactgttatacaaagatctttcaaaggtcaccactgaaaaggttttgcggcagatgagaaaattaccatggcaagatcaagaggttaaggactatgtgatttgttgtatgatcaacatctggaatgtcaaatacaactcaattcactgcgtcgcaaacctgctcgcagggcttgtgctgtatcaagaggatgtgggtattcacgtggtggatggtgttctcgaggatataagactggggatggaagtgaatcagccaaagttcaaccagagaagaatatcctctgccaagtttctcggggagctctacaactaccgcatggtagagagcgccgtgatcttccggacactctatagttttacaagttttggagtgaatccggatgggtcaccaagcagcttggaccccccagaacacctgtttcgcatccggctcgtttgtaccatcttggacacctgcggacaatacttcgatcgagggtcatctaaacggaaactggattgctttctcgtatatttccagcgttacgtgtggtggaagaaaagtcttgaagtttggactaaggaccaccctttcccaatagacatagattatatgatctccgacactctggagctgcttcggcccaagatcaagctatgcaattcgttggaggaatctatccgacaggtgcaggatctggagcgcgaatttctgatcaagcttggcctggtgaacgataaggactctaaagacagtatgacagagggggaaaaccttgaagaagacgaagaggaggaggaggggggcgctgagacggaggaacagagtggaaacgagagtgaagtgaatgagccagaggaagaggagggctccgataacgatgacgacgagggagaagaagaagaggaggagaacacagattatctgactgactccaataaggagaatgagactgacgaggagaacaccgaggtgatgattaaaggcggagggctcaagcacgttccctgcgtggaagacgaggatttcatacaagccttggataaaatgatgcttgagaatctccagcagcgatcgggagagtctgtaaaggtccaccaactcgacgtggccataccactccatttgaagtcccagctgcgtaaagggccaccattagggggcggggagggcgaagctgaatccgccgacaccatgccatttgtgatgcttacccgaaagggcaataagcaacagttcaagatcttaaatgtccccatgagtagtcagcttgcagcaaaccactggaaccagcagcaggctgagcaagaagagcgcatgcggatgaaaaagctgacactcgacatcaacgaacgtcaggaacaggaggattaccaggaaatgttgcaaagccttgctcagcggcccgcccctgccaacacaaatcgcgaacggcgcccccggtaccagcatcctaagggcgctccgaacgcagacctgatctttaagaccggcggtcgtcgccggtag

SEQ ID NO: 232147 - DNA, 3819 bp, Artificial Sequence
  derived and/or modified sequence
atgcctgctgagaggaagaagccagcctccatggaggagaaggacagcctgcccaacaacaaggagaaggactgcagcgagaggagaacagtgagcagcaaggagcggcccaaggatgacatcaagctgacagccaagaaggaggtgtccaaggcccctgaggacaagaagaagaggctggaggatgacaagaggaagaaggaggacaaggagaggaagaagaaggatgaggagaaggtgaaggccgaggaggagagcaagaagaaggaggaggaggagaagaagaagcaccaggaggaggagaggaagaagcaggaggagcaggccaagaggcagcaggaggaggaggccgccgcccagatgaaggagaaggaggagagcatccagctgcaccaggaggcctgggagcggcaccacctgaggaaggagctgcggagcaagaaccagaatgccccagacagcaggcctgaggagaacttcttcagccggctggacagcagcctgaagaagaacacagcctttgtgaagaagctgaagaccatcacagagcagcagagggacagcctgagccatgacttcaacggcctgaacctgagcaagtacatcgccgaggccgtggccagcatcgtggaggccaagctgaagatcagtgatgtgaactgtgctgtgcacctgtgcagcctcttccaccagagatatgctgactttgcccccagcctgctgcaggtgtggaagaagcactttgaggccaggaaggaggagaagacccccaacatcaccaagctgaggacagacctgcgcttcatcgccgagctgaccatcgtgggcatcttcacagacaaggagggcctgagcctcatctatgagcagctgaagaacatcatcaatgctgaccgggagagccacacccacgtgtctgtggtgatctccttctgccgccactgtggagatgacattgctggcctggtgcccaggaaggtgaagtctgctgctgagaagttcaacctgtccttccccccatctgagatcatcagccctgagaagcagcagcccttccagaacctgctgaaggagtacttcaccagcctgaccaagcacctgaagagggaccaccgggagctgcagaacacagagcggcagaacagacgcatcctgcacagcaagggggagctgtctgaagatagacacaagcagtatgaggagtttgccatgagctaccagaagctgctggccaacagccagagcctggccgacctgctggatgagaacatgccagacctgccccaggacaagcccaccccagaggagcacggccctggcatcgacatcttcacccctgggaagccaggagaatatgacctggagggcggcatctgggaggatgaagatgccaggaacttctatgagaacctgattgacctgaaggcctttgtgcctgccatcctcttcaaggacaatgagaagagctgccagaacaaggagagcaacaaggatgacaccaaggaggccaaggagagcaaggagaacaaggaggtgagcagcccagatgacctggagctggagctggagaacctggagatcaatgatgacaccctggagctggagggcggagatgaagctgaggacctgaccaagaagctgctggatgagcaggagcaggaggatgaggaggccagcacaggcagccacctgaagctgattgtggatgccttcctgcagcagctgcccaactgtgtgaacagagacctgattgacaaggccgccatggacttctgcatgaacatgaacaccaaggccaacaggaagaagctggtgcgggccctcttcatcgtgccccggcagaggctggacctgctgcccttctacgcccggctggtggccaccctgcacccctgcatgtctgatgtggccgaggacctgtgcagcatgctgcggggggacttccgcttccacgtgaggaagaaggaccagatcaacatcgagaccaagaacaagacagtgcgcttcatcggggagctgaccaagttcaagatgttcaccaagaatgacaccctgcactgcctgaagatgctgctgagtgacttcagccaccaccacatcgagatggcctgcaccctgctggagacctgtggccgcttcctgttccgcagccctgagagccacctgcggacctctgtgctgctggagcagatgatgaggaagaagcaggccatgcacctggatgcccgctacgtgaccatggtggagaatgcctactactactgcaaccccccacctgctgagaagacagtgaagaagaagaggcctcccctgcaggagtatgtgaggaagctgctgtacaaggacctgagcaaggtgaccacagagaaggtgctgcggcagatgaggaagctgccctggcaggaccaggaggtgaaggactatgtgatctgctgcatgatcaacatctggaatgtgaagtacaacagcatccactgtgtggccaacctgctggccggcctggtgctgtaccaggaggatgtgggcatccacgtggtggatggagtgctggaggacatccggctgggcatggaggtgaaccagcccaagttcaaccagaggcgcatcagcagcgccaagttcctgggggagctgtacaactacaggatggtggagagcgctgtgatcttccgcaccctgtacagcttcaccagctttggagtgaacccagatggcagccccagcagcctggaccccccagagcacctgttccgcatccggctggtgtgcaccatcctggacacctgtggccagtactttgaccggggcagcagcaagaggaagctggactgcttcctggtgtacttccagcgctacgtgtggtggaagaagagcctggaggtgtggaccaaggaccaccccttccccatcgacatcgactacatgatcagtgacaccctggagctgctgcggcccaagatcaagctgtgcaacagcctggaggagagcatccggcaggtgcaggacctggagcgggagttcctgatcaagctgggcctggtgaatgacaaggacagcaaggacagcatgacagaaggagagaacctggaggaggatgaggaggaggaggagggcggcgctgagacagaggagcagagcggaaatgaaagtgaggtgaatgaacctgaggaggaggagggcagtgacaatgatgatgatgaaggagaggaggaggaggaggagaacacagactacctgacagacagcaacaaggaaaatgaaacagatgaagaaaatacagaggtgatgatcaagggcggcggcctgaagcacgtgccctgtgtggaggatgaggacttcatccaggccctggacaagatgatgctggagaacctgcagcagaggtctggagagagcgtgaaggtgcaccagctggatgtggccatccccctgcacctgaagagccagctgaggaagggcccccccctgggcggcggggagggggaggccgagagcgctgacaccatgccctttgtgatgctgaccaggaaaggaaacaagcagcagttcaagatcctgaatgtgcccatgagcagccagctggccgccaaccactggaaccagcagcaggccgagcaggaggagaggatgaggatgaagaagctgaccctggacatcaatgaaaggcaggagcaggaggactaccaggagatgctgcagagcctggcccagaggcctgccccagccaacaccaaccgggagcggcggccccgctaccagcaccccaagggggccccaaatgctgacctgatcttcaagacaggaggaagaagaagatag

SEQ ID NO: 232148 - DNA, 3819 bp, Artificial Sequence
  derived and/or modified sequence
atgcccgccgagcggaagaagcccgccagcatggaggagaaggacagcctgcctaacaacaaagaaaaagactgtagcgaacggagaaccgtgtcaagcaaagaacgaccgaaggacgacatcaaattaacagcgaaaaaggaggtctccaaagctccggaggacaagaagaaaagattggaagacgataagcgtaagaaggaggacaaagaacggaagaagaaagatgaagagaaagttaaggctgaggaggagagtaaaaaaaaggaggaggaagaaaagaagaaacaccaagaagaggagcggaagaaacaagaggagcaggccaagagacagcaggaggaggaagcggcggcgcagatgaaggagaaggaggagagtattcagctgcatcaagaggcttgggaacgccatcacctccggaaggagctgcgaagcaagaaccagaacgccccagactcccgtccggaggagaacttcttcagcagactggacagctccctgaagaaaaacaccgcctttgtcaaaaagctcaagacgattactgagcagcagagagattctctgagccacgatttcaatggtctgaacctatcaaagtatattgcagaagcggtcgcctcaatcgtggaggcgaagctaaagatatcggacgtgaactgcgcagtccacctctgctcactgttccatcagcgatacgcggactttgccccaagtctgttgcaggtctggaaaaagcactttgaggctagaaaggaagaaaaaacacctaacattaccaaactgaggactgatttgagatttatcgctgaactcacaattgtgggcatctttactgacaaagagggactgtctctcatctatgagcagctgaaaaacataattaacgccgaccgcgaatctcacacgcatgtctctgtcgtcatttccttctgccgtcattgtggagatgacatcgccggcctggtgcctcgtaaggtcaagtcagcggctgagaagtttaatctctctttccctccttcggagattatctcacctgagaagcagcagccctttcaaaacttgctgaaagagtactttacaagcttaaccaaacacctaaaacgcgatcatcgggaattacaaaacacggaacggcagaatcgccgcatcctccattcgaagggggaactgtccgaggatcggcacaaacagtacgaagagttcgccatgtcttatcagaaactgctcgctaactcccagtccctcgccgacctcctcgacgagaatatgcccgatctcccccaagacaagcctaccccagaggagcatggccccgggattgatatctttacacccggcaagccaggggaatatgatctcgagggaggcatttgggaagatgaggatgctcgcaatttttatgagaatctcatcgatttgaaagcctttgttcccgccattctgtttaaggacaatgaaaaatcctgccagaacaaggagtccaacaaggacgacacgaaggaagccaaggagtctaaagaaaataaggaagtgtcatcccctgacgacctggaattggaactggaaaatctggagattaatgacgatactctggagctggagggaggcgatgaggctgaagacctaaccaagaagctcctcgatgaacaggagcaggaggacgaggaagcttcaactgggagccatcttaaactgattgttgatgccttcctgcagcagctccctaattgcgtcaacagagatctgatcgataaagccgctatggacttctgtatgaacatgaataccaaggctaaccgcaaaaaacttgtgagggctctctttattgttccgcgccagcgcttggatctccttccattttacgctagactcgtggccaccctccacccctgcatgagcgacgttgccgaggacctgtgtagcatgctgagaggagacttccgcttccacgtgcgcaagaaagaccaaatcaatatcgagactaaaaataagacagtacgcttcatcggagaactcaccaagtttaagatgttcactaaaaacgatacattacactgcctgaagatgcttcttagtgatttctctcaccaccacattgaaatggcgtgtaccttgcttgagacctgtgggaggtttctttttcgcagccccgagtcccacttacgcactagcgtgttacttgagcagatgatgcgcaagaaacaggcaatgcatctggacgctcgttacgtgacgatggttgagaacgcttattactattgcaatccacccccggccgaaaaaacagtaaagaagaaacgccccccacttcaggagtatgttaggaagctgctgtataaggacctatcaaaagtgactacagaaaaggtactccgacagatgagaaaactgccctggcaggatcaggaggttaaagattacgttatctgctgtatgattaacatctggaatgttaagtacaacagcattcactgtgtggctaatctgctggctgggctggtgttataccaggaggatgtaggcatccatgtcgtggatggggtgctcgaggacatcaggttgggcatggaggttaaccaaccaaaattcaaccagcggaggatctcttctgcaaagtttttaggtgagctctacaactatcggatggtcgaaagcgcggtgatctttagaacactgtactccttcacttcttttggagttaaccccgacggctctcctagttctcttgatcctcccgaacacctgtttaggattcggctggtgtgcactattctggacacctgtgggcagtattttgatcggggctcctccaaaaggaaactcgactgcttcctcgtgtatttccaacgatacgtgtggtggaagaagtccctcgaggtgtggacaaaggaccatccatttccgattgacatagattatatgatctccgacacactggagctgctgaggcccaagatcaagctgtgcaattccctcgaggaatctattaggcaggtgcaggatctggagcgggaattcttgatcaagttaggcttggtcaatgacaaggactctaaggacagtatgaccgaaggcgaaaatctcgaagaggacgaagaagaagaagagggcggggctgagacagaggaacagtccggtaatgagtctgaagtgaacgagcctgaagaggaggaaggttctgacaacgacgatgatgagggagaggaggaagaggaggagaatacagactacctcactgacagtaacaaggaaaacgaaaccgacgaggagaacaccgaagttatgattaagggtgggggtttgaagcacgtaccctgtgtggaagatgaagatttcattcaggccctggataaaatgatgctagaaaatctccagcagaggagtggagaatcagttaaggtgcatcagctggacgttgctattccacttcaccttaaaagccagttaagaaaaggtcccccgctggggggcggagaaggtgaagccgagtcggccgacacaatgccgttcgtcatgctgacccgcaagggcaataaacaacagttcaagatactgaacgtgccaatgtccagccagcttgccgcaaaccattggaatcagcagcaagccgagcaggaagaacgtatgcgcatgaaaaagctaaccttggacattaacgagcgtcaggaacaggaggactatcaggagatgctgcagtccctcgcacagaggccggctccggcaaacaccaatcgggagcgcaggccacgctaccagcatcctaaaggagccccaaatgctgatctgatatttaaaaccggcggccgtcggagatag

SEQ ID NO: 232149 - DNA, 3819 bp, Artificial Sequence
  derived and/or modified sequence
atgcccgccgagcggaagaagcccgccagcatggaggagaaggactcactccctaacaataaggagaaggactgttcggaacggaggacagtgtcttctaaggagcgacccaaagacgacatcaaactgaccgccaaaaaggaagtgtctaaggcccccgaggacaagaagaagcgtcttgaggacgataagcgaaaaaaggaagacaaggaacggaaaaaaaaagatgaggagaaagttaaggcagaagaagagtctaaaaaaaaagaggaggaggagaagaagaagcatcaggaggaggagcgcaagaagcaggaagaacaggccaaacgccaacaggaagaggaagcggccgctcagatgaaggaaaaggaagagtcaatccaattacaccaagaagcctgggaaagacaccatttaagaaaggaactgagaagcaaaaaccagaacgctccagattcacgcccagaggaaaacttcttttcgcgtctggacagcagcctcaagaaaaataccgcttttgtcaaaaaactgaaaaccataacggagcagcagcgcgattcactcagtcatgattttaatggtctgaatttgtctaagtacattgcggaggcagtggccagcatcgtggaggccaagctcaagatctctgatgtgaactgtgccgttcatctctgttcactgtttcaccaacggtacgcggattttgcccccagcctcctgcaagtctggaaaaagcatttcgaggcacggaaagaagaaaagacgcctaatattactaaacttcgcacagacctcagattcatcgcagagctgacaatagtgggtatcttcacagacaaggagggactgtctctgatctatgagcagctaaaaaacatcatcaacgcggaccgagagtcccatactcacgtaagtgtcgtgatcagtttctgtcgtcactgcggcgacgacatagctggattggtgcccaggaaggtcaagagcgcagctgaaaaattcaatctcagcttcccacctagcgagattatctccccggaaaaacagcagccttttcagaacctcctaaaggagtatttcacgtcattgactaagcacctgaaaagagatcaccgcgagctccaaaacacagagcggcagaaccggcgtatcctgcactctaaaggagagctgtctgaggatcggcataagcagtacgaggaatttgccatgagctatcagaagctgcttgccaactcccagtcactggccgatcttctggacgagaacatgcccgacctgccccaagataagccaacacccgaagagcacggccccggtatcgatattttcacccccgggaaaccaggggagtacgacctggagggcggcatatgggaggacgaagatgctaggaacttttacgaaaacctcattgacctgaaagcatttgtgcccgccatcctgtttaaggacaatgagaaaagctgccagaataaagagtcgaacaaggatgatactaaagaggccaaagagtccaaggaaaacaaagaggtgtcctcccctgatgatctagagctggaactcgagaacctggagatcaacgacgatactcttgaacttgagggaggggacgaggccgaggacctgacaaaaaaactcctggacgaacaagagcaagaagacgaagaagcctcgacggggtcacatcttaaattgatagtagatgcgttcctgcagcagctacccaattgcgttaatcgtgatctgattgataaggccgccatggacttttgtatgaacatgaataccaaagcaaatcgcaagaaattggtgagggctttgtttatcgttcccaggcagcggctcgacctgctgcccttctacgctcggctggtcgctaccctgcacccctgcatgtctgacgtggccgaggatctctgtagcatgctgcgaggcgatttccgctttcacgtgcgcaaaaaggatcagattaacatcgaaaccaagaacaagactgtgaggtttataggcgagttaaccaagtttaaaatgttcaccaagaacgatactcttcattgcttgaagatgcttctgagtgatttcagtcatcaccacattgaaatggcttgtaccttgcttgagacatgtggaagatttctcttccggtctccagaatctcacttgcggacatccgttctgctggaacagatgatgcggaagaaacaagctatgcaccttgatgcacgatatgtcacaatggtggaaaacgcctactactactgcaatccccctccagctgaaaagacagtcaaaaagaagagacccccactgcaagagtacgtgagaaaactgctgtacaaagacttaagcaaggttactacggagaaagtgctgcggcagatgcgaaaactgccgtggcaggatcaggaggtgaaagattatgttatctgctgcatgatcaatatctggaatgtgaagtataacagcatccactgcgttgctaatctcctggccggactcgtcctgtatcaggaagacgtgggaattcatgtcgtggacggggtgttagaagacatcagactcgggatggaagtgaatcagccaaaatttaatcagaggagaattagtagcgccaagtttctgggagagctctataattaccgcatggtcgagtccgcagtaattttccggacattgtactcattcacttcctttggggtgaatcctgacgggagccctagttcactggatcctcctgagcatctgtttaggatcagactggtttgcacaattctggatacctgtggtcagtattttgatcgaggcagttccaagcggaagttggactgcttcctcgtttatttccaaagatatgtgtggtggaagaagagcttggaggtatggaccaaggaccacccctttcctatcgatatcgattatatgatttccgatacgctcgagcttctcagacctaagatcaagctatgtaatagcctcgaggagtcaatcaggcaagtgcaggacctagagcgcgagtttctgattaagttaggattagtgaatgacaaggattccaaagactccatgactgaaggagaaaacttagaggaggatgaagaagaggaagagggcggggctgagactgaggagcagtccgggaatgaaagcgaggtgaacgaacctgaggaggaagaggggtctgacaacgatgacgatgaaggggaggaggaggaggaagagaatacagattacttaacggactctaacaaggagaacgagactgacgaggaaaatactgaagtgatgattaagggaggaggcctgaagcatgtgccttgtgtcgaagatgaagatttcattcaggctctggataagatgatgctcgaaaatctgcaacaacggagcggcgagtcagtcaaagtgcaccagcttgatgtcgcaatcccgctacatttaaaaagtcagcttcgcaaaggaccccctctgggaggcggtgagggggaggcagagtccgccgacacaatgccctttgtgatgcttacaagaaaaggcaacaagcagcaattcaagatactcaacgtgccgatgtcctctcagctggctgctaaccattggaatcaacagcaagctgaacaggaggagaggatgcgcatgaaaaagctcaccctggatatcaatgagcgacaggagcaggaagactatcaggagatgctccaatcccttgcccagcggccagctcccgcaaataccaatagagaacgcaggccccgataccagcaccccaaaggagctcctaacgcggatcttattttcaagaccgggggtaggaggaggtag

SEQ ID NO: 232150 - DNA, 3819 bp, Artificial Sequence
  derived and/or modified sequence
atgcccgccgagcggaagaagcccgccagcatggaggagaaggactctttacctaataacaaagagaaagactgttcagagagaaggaccgttagttcaaaagaaaggccaaaggacgacatcaaactgacagctaagaaagaggtgagtaaagcacccgaagacaagaagaagcggttggaggatgacaagaggaagaaagaggataaggaaaggaagaaaaaagatgaggaaaaagttaaagccgaggaggaatctaagaaaaaggaagaagaggagaagaagaaacatcaggaagaggaacgcaagaagcaggaagagcaggctaagcgccaacaggaagaggaggctgctgcccagatgaaagagaaggaggagtccatccaacttcaccaggaggcctgggaaagacaccaccttcgcaaggaattacgctctaaaaatcagaatgcccctgacagccgcccagaggaaaactttttttcccggctggattccagcctgaagaagaatacggcctttgtgaagaagttgaagaccatcactgagcagcagcgtgattctctgtctcacgacttcaatggcctgaacctgtccaaatatatcgccgaagctgtggcatcaattgtcgaagccaagcttaagatttccgacgtgaattgtgccgtgcacctctgcagcttattccatcagcgctatgccgattttgccccctcacttcttcaggtctggaagaaacatttcgaagccaggaaagaagaaaagactcctaacattacaaaacttcggacagacctgcggttcatcgctgaactcaccattgtggggatctttacagacaaagagggcctgtccctgatttatgaacaattgaagaatatcatcaatgctgatagagagtctcacacccacgtctctgtggtgatctctttctgccgccattgcggcgatgacatcgctggccttgtaccacgtaaagtcaagtcagccgccgagaagttcaatctgagcttcccccccagcgagattatctcccctgaaaaacagcagccattccagaatctgttgaaggaatattttacctctttgaccaagcacctgaaaagagatcacagagaactgcagaacaccgagcgacagaatcggcgaattttgcacagcaagggtgaattgtccgaagacagacataagcagtatgaggaattcgccatgagttaccagaaactgctggccaactctcagagcctggccgacctattggatgaaaacatgcccgatctcccgcaagataaacccacccctgaggagcacggccctggaatcgacatcttcacccccggtaaaccaggggaatatgatcttgaagggggcatttgggaggatgaagacgcgcgcaatttctatgagaatctgatcgatctcaaggcctttgtgcccgcaatcctgttcaaggacaacgaaaagtcttgtcagaataaggaatccaacaaggatgatacaaaagaggccaaagagtcgaaagagaataaggaagtgtccagccctgacgacctggagctggaactggagaatctcgaaatcaacgacgacaccttggaactggagggcggggacgaagctgaggatctaacaaaaaagctgctggatgagcaggagcaagaagatgaggaagcatcgacagggagtcaccttaagttgattgtggacgccttccttcagcagctgcctaactgtgtaaaccgcgatctaatcgacaaagcagccatggacttctgtatgaatatgaataccaaagcaaatagaaaaaaactcgtgcgggctctcttcattgttccaaggcagaggttggaccttttgcctttttatgctaggttggtggccacgctgcacccgtgtatgagcgatgtcgccgaggatctgtgttcaatgctcagaggagatttcagattccatgtgcgcaaaaaagatcaaatcaacatcgaaaccaagaataagaccgtcagatttatcggggagctgaccaaatttaagatgtttacaaagaatgacactctgcactgtcttaaaatgctcctttctgacttttcccaccaccacattgaaatggcttgcacactgctggagacttgtggtcgttttctcttcaggtccccagaaagccatctgaggacaagtgtcctgctcgagcaaatgatgaggaaaaaacaggctatgcaccttgacgcacgatatgtaacaatggtggaaaacgcttactactactgcaacccaccacccgcagaaaagacagttaaaaaaaagagacctccactgcaggagtacgtaagaaaactgctgtataaagacctctccaaggtgacaaccgagaaagttctcagacaaatgagaaagctgccctggcaggaccaggaggtgaaggattatgttatttgttgcatgatcaacatttggaacgtgaaatacaatagtatccattgcgtggcgaatctcctcgcgggattggtgctgtatcaggaagatgttggaattcacgtggtagatggggtgcttgaggatattagacttggcatggaagttaaccaacccaaattcaatcaacgtagaatctcctcggctaaattcctgggggaactctacaactatcggatggtggaaagtgccgtcatattccgtacactctatagtttcacgtcttttggagtcaaccccgacgggagcccatccagtttggatccacctgagcatctgttcaggattcgcctggtgtgtaccatattagacacttgtggacagtattttgatcgcgggtcatccaagaggaaattagattgtttcctcgtctattttcagagatatgtatggtggaagaagtctctagaggtatggactaaagatcatccctttcccatcgacattgactatatgatctccgacaccctggagttactgcgccccaaaattaagctctgcaatagcctcgaggagtctatccgacaggttcaagacttagagcgcgagttccttataaagctgggattggttaacgataaagattcaaaggactctatgaccgaaggagagaatcttgaagaagatgaggaggaagaggagggcggcgccgagaccgaagagcagtctgggaacgaatcagaggtcaacgaaccagaggaggaggaagggagtgacaacgacgatgacgagggtgaggaggaggaggaggagaatacagattaccttacagactccaacaaagaaaacgaaaccgacgaggagaacactgaagtgatgatcaagggcgggggactgaagcatgtgccttgcgtcgaagatgaggatttcatacaggctcttgataagatgatgctcgagaatctacagcagagatcaggcgagagtgtgaaggtgcatcagctagacgtagcaataccgttgcacctcaagtcccagcttcgcaagggtcccccactgggcggcggcgagggcgaggccgaatctgccgatactatgcccttcgtgatgctgacacgcaaggggaacaaacagcaatttaagatccttaatgtgcctatgagcagtcagctggcggccaatcattggaaccaacagcaagctgaacaggaggagagaatgcgaatgaaaaagctgaccctggacattaacgagagacaggagcaggaggattatcaggagatgctgcagagtctggcccagcgccctgcgcctgcaaatacgaatagggagcgcagacctcgctaccagcatccaaaaggtgcgcctaacgcagacctgatctttaaaacaggaggtaggcgccgatag

SEQ ID NO: 232151 - DNA, 3819 bp, Artificial Sequence
  derived and/or modified sequence
atgcctgcagagagaaaaaaaccggcatctatggaggagaaggatagcctaccaaacaataaagaaaaagattgctccgaacgcagaaccgtctcatccaaagaacgtcctaaagatgacattaaacttacagcaaaaaaagaggtatccaaagccccagaggacaaaaaaaagagattagaagacgataaaagaaagaaggaagacaaagaaagaaagaagaaggacgaagagaaggtgaaggctgaggaggagtccaagaaaaaagaagaggaagagaaaaagaaacaccaggaggaggagcgcaagaaacaagaggagcaggcaaaaagacaacaggaagaagaagctgccgctcagatgaaggaaaaggaagaatccatccagttacatcaggaagcctgggagaggcaccatttacgaaaagagctgaggtccaagaatcagaacgcccctgactcacgccctgaggaaaactttttttcacgcctggattcttccctaaagaagaacacagcttttgttaagaagctcaagactattacggaacagcagagagactccttaagccatgattttaacgggcttaacttatccaaatacatagcagaagccgtcgcttctatagtggaggcgaagttgaagatctccgacgtgaactgtgcagttcacctttgttctctcttccatcagagatatgccgattttgccccttcgttgttgcaggtgtggaagaagcacttcgaggcaaggaaagaggaaaaaaccccaaacatcacaaagttgaggaccgacctgcgatttattgcagaactgacaatcgtgggaattttcaccgataaggaaggtctgtcactgatttacgagcagctgaaaaacatcattaacgccgatcgcgaatcccatacacacgtaagtgtggttatctctttttgtaggcactgtggggacgacatagccggtttggtcccaaggaaggtgaaaagcgccgctgaaaagtttaatctcagtttccctccctctgagatcattagtcccgagaaacagcaaccttttcagaatcttctcaaagaatactttaccagcctgactaaacatctcaaacgagaccatcgggagttacagaacactgaacgccagaatcgtcgcattctgcacagtaaaggagagttgtccgaggacaggcataaacagtacgaggagttcgcgatgtcctatcagaaactgctggcaaactcccagagtctggcggacctcctcgacgaaaatatgcccgatctccctcaggataaaccgacgccagaagagcacggtccaggtatcgatatctttactccgggaaagccaggtgaatatgatctggaggggggtatttgggaggatgaggatgccaggaacttttacgagaacttgatagacttgaaagcctttgttcccgctattctgttcaaggacaatgagaagtcttgccaaaacaaagagagcaacaaagatgacactaaagaagccaaagaaagtaaggagaataaggaggtgtccagcccagacgatctcgagcttgaactggaaaaccttgagatcaatgacgataccctggagttggaaggcggagacgaagccgaggacctgacaaaaaaactgctggacgagcaagaacaagaagacgaggaggcgtcaactggttcacacctaaaactcattgtggacgcttttctccagcagctccccaactgcgttaaccgggatctgattgataaagccgctatggatttctgcatgaacatgaatacaaaggccaatcggaaaaagttggtgcgggctttgtttattgtccccaggcagcgcctggaccttttgcctttttacgcccgactcgtggccacactgcacccgtgcatgagcgatgtggcagaggacctgtgtagcatgctgcggggagacttccgcttccatgtgcgtaagaaagaccagattaatattgagactaaaaataagaccgtgaggtttattggcgaattgactaaatttaagatgttcacaaagaacgacaccctgcactgtctgaaaatgctgttgagcgacttctcacatcaccacatcgaaatggcctgcaccctgctcgagacctgcggacgctttttgtttcgaagtccagagtctcacctccgaacgagtgttctgctcgagcagatgatgcgtaaaaagcaggctatgcacttggatgcaagatacgtaaccatggtggaaaacgcatactactactgtaatcccccacctgccgagaaaacagtcaaaaagaaacgtcccccattgcaggaatacgtacgcaagcttctgtataaagatttaagcaaggtgactactgaaaaagtgttgcgccaaatgcgtaaactgccctggcaagatcaggaagtgaaagactacgttatttgctgtatgataaacatctggaacgtgaagtataattccattcattgtgtcgccaaccttcttgctggattagtgttgtaccaggaggacgtaggcattcacgtggtggatggggtgcttgaggatatcagacttggcatggaggttaatcagccaaagtttaatcaacgaaggatatcctccgctaaattcctgggggagttgtataattatagaatggtagagagcgccgtcatctttcgcacactgtattcattcacctcctttggcgtcaatcccgacggctctccgtcatctcttgaccctcctgagcacctgttccgtattcggctggtgtgtacaatcttggatacatgcggccagtattttgacagaggtagtagcaaacgcaagctggattgtttcctggtttatttccagcggtatgtgtggtggaagaaatcccttgaggtgtggaccaaagaccacccctttccaatcgatatcgactatatgatctctgacaccctcgagctgttaagaccaaagataaagctgtgtaattcattggaagaatcaatcaggcaggtgcaggacttagaacgagagtttttaatcaagcttggcctcgtgaacgataaggactctaaagattctatgacggaaggcgaaaatctggaggaagacgaggaagaggaggaggggggtgcggagacagaagagcaatctggtaacgagagcgaagtaaatgagccggaggaggaggaaggcagcgacaacgatgatgacgagggtgaggaggaggaagaggagaatactgactatctgacagattcaaataaggagaatgagaccgatgaagagaacactgaggtgatgattaaaggcggtggactaaaacacgtcccctgcgttgaggacgaggattttatacaggctttggacaaaatgatgctggagaatttacagcagcgctcaggcgaaagcgtaaaggtgcatcagctggatgtggccatccccttgcacctcaagtcacagttacgaaaaggacctccactgggtggcggtgaaggagaagccgaatcagccgacaccatgccattcgtcatgctcacgagaaagggaaacaagcaacagtttaaaattctcaacgtgccaatgagcagccagctcgctgcaaaccattggaaccagcagcaggcagagcaggaagaacgcatgaggatgaagaaattgaccctggacattaacgagcgccaggagcaggaagactaccaggaaatgcttcaatccttggcacagcgacccgcaccagcaaatacaaatagggaacgccgacccagatatcagcaccccaagggtgcgcctaacgctgacctcatcttcaagactggcggtagaagacggtag

SEQ ID NO: 232152 - DNA, 3819 bp, Artificial Sequence
  derived and/or modified sequence
atgcctgcagaaaggaagaaacccgcatccatggaagaaaaagacagtctccccaacaataaagaaaaggactgctccgaacggagaacagtaagcagcaaggaacgaccaaaggatgatatcaagctgactgccaagaaagaggtgtcgaaggccccagaagataagaagaagagactcgaggacgacaagaggaaaaaggaggataaagaacggaaaaaaaaggacgaggaaaaagtgaaggccgaagaggagtctaagaagaaagaggaggaggaaaagaaaaagcatcaagaggaggaaagaaagaagcaggaggagcaggccaagcgacaacaagaggaggaggccgctgctcaaatgaaggagaaagaggagtctatccagttgcaccaggaagcttgggagagacaccaccttcgcaaggagctgcgaagtaaaaaccagaacgccccagactcccgccctgaggagaatttcttctctcgcctggacagtagtctgaagaagaacacggcctttgtgaagaaactgaagactatcactgagcagcaacgagactccctttcacatgatttcaatggccttaatctcagtaagtacattgccgaggccgtggcctccattgtggaagcaaagttgaagatcagcgacgtgaactgtgctgtgcatttgtgctccctcttccaccagaggtacgcggatttcgccccttccctgctccaagtgtggaaaaaacacttcgaggctcggaaggaggagaagactcccaacataacaaaactgaggactgacctgaggttcatcgcggagctgactattgtgggtattttcaccgacaaggaaggactgtccctcatctacgaacagctcaaaaacattatcaacgcagatcgcgaatctcacacccatgtttctgtggtcatctctttttgcaggcactgcggcgacgacatcgctgggcttgttcccaggaaggttaaaagcgctgcggaaaagtttaacttaagcttccctccatctgagatcatctccccggagaaacagcagccatttcagaacttgctcaaagagtatttcacctcactgacaaagcaccttaaaagagatcacagagagctccaaaacaccgaacggcaaaacagacgtatcctccactcgaagggtgaactgtctgaggacaggcataagcaatacgaggaattcgccatgagctaccaaaagctcctggcgaacagtcagagtctggccgatctactggatgaaaatatgcccgatctacctcaagacaaacccacacctgaagagcatggccctggcatcgatatttttacccctggaaagcctggcgagtacgatctggaaggcggaatatgggaagacgaggatgctcgcaacttctacgagaacttgatagacctaaaagccttcgtgcccgcaatcctgtttaaggacaatgagaaatcctgtcaaaacaaggaatcaaataaggacgataccaaggaggccaaagaaagcaaagagaacaaggaagtctccagccctgacgaccttgaattagaacttgaaaacctggaaatcaatgatgacacattggaactcgaggggggagacgaggctgaagacctgaccaaaaagctgctagacgagcaagaacaggaggacgaagaggcctccaccggcagtcatctgaagctgatcgtggacgccttcttgcaacagctgccgaactgtgtgaacagggacctaattgacaaggcagcaatggatttttgcatgaacatgaacacaaaagccaaccgcaagaagctggttcgtgctctttttattgtcccgaggcaacgtctggacctgctgcctttttacgcaagactggtggcaacgcttcacccctgcatgagcgacgttgcagaagatctctgtagtatgctgcgtggcgactttcgctttcacgttcgaaagaaggaccagatcaatatcgaaacaaaaaataagacagtgcgctttataggggagctgaccaagttcaagatgttcaccaaaaacgacacgctccactgcctgaagatgctgctcagcgatttctctcatcaccatatcgaaatggcctgcactctcttagaaacctgtggtagatttctctttcgctcaccagagagccacctgcgcacatccgtgctgctggagcagatgatgagaaaaaaacaggctatgcatctggacgcccgatatgtcaccatggtggaaaatgcctattactactgcaacccaccaccggcagaaaagaccgtaaaaaaaaagagaccgccacttcaggagtacgtgcgtaagctgctttacaaagacctctcaaaggtgaccacagagaaagtcctcagacagatgagaaaactgccttggcaagaccaggaggtgaaggattacgtgatatgttgtatgataaatatttggaacgtgaaatacaacagtatccactgtgtagctaatttacttgcaggcctggtgctgtatcaggaggacgtgggcatacacgtcgtggacggagtgttggaggatatccgcctgggaatggaggtgaatcagccgaagtttaaccaacggaggatctcgagtgccaaatttctgggggaactctacaactacagaatggtggagtccgcggtcatctttcggactttgtattcttttacttcattcggagtcaatcccgatggctcgccttccagtcttgatcccccagagcacttgtttcgcataaggctagtttgtacaattttggatacttgcggccagtacttcgatcggggtagcagcaaaaggaagttggactgtttcctggtctattttcagcggtacgtgtggtggaagaagagccttgaagtctggaccaaggaccaccccttccctatagacattgattacatgatctctgacacactggaactgctgagaccaaagatcaaactgtgtaacagcctcgaggagtcaatacgacaggtgcaggatcttgagcgcgaattcctgatcaaactaggcctggtgaatgataaagacagtaaagacagcatgacagaaggggaaaatcttgaagaggacgaggaagaagaggaaggtggggctgaaactgaagagcaatccgggaacgagtcagaagtgaatgagcccgaggaggaggaagggtctgacaacgacgacgatgaaggagaggaggaggaggaggagaatacggattacctgaccgactctaataaggagaatgagactgacgaagaaaacactgaagtcatgattaagggcggaggactgaagcacgttccctgtgtggaagacgaagatttcattcaggccctagacaaaatgatgctcgagaacctccaacagcggagtggcgagtctgttaaagtccaccaacttgacgtagcaattccattgcatttaaagagtcaattgaggaaggggcctcccctaggcggtggtgagggggaagccgaatccgctgataccatgcccttcgttatgctgacccggaaaggaaacaagcagcagtttaaaatactgaacgtccccatgtctagccagctggccgcaaaccactggaaccaacaacaggcagagcaggaggaacgaatgcggatgaagaaacttactttggacatcaacgaacgacaggaacaggaggactatcaggagatgctgcagtccctggcacagaggccagcacccgctaacacaaatagagaacgccgaccaaggtatcagcatcctaagggtgctcccaacgcagatttaatcttcaagaccggcggaagacggaggtag

SEQ ID NO: 232153 - DNA, 3819 bp, Artificial Sequence
  derived and/or modified sequence
atgccagccgagcggaagaagccagcaagcatggaagagaaggattcgctgcctaataataaagagaaggactgctctgagcggcgtacggtttcaagtaaagaaagacctaaggacgatattaagctgacagcgaagaaggaagtgtctaaagccccagaagataagaaaaagcgacttgaagatgataagcggaaaaaggaagacaaagaaagaaagaaaaaggatgaggaaaaggtaaaagctgaggaggaatctaaaaagaaagaggaagaggaaaagaagaaacatcaagaagaagagcgaaaaaagcaggaggagcaagctaaacgccaacaagaagaggaggctgcagcccaaatgaaggaaaaagaggagagcattcagcttcatcaggaggcctgggagagacaccatctgagaaaagagctgcggtcaaagaaccagaacgcaccagatagcaggcctgaagagaactttttctcaaggcttgactcctcactgaaaaagaacacagccttcgtgaagaagctgaaaacaataactgaacaacagcgcgattctttatcacacgacttcaatggcctcaacctgtccaagtatatcgccgaagccgtggcttcgattgtggaggccaagctcaagatcagcgacgtcaattgtgccgtgcacttgtgcagtcttttccatcagcgttacgcagactttgcacctagtctgttgcaggtgtggaaaaagcactttgaggctcgtaaagaagagaagacacctaacatcacaaaactcaggacagatttacgcttcatagctgaattgacaatcgtcggtatttttactgacaaggagggattgagtttgatttacgaacagctcaaaaacattatcaatgcggatcgcgagtctcacacccatgtgtccgtcgttattagcttctgcaggcactgtggggacgatatcgccggactagtgccccgtaaggtgaagtcagcagccgaaaaatttaatctgtcatttcctcctagcgaaataatttcgccagagaagcagcagcccttccaaaatttgcttaaagaatatttcacgagcctgaccaagcacctgaagagggatcatcgcgagttgcagaataccgaacggcagaaccgacgaatcctccatagcaagggagagctctcagaggacaggcataagcagtatgaagagtttgcgatgagttatcagaaattgctcgcgaatagccagagtctcgctgacctgttggacgagaacatgccagacctacctcaggacaagcccacccctgaagagcatggcccagggattgacatcttcactcctgggaagcctggggaatacgatctggagggcggaatctgggaagatgaagatgcaagaaacttttacgagaatctaatcgatctcaaggcgttcgtgcccgctatactgtttaaagataacgagaagtcatgccagaacaaagaatcaaataaagacgacacaaaggaagcgaaagagtccaaagaaaataaggaagtctcaagcccagacgatctcgagcttgaactggagaatctggaaataaatgacgacactctggagctggagggaggagatgaagcagaggatctgacaaagaaactgctggacgagcaggaacaggaagatgaggaagcctctactgggtcccacttgaagctgatagtggatgcattcttacaacaattgcctaactgcgttaatagggatttgatcgataaagccgctatggacttctgtatgaatatgaataccaaagcaaaccgaaaaaaactcgtacgcgctctttttattgtgccacgccagagactggatctgctgccattctacgcaagattagtcgccacgctccacccgtgtatgtcagatgtcgcagaggatctatgctccatgctgaggggagatttcaggttccatgttaggaagaaggaccaaatcaatattgagacaaaaaataaaaccgtgcgctttatcggcgagctgacgaaatttaagatgttcaccaagaacgacactctacactgtttgaagatgctgctttccgatttctcacatcaccacatcgaaatggcctgcactctgctcgaaacctgcggtcggtttcttttcaggagccctgagtctcacctccgcacatctgttctgctggagcaaatgatgagaaaaaagcaagctatgcatttagatgcgagatacgttacaatggtcgagaatgcctactactattgcaatccgccaccagcggagaagaccgtgaaaaagaagcgtccacccttgcaagaatacgtgcggaaattgctgtacaaagatctctctaaggtgaccaccgagaaagtgctgaggcagatgaggaaactgccatggcaagaccaggaggtgaaagattacgttatctgctgtatgatcaacatatggaacgtgaagtacaacagtattcactgtgtggctaatctgctggccggtctggttttgtatcaggaagacgtaggtatccatgtcgtagacggcgtgttggaagatattcggctggggatggaagtgaaccaaccgaagttcaaccagcggagaatttcttctgccaagttcctcggagaactgtataattaccggatggtcgaatctgctgtaatttttagaacactatacagcttcacttcatttggagtgaatccagatggcagtccttcttccttagatccaccagagcacttgtttaggattcggctggtatgcaccatactggatacgtgcgggcagtactttgatcgaggcagctctaaacgtaagcttgactgctttcttgtgtactttcaaagatacgtctggtggaaaaaatcactggaggtctggactaaggaccaccccttcccgatcgatattgattacatgatttccgacactttggaattactgcggccaaaaatcaaactgtgtaactcgttggaagaaagcatccgccaggtacaggatcttgagcgcgaattcctcattaaattgggactggtgaacgacaaggactctaaggattccatgacagaaggcgaaaacctggaggaagacgaagaggaagaggagggtggggctgaaaccgaggagcaaagcggcaatgagtccgaggtgaatgagcccgaggaggaggagggctctgacaacgacgacgacgagggggaggaagaggaagaggagaatacagattatctgaccgactcaaataaagagaatgagactgacgaagagaatacagaggttatgataaagggcggtggtttgaagcatgtgccatgtgtggaagacgaggacttcatccaggccctagataagatgatgcttgaaaacctgcaacagaggtcaggggaaagcgtgaaggtgcatcaactggacgtggccatccccctgcacctcaagagccagctgcgaaagggcccacctttggggggaggagaaggagaagccgaatctgctgacacaatgccatttgtgatgctgacaaggaagggtaataagcagcagtttaagattctcaacgtgccaatgtcatcgcaactcgccgctaaccattggaatcaacagcaggccgaacaggaagaacgcatgcgcatgaagaagctcacccttgacatcaatgagcgacaggaacaggaggattaccaggaaatgctccagtctctggctcagagaccagcaccagcaaacacgaatagggaacgacggcctcgctatcagcatccaaagggagccccaaatgctgacctgatctttaagaccggcggaagacgccgttag

SEQ ID NO: 232154 - DNA, 5569 bp, Artificial Sequence
  derived and/or modified sequence
gctgaaatactgacattgaatattatatgaaatagtgaactgccatctttcatggttgtcaaatgctagggttaaagctgactcaaaatgttcacagatatattctgaagtatttacaattaaatgacatattgttttggagttgatagtggctgaatctgagtgatgggtacgtggaggttccttatattatgctctctacttttgtctgggcttggatttttccttataaaaagtaaaaaacaagtacttagacataggcctaactaataatgataggatgtggaatgtgatgaataacttattttgtaacagaaatagtattcattttacctgcctttatttactcttttacaattgccaagttgcattaatatgttctgtttaaaaaaatagtgtgatatcattttaaaaagtcactgcatctatggtactgacattctttccctcttacagattgtcctgggtcacataatgccagctgagcgtaaaaagccagcaagtatggaagaaaaagactctttaccaaacaacaaggaaaaagactgcagtgaaaggcggacagtgagcagcaaggagaggccaaaagacgatatcaagctcactgccaagaaggaggtcagcaaggcccctgaagacaagaagaagagactggaagatgataagagaaaaaaggaagacaaggaacgcaagaaaaaagacgaagaaaaggtgaaggcagaggaagaatcaaagaaaaaagaagaggaagaaaaaaagaaacatcaagaggaagagagaaagaagcaagaagagcaggccaaacgtcagcaagaagaagaagcagctgctcagatgaaagaaaaagaagaatccattcagcttcatcaggaagcttgggaacgacatcatttaagaaaggaacttcgtagcaaaaaccaaaatgctccggacagccgaccagaggaaaacttcttcagccgcctcgactcaagtttgaagaaaaatactgcttttgtcaagaaactaaaaactattacagaacaacagagagactccttgtcccatgattttaatggcctaaatttaagcaaatacattgcagaagctgtagcttccatcgtggaagcaaaactaaaaatctctgatgtgaactgtgctgtgcacctctgctctctctttcaccagcgttatgctgactttgccccatcacttcttcaggtctggaaaaaacattttgaagcaaggaaagaggagaaaacacctaacatcaccaagttaagaactgatttgcgttttattgcagaattgacaatagttgggattttcactgacaaggaaggtctttccttaatctatgaacagctaaaaaatattattaatgctgatcgggagtcccacactcatgtctctgtagtgattagtttctgtcgacattgtggagatgatattgctggacttgtaccaaggaaagtaaagagtgctgcagagaagtttaatttgagttttcctcctagtgagataattagtccagagaaacaacagcccttccagaatcttttaaaagagtactttacgtctttgaccaaacacctgaaaagggaccacagggagctccagaatactgagagacaaaacaggcgcattctacattctaaaggggagctcagtgaagatagacataaacagtatgaggaatttgctatgtcttaccagaagctgctggcaaattctcaatccttagcagaccttttggatgaaaatatgccagatcttcctcaagacaaaccaacaccagaagaacatgggcctggaattgatatattcacacctggtaaacctggagaatatgacttggaaggtggtatatgggaagatgaagatgctcggaatttttatgagaacctcattgatttgaaggcttttgtcccagccatcttgtttaaagacaatgaaaaaagttgtcagaataaagagtccaacaaagatgataccaaagaggcaaaagaatctaaggagaataaggaggtatcaagtcccgatgatttggaacttgagttggagaatctagaaattaatgatgacaccttagaattagagggtggagatgaagctgaagatcttacaaagaaacttcttgatgaacaagaacaagaagatgaggaagccagcactggatctcatctcaagctcatagtagatgctttcctacagcagttacccaactgtgtcaaccgagatctgatagacaaggcagcaatggatttttgcatgaacatgaacacaaaagcaaacaggaagaagttggtacgggcactcttcatagttcctagacaaaggttggatttgctaccattttatgcaagattggttgctacattgcatccctgcatgtctgatgtagcagaggatctttgttccatgctgaggggggatttcagatttcatgtacggaaaaaggaccagatcaatattgaaacaaagaataaaactgttcgttttataggagaactaactaagtttaagatgttcaccaaaaatgacacactgcattgtttaaagatgcttctgtcagacttctctcatcaccatattgaaatggcatgcaccctgctggagacatgtggacggtttcttttcagatctccagaatctcacctgaggaccagtgtacttttggagcaaatgatgagaaagaagcaagcaatgcatcttgatgcgagatacgtcacaatggtagagaatgcatattactactgcaacccacctccagctgaaaaaaccgtgaaaaagaaacgtcctcctctccaggaatatgtccggaaacttttgtacaaggatctctctaaggttaccaccgagaaggttttgagacagatgcgaaagctgccctggcaggaccaagaagtgaaagactatgttatttgttgtatgataaacatctggaatgtgaaatataatagtattcattgtgtagccaacctcttagcaggactagtgctctaccaagaggatgttgggatccacgttgtggatggagtgttagaagatattcgattaggaatggaggttaatcaacctaaatttaatcagaggcgcatcagcagtgccaagttcttaggagaactttacaattaccgaatggtggaatcagctgttattttcagaactctgtattcttttacctcatttggtgttaatcctgatggctctccaagttccctggacccacctgagcatcttttcagaattagactcgtatgcactattctggacacatgtggccagtactttgacagaggttccagtaaacgaaaacttgattgtttccttgtatattttcagcgttatgtttggtggaagaaaagtttggaggtttggacaaaagaccatccatttcctattgatatagattacatgatcagtgatacactagaactgctaagaccaaagatcaaactctgtaattctctggaagaatccatcaggcaggtacaagacttggaacgagaattcttaataaaactaggcctagtaaatgacaaagactcaaaagattctatgacagaaggagaaaatcttgaagaggatgaagaagaagaagaaggtggggctgaaacagaagaacaatctggaaatgaaagtgaagtaaatgagccagaagaagaggagggttctgataatgatgatgatgagggagaagaagaggaggaagagaatacagattaccttacagattccaataaggaaaatgaaaccgatgaagagaatactgaggtaatgattaaaggcggtggacttaagcatgtaccttgtgtagaagatgaggacttcattcaagctctggataaaatgatgctagaaaatctacagcaacgaagtggtgaatctgttaaagtgcaccaactagatgttgccattcctttgcatctcaaaagccagctgaggaaagggcccccactgggaggtggggaaggagaggctgagtctgcagacacaatgccgtttgtcatgttaacaagaaaaggcaataaacagcagtttaagatccttaatgtacccatgtcctctcaacttgctgcaaatcactggaaccagcaacaggcagaacaagaagagaggatgagaatgaaaaagctcacactagatatcaatgaacggcaagaacaagaagattatcaagaaatgttgcagtctcttgcacagcgcccagctccagcaaacaccaatcgtgagaggcggcctcgctaccaacatccgaagggagcacctaatgcagatctaatctttaagactggtgggaggagacgttgatccagcagcacgtgtcatttcattaggtcctgtatctgatgttgtggttagtggagtcctccagcaattgaatgagagcagtggacacatctcagcaggtcggtctagagagttgcgaatctaaacctgggacaggctggggccaggaggcagaaacaccagcctctgccaacaccggaacaagccgacgcttccagacaaggcggaaaaggccttttgtaatggaaatctcgcgagggttaatcttctcttgagaatggcagtcaagaaatgagatggttcacttgactactgagcagttacaccaaggagagcgtgaaggagatgattgagccagagaagaaacgggttgtgatggtaatggtgtgggggaaatgaacttgagctttaaacttgatttgagtttcagtgtctctgaattgaacatcccacgttggaagaagatacatttgggggctccaggactacagtagaaaagtatagagcaagcaggaaaatcttctagtaaaacttacatgcaggacaacaaaatgatgaaagatatccaaataccagataatccaccaggaaggcttttgtttaggaatttgtttcaagaggaacaagggatgagggagaaaaatccgttttatccatcagagtcagtgctataaaattgcctattaaggtaaaagaaaaatgtggagactattttactatacagagagcattaattcagatggcttagaaaagtgataccagcccaagaacagggatctaggtgagcccattgtaagtatcattgaaaacaaaacatgcccgtcaacatgtcacagaaaacgaacgaaggacaacaagaagtggatgagaatattttgttgaccttcatgggtttacagcctctgtctctaaacaaagtatggaaacaagtagagcttttattttgcttttgtttttgttttgtttttttttttgttttcccccactaaatagaaatgagggtccttagtctgtttctgacaatctgttaatttcttaggacagctgtctttggtttgctttccagcaggcgtagtatatttagtcggagagcacatctgtatgcgacaacttgattacatctttttttctagctattttgcattttttcttttaccatgtttcagtttctgcatgtagatttaaataaaaaacaaaacttgtaaagttgtaacatttcacatggaaatgctgcccaatcttcaccagcttcagaaatctgacctttgccgatgctgcaataaagtgttgtaattta

SEQ ID NO: 232155 - DNA, 5193 bp, Artificial Sequence
  derived and/or modified sequence
gtggggggaggggaggggagagcccgagcgctggagttggtgctgggaaacccggggctaatgttgacaacaggctcgagattgtcctgggtcacataatgccagctgagcgtaaaaagccagcaagtatggaagaaaaagactctttaccaaacaacaaggaaaaagactgcagtgaaaggcggacagtgagcagcaaggagaggccaaaagacgatatcaagctcactgccaagaaggaggtcagcaaggcccctgaagacaagaagaagagactggaagatgataagagaaaaaaggaagacaaggaacgcaagaaaaaagacgaagaaaaggtgaaggcagaggaagaatcaaagaaaaaagaagaggaagaaaaaaagaaacatcaagaggaagagagaaagaagcaagaagagcaggccaaacgtcagcaagaagaagaagcagctgctcagatgaaagaaaaagaagaatccattcagcttcatcaggaagcttgggaacgacatcatttaagaaaggaacttcgtagcaaaaaccaaaatgctccggacagccgaccagaggaaaacttcttcagccgcctcgactcaagtttgaagaaaaatactgcttttgtcaagaaactaaaaactattacagaacaacagagagactccttgtcccatgattttaatggcctaaatttaagcaaatacattgcagaagctgtagcttccatcgtggaagcaaaactaaaaatctctgatgtgaactgtgctgtgcacctctgctctctctttcaccagcgttatgctgactttgccccatcacttcttcaggtctggaaaaaacattttgaagcaaggaaagaggagaaaacacctaacatcaccaagttaagaactgatttgcgttttattgcagaattgacaatagttgggattttcactgacaaggaaggtctttccttaatctatgaacagctaaaaaatattattaatgctgatcgggagtcccacactcatgtctctgtagtgattagtttctgtcgacattgtggagatgatattgctggacttgtaccaaggaaagtaaagagtgctgcagagaagtttaatttgagttttcctcctagtgagataattagtccagagaaacaacagcccttccagaatcttttaaaagagtactttacgtctttgaccaaacacctgaaaagggaccacagggagctccagaatactgagagacaaaacaggcgcattctacattctaaaggggagctcagtgaagatagacataaacagtatgaggaatttgctatgtcttaccagaagctgctggcaaattctcaatccttagcagaccttttggatgaaaatatgccagatcttcctcaagacaaaccaacaccagaagaacatgggcctggaattgatatattcacacctggtaaacctggagaatatgacttggaaggtggtatatgggaagatgaagatgctcggaatttttatgagaacctcattgatttgaaggcttttgtcccagccatcttgtttaaagacaatgaaaaaagttgtcagaataaagagtccaacaaagatgataccaaagaggcaaaagaatctaaggagaataaggaggtatcaagtcccgatgatttggaacttgagttggagaatctagaaattaatgatgacaccttagaattagagggtggagatgaagctgaagatcttacaaagaaacttcttgatgaacaagaacaagaagatgaggaagccagcactggatctcatctcaagctcatagtagatgctttcctacagcagttacccaactgtgtcaaccgagatctgatagacaaggcagcaatggatttttgcatgaacatgaacacaaaagcaaacaggaagaagttggtacgggcactcttcatagttcctagacaaaggttggatttgctaccattttatgcaagattggttgctacattgcatccctgcatgtctgatgtagcagaggatctttgttccatgctgaggggggatttcagatttcatgtacggaaaaaggaccagatcaatattgaaacaaagaataaaactgttcgttttataggagaactaactaagtttaagatgttcaccaaaaatgacacactgcattgtttaaagatgcttctgtcagacttctctcatcaccatattgaaatggcatgcaccctgctggagacatgtggacggtttcttttcagatctccagaatctcacctgaggaccagtgtacttttggagcaaatgatgagaaagaagcaagcaatgcatcttgatgcgagatacgtcacaatggtagagaatgcatattactactgcaacccacctccagctgaaaaaaccgtgaaaaagaaacgtcctcctctccaggaatatgtccggaaacttttgtacaaggatctctctaaggttaccaccgagaaggttttgagacagatgcgaaagctgccctggcaggaccaagaagtgaaagactatgttatttgttgtatgataaacatctggaatgtgaaatataatagtattcattgtgtagccaacctcttagcaggactagtgctctaccaagaggatgttgggatccacgttgtggatggagtgttagaagatattcgattaggaatggaggttaatcaacctaaatttaatcagaggcgcatcagcagtgccaagttcttaggagaactttacaattaccgaatggtggaatcagctgttattttcagaactctgtattcttttacctcatttggtgttaatcctgatggctctccaagttccctggacccacctgagcatcttttcagaattagactcgtatgcactattctggacacatgtggccagtactttgacagaggttccagtaaacgaaaacttgattgtttccttgtatattttcagcgttatgtttggtggaagaaaagtttggaggtttggacaaaagaccatccatttcctattgatatagattacatgatcagtgatacactagaactgctaagaccaaagatcaaactctgtaattctctggaagaatccatcaggcaggtacaagacttggaacgagaattcttaataaaactaggcctagtaaatgacaaagactcaaaagattctatgacagaaggagaaaatcttgaagaggatgaagaagaagaagaaggtggggctgaaacagaagaacaatctggaaatgaaagtgaagtaaatgagccagaagaagaggagggttctgataatgatgatgatgagggagaagaagaggaggaagagaatacagattaccttacagattccaataaggaaaatgaaaccgatgaagagaatactgaggtaatgattaaaggcggtggacttaagcatgtaccttgtgtagaagatgaggacttcattcaagctctggataaaatgatgctagaaaatctacagcaacgaagtggtgaatctgttaaagtgcaccaactagatgttgccattcctttgcatctcaaaagccagctgaggaaagggcccccactgggaggtggggaaggagaggctgagtctgcagacacaatgccgtttgtcatgttaacaagaaaaggcaataaacagcagtttaagatccttaatgtacccatgtcctctcaacttgctgcaaatcactggaaccagcaacaggcagaacaagaagagaggatgagaatgaaaaagctcacactagatatcaatgaacggcaagaacaagaagattatcaagaaatgttgcagtctcttgcacagcgcccagctccagcaaacaccaatcgtgagaggcggcctcgctaccaacatccgaagggagcacctaatgcagatctaatctttaagactggtgggaggagacgttgatccagcagcacgtgtcatttcattaggtcctgtatctgatgttgtggttagtggagtcctccagcaattgaatgagagcagtggacacatctcagcaggtcggtctagagagttgcgaatctaaacctgggacaggctggggccaggaggcagaaacaccagcctctgccaacaccggaacaagccgacgcttccagacaaggcggaaaaggccttttgtaatggaaatctcgcgagggttaatcttctcttgagaatggcagtcaagaaatgagatggttcacttgactactgagcagttacaccaaggagagcgtgaaggagatgattgagccagagaagaaacgggttgtgatggtaatggtgtgggggaaatgaacttgagctttaaacttgatttgagtttcagtgtctctgaattgaacatcccacgttggaagaagatacatttgggggctccaggactacagtagaaaagtatagagcaagcaggaaaatcttctagtaaaacttacatgcaggacaacaaaatgatgaaagatatccaaataccagataatccaccaggaaggcttttgtttaggaatttgtttcaagaggaacaagggatgagggagaaaaatccgttttatccatcagagtcagtgctataaaattgcctattaaggtaaaagaaaaatgtggagactattttactatacagagagcattaattcagatggcttagaaaagtgataccagcccaagaacagggatctaggtgagcccattgtaagtatcattgaaaacaaaacatgcccgtcaacatgtcacagaaaacgaacgaaggacaacaagaagtggatgagaatattttgttgaccttcatgggtttacagcctctgtctctaaacaaagtatggaaacaagtagagcttttattttgcttttgtttttgttttgtttttttttttgttttcccccactaaatagaaatgagggtccttagtctgtttctgacaatctgttaatttcttaggacagctgtctttggtttgctttccagcaggcgtagtatatttagtcggagagcacatctgtatgcgacaacttgattacatctttttttctagctattttgcattttttcttttaccatgtttcagtttctgcatgtagatttaaataaaaaacaaaacttgtaaagttgtaacatttcacatggaaatgctgcccaatcttcaccagcttcagaaatctgacctttgccgatgctgcaataaagtgttgtaattta

SEQ ID NO: 232156 - DNA, 1935 bp, Artificial Sequence
  derived and/or modified sequence
cccaactgtgtcaaccgagatctgatagacaaggcagcaatggatttttgcatgaacatgaacacaaaagcaaacaggaagaagttggtacgggcactcttcatagttcctagacaaaggttggatttgctaccattttatgcaagattggttgctacattgcatccctgcatgtctgatgtagcagaggatctttgttccatgctgaggggggatttcagatttcatgtacggaaaaaggaccagatcaatattgaaacaaagaataaaactgttcgttttataggagaactaactaagtttaagatgttcaccaaaaatgacacactgcattgtttaaagatgcttctgtcagacttctctcatcaccatattgaaatggcatgcaccctgctggagacatgtggacggtttcttttcagatctccagaatctcacctgaggaccagtgtacttttggagcaaatgatgagaaagaagcaagcaatgcatcttgatgcgagatacgtcacaatggtagagaatgcatattactactgcaacccacctccagctgaaaaaaccgtgaaaaagaaacgtcctcctctccaggaatatgtccggaaacttttgtacaaggatctctctaaggttaccaccgagaaggttttgagacagatgcgaaagctgccctggcaggaccaagaagtgaaagactatgttatttgttgtatgataaacatctggaatgtgaaatataatagtattcattgtgtagccaacctcttagcaggactagtgctctaccaagaggatgttgggatccacgttgtggatggagtgttagaagatattcgattaggaatggaggttaatcaacctaaatttaatcagaggcgcatcagcagtgccaagttcttaggagaactttacaattaccgaatggtggaatcagctgttattttcagaactctgtattcttttacctcatttggtgttaatcctgatggctctccaagttccctggacccacctgagcatcttttcagaattagactcgtatgcactattctggacacatgtggccagtactttgacagaggttccagtaaacgaaaacttgattgtttccttgtatattttcagcgttatgtttggtggaagaaaagtttggaggtttggacaaaagaccatccatttcctattgatatagattacatgatcagtgatacactagaactgctaagaccaaagatcaaactctgtaattctctggaagaatccatcaggcaggtacaagacttggaacgagaattcttaataaaactaggcctagtaaatgacaaagactcaaaagattctatgacagaaggagaaaatcttgaagaggatgaagaagaagaagaaggtggggctgaaacagaagaacaatctggaaatgaaagtgaagtaaatgagccagaagaagaggagggttctgataatgatgatgatgagggagaagaagaggaggaagagaatacagattaccttacagattccaataaggaaaatgaaaccgatgaagagaatactgaggtaatgattaaaggcggtggacttaagcatgtaccttgtgtagaagatgaggacttcattcaagctctggataaaatgatgctagaaaatctacagcaacgaagtggtgaatctgttaaagtgcaccaactagatgttgccattcctttgcatctcaaaagccagctgaggaaagggcccccactgggaggtggggaaggagaggctgagtctgcagacacaatgccgtttgtcatgttaacaagaaaaggcaataaacagcagtttaagatccttaatgtacccatgtcctctcaacttgctgcaaatcactggaaccagcaacaggcagaaagaagagaggatgagaatgaaaaagctcacactagatatcaatga

SEQ ID NO: 232157 - DNA, 5223 bp, Artificial Sequence
  derived and/or modified sequence
gcatgccgcagggaagacgatcaggactgtttttaatcgggcagtcgcgcggatggccttttccctctcgcctccttccgccccgcccccactctcagcccggccgcgctgattgtcctgggtcacataatgccagctgagcgtaaaaagccagcaagtatggaagaaaaagactctttaccaaacaacaaggaaaaagactgcagtgaaaggcggacagtgagcagcaaggagaggccaaaagacgatatcaagctcactgccaagaaggaggtcagcaaggcccctgaagacaagaagaagagactggaagatgataagagaaaaaaggaagacaaggaacgcaagaaaaaagacgaagaaaaggtgaaggcagaggaagaatcaaagaaaaaagaagaggaagaaaaaaagaaacatcaagaggaagagagaaagaagcaagaagagcaggccaaacgtcagcaagaagaagaagcagctgctcagatgaaagaaaaagaagaatccattcagcttcatcaggaagcttgggaacgacatcatttaagaaaggaacttcgtagcaaaaaccaaaatgctccggacagccgaccagaggaaaacttcttcagccgcctcgactcaagtttgaagaaaaatactgcttttgtcaagaaactaaaaactattacagaacaacagagagactccttgtcccatgattttaatggcctaaatttaagcaaatacattgcagaagctgtagcttccatcgtggaagcaaaactaaaaatctctgatgtgaactgtgctgtgcacctctgctctctctttcaccagcgttatgctgactttgccccatcacttcttcaggtctggaaaaaacattttgaagcaaggaaagaggagaaaacacctaacatcaccaagttaagaactgatttgcgttttattgcagaattgacaatagttgggattttcactgacaaggaaggtctttccttaatctatgaacagctaaaaaatattattaatgctgatcgggagtcccacactcatgtctctgtagtgattagtttctgtcgacattgtggagatgatattgctggacttgtaccaaggaaagtaaagagtgctgcagagaagtttaatttgagttttcctcctagtgagataattagtccagagaaacaacagcccttccagaatcttttaaaagagtactttacgtctttgaccaaacacctgaaaagggaccacagggagctccagaatactgagagacaaaacaggcgcattctacattctaaaggggagctcagtgaagatagacataaacagtatgaggaatttgctatgtcttaccagaagctgctggcaaattctcaatccttagcagaccttttggatgaaaatatgccagatcttcctcaagacaaaccaacaccagaagaacatgggcctggaattgatatattcacacctggtaaacctggagaatatgacttggaaggtggtatatgggaagatgaagatgctcggaatttttatgagaacctcattgatttgaaggcttttgtcccagccatcttgtttaaagacaatgaaaaaagttgtcagaataaagagtccaacaaagatgataccaaagaggcaaaagaatctaaggagaataaggaggtatcaagtcccgatgatttggaacttgagttggagaatctagaaattaatgatgacaccttagaattagagggtggagatgaagctgaagatcttacaaagaaacttcttgatgaacaagaacaagaagatgaggaagccagcactggatctcatctcaagctcatagtagatgctttcctacagcagttacccaactgtgtcaaccgagatctgatagacaaggcagcaatggatttttgcatgaacatgaacacaaaagcaaacaggaagaagttggtacgggcactcttcatagttcctagacaaaggttggatttgctaccattttatgcaagattggttgctacattgcatccctgcatgtctgatgtagcagaggatctttgttccatgctgaggggggatttcagatttcatgtacggaaaaaggaccagatcaatattgaaacaaagaataaaactgttcgttttataggagaactaactaagtttaagatgttcaccaaaaatgacacactgcattgtttaaagatgcttctgtcagacttctctcatcaccatattgaaatggcatgcaccctgctggagacatgtggacggtttcttttcagatctccagaatctcacctgaggaccagtgtacttttggagcaaatgatgagaaagaagcaagcaatgcatcttgatgcgagatacgtcacaatggtagagaatgcatattactactgcaacccacctccagctgaaaaaaccgtgaaaaagaaacgtcctcctctccaggaatatgtccggaaacttttgtacaaggatctctctaaggttaccaccgagaaggttttgagacagatgcgaaagctgccctggcaggaccaagaagtgaaagactatgttatttgttgtatgataaacatctggaatgtgaaatataatagtattcattgtgtagccaacctcttagcaggactagtgctctaccaagaggatgttgggatccacgttgtggatggagtgttagaagatattcgattaggaatggaggttaatcaacctaaatttaatcagaggcgcatcagcagtgccaagttcttaggagaactttacaattaccgaatggtggaatcagctgttattttcagaactctgtattcttttacctcatttggtgttaatcctgatggctctccaagttccctggacccacctgagcatcttttcagaattagactcgtatgcactattctggacacatgtggccagtactttgacagaggttccagtaaacgaaaacttgattgtttccttgtatattttcagcgttatgtttggtggaagaaaagtttggaggtttggacaaaagaccatccatttcctattgatatagattacatgatcagtgatacactagaactgctaagaccaaagatcaaactctgtaattctctggaagaatccatcaggcaggtacaagacttggaacgagaattcttaataaaactaggcctagtaaatgacaaagactcaaaagattctatgacagaaggagaaaatcttgaagaggatgaagaagaagaagaaggtggggctgaaacagaagaacaatctggaaatgaaagtgaagtaaatgagccagaagaagaggagggttctgataatgatgatgatgagggagaagaagaggaggaagagaatacagattaccttacagattccaataaggaaaatgaaaccgatgaagagaatactgaggtaatgattaaaggcggtggacttaagcatgtaccttgtgtagaagatgaggacttcattcaagctctggataaaatgatgctagaaaatctacagcaacgaagtggtgaatctgttaaagtgcaccaactagatgttgccattcctttgcatctcaaaagccagctgaggaaagggcccccactgggaggtggggaaggagaggctgagtctgcagacacaatgccgtttgtcatgttaacaagaaaaggcaataaacagcagtttaagatccttaatgtacccatgtcctctcaacttgctgcaaatcactggaaccagcaacaggcagaacaagaagagaggatgagaatgaaaaagctcacactagatatcaatgaacggcaagaacaagaagattatcaagaaatgttgcagtctcttgcacagcgcccagctccagcaaacaccaatcgtgagaggcggcctcgctaccaacatccgaagggagcacctaatgcagatctaatctttaagactggtgggaggagacgttgatccagcagcacgtgtcatttcattaggtcctgtatctgatgttgtggttagtggagtcctccagcaattgaatgagagcagtggacacatctcagcaggtcggtctagagagttgcgaatctaaacctgggacaggctggggccaggaggcagaaacaccagcctctgccaacaccggaacaagccgacgcttccagacaaggcggaaaaggccttttgtaatggaaatctcgcgagggttaatcttctcttgagaatggcagtcaagaaatgagatggttcacttgactactgagcagttacaccaaggagagcgtgaaggagatgattgagccagagaagaaacgggttgtgatggtaatggtgtgggggaaatgaacttgagctttaaacttgatttgagtttcagtgtctctgaattgaacatcccacgttggaagaagatacatttgggggctccaggactacagtagaaaagtatagagcaagcaggaaaatcttctagtaaaacttacatgcaggacaacaaaatgatgaaagatatccaaataccagataatccaccaggaaggcttttgtttaggaatttgtttcaagaggaacaagggatgagggagaaaaatccgttttatccatcagagtcagtgctataaaattgcctattaaggtaaaagaaaaatgtggagactattttactatacagagagcattaattcagatggcttagaaaagtgataccagcccaagaacagggatctaggtgagcccattgtaagtatcattgaaaacaaaacatgcccgtcaacatgtcacagaaaacgaacgaaggacaacaagaagtggatgagaatattttgttgaccttcatgggtttacagcctctgtctctaaacaaagtatggaaacaagtagagcttttattttgcttttgtttttgttttgtttttttttttgttttcccccactaaatagaaatgagggtccttagtctgtttctgacaatctgttaatttcttaggacagctgtctttggtttgctttccagcaggcgtagtatatttagtcggagagcacatctgtatgcgacaacttgattacatctttttttctagctattttgcattttttcttttaccatgtttcagtttctgcatgtagatttaaataaaaaacaaaacttgtaaagttgtaacatttcacatggaaatgctgcccaatcttcaccagcttcagaaatctgacctttgccgatgctgcaataaagtgttgtaattt

SEQ ID NO: 232158 - protein, 582 aa, Artificial Sequence
  derived and/or modified sequence
MIFLTALPLFWIMISASRGGHWGAWMPSSISAFEGTCVSIPCRFDFPDELRPAVVHGVWYFNSPYPKNYPPVVFKSRTQVVHESFQGRSRLLGDLGLRNCTLLLSNVSPELGGKYYFRGDLGGYNQYTFSEHSVLDIVNTPNIVVPPEVVAGTEVEVSCMVPDNCPELRPELSWLGHEGLGEPAVLGRLREDEGTWVQVSLLHFVPTREANGHRLGCQASFPNTTLQFEGYASMDVKYPPVIVEMNSSVEAIEGSHVSLLCGADSNPPPLLTWMRDGTVLREAVAESLLLELEEVTPAEDGVYACLAENAYGQDNRTVGLSVMYAPWKPTVNGTMVAVEGETVSILCSTQSNPDPILTIFKEKQILSTVIYESELQLELPAVSPEDDGEYWCVAENQYGQRATAFNLSVEFAPVLLLESHCAAARDTVQCLCVVKSNPEPSVAFELPSRNVTVNESEREFVYSERSGLVLTSILTLRGQAQAPPRVICTARNLYGAKSLELPFQGAHRLMWAKIGPVGAVVAFAILIAIVCYITQTRRKKNVTESPSFSAGDNPPVLFSSDFRISGAPEKYESKEVSTLESH

SEQ ID NO: 232159 - DNA, 1749 bp, Artificial Sequence
  derived and/or modified sequence
atgatctttctcacagcattgccgctgttctggataatgattagcgcaagtaggggaggccactggggcgcttggatgccatcttccatcagcgccttcgaaggtacgtgtgtgagcatcccttgtcgcttcgactttcccgacgagctgcggcctgccgtggtccacggggtttggtacttcaactctccataccctaagaattatcccccggtggtgtttaagtcacgcacgcaagtggtgcatgagtctttccaggggagatctagactcctgggggatctcgggcttagaaattgcacactgctgctgtcaaatgtgtctcctgagctcggaggcaaatactattttcgaggggacttgggtggatataaccagtacactttctccgagcactcagtacttgatattgtgaatacacctaatatcgtggtgcctccagaggtggtggccgggacggaagttgaggtctcctgtatggtgccagacaactgtcccgagctgagacccgaactttcttggctgggccatgagggactgggggaacccgccgtactgggcaggcttagggaggatgagggcacatgggttcaggtcagtttgctccacttcgtacctacccgcgaggctaacggtcaccgccttgggtgccaggcttcttttccaaatactacgctacaattcgaaggttacgcctctatggacgtcaagtacccacctgtcatagttgaaatgaactccagcgtcgaagccattgagggctcccatgtttccttgctctgtggagcggattctaacccccctcccctgctgacttggatgagggacggcaccgtgctgcgcgaggcagtagcagagagcctccttcttgagcttgaggaggtgacgccagcagaggatggcgtgtacgcgtgtcttgctgagaatgcctatggccaggataataggaccgtgggactgagcgtcatgtatgcgccatggaaacccacagttaacggaacaatggtggcagttgaaggggaaactgtgtctattctctgtagtacccagtccaatccggatcccatcctgactatctttaaggagaaacagattctaagtacggtcatttacgaaagcgagcttcagctcgagttaccagccgtcagtcctgaggatgacggagagtactggtgcgttgccgaaaaccagtatggacagcgtgcaaccgcctttaatttaagcgtggagtttgcccccgtcctgctgctagagtctcactgcgcagccgcccgggatacagtccagtgcctttgtgtagtgaagtccaaccccgagccaagcgtggccttcgagttaccctctaggaacgttaccgtaaacgagagtgaaagagaattcgtgtatagtgagaggtcaggtctcgtgctgacttctattctgaccctgagaggccaggcacaagctccccctcgcgtaatctgtaccgcccggaacttgtatggcgcaaaatctttggaactcccattccagggtgcccacaggttaatgtgggccaagataggccccgtgggagcagtggtggccttcgctatactcattgcaatcgtttgctacattactcagacaagacgaaaaaagaatgttacagagagcccttcattcagtgctggcgacaacccaccagtgctgttcagctccgattttcgcatcagcggcgcccctgaaaaatacgagtctaaggaagtaagtacacttgagagtcactag

SEQ ID NO: 232160 - DNA, 1749 bp, Artificial Sequence
  derived and/or modified sequence
atgatcttcctgacagccctgcccctcttctggatcatgatcagcgccagcagaggaggccactggggcgcctggatgcccagcagcatcagcgcctttgagggcacctgtgtgtccatcccctgccgctttgacttcccagatgagctgcggcctgctgtggtgcacggcgtgtggtacttcaacagcccctaccccaagaactacccacctgtggtgttcaagagcaggacccaggtggtgcatgagagcttccagggccgcagccggctgctgggggacctgggcctgaggaactgcaccctgctgctgagcaatgtgtccccagagctgggcggcaagtactacttccggggggacctgggcggctacaaccagtacaccttcagcgagcacagcgtgctggacatcgtgaacacccccaacatcgtggtgcccccagaggtggtggccggcacagaggtggaggtgtcctgcatggtgcctgacaactgcccagagctgcggcctgagctgtcctggctgggccacgagggcctgggggagcctgctgtgctgggccgcctgagagaagatgagggcacctgggtgcaggtgtccctgctgcactttgtgcccacccgggaggccaacggccaccggctgggctgccaggccagcttccccaacaccaccctgcagtttgagggctacgcctccatggatgtgaagtacccacctgtgattgtggagatgaacagctctgtggaggccatcgagggcagccacgtgtccctgctgtgtggggctgacagcaaccccccacccctgctgacctggatgagagatggcaccgtgctgcgggaggccgtggccgagagcctgctgctggagctggaggaggtgaccccagcagaagatggagtgtatgcctgcctggccgagaatgcctacggccaggacaacagaacagtgggcctgtctgtgatgtatgccccctggaagcccaccgtgaatggcaccatggtggccgtggagggggagaccgtgtccatcctgtgcagcacccagagcaacccagaccccatcctgaccatcttcaaggagaagcagatcctgagcaccgtcatctatgaaagtgagctgcagctggagctgcctgctgtgtccccagaagatgatggagagtactggtgtgtggccgagaaccagtatggccagagggccacagccttcaacctgtctgtggagtttgcccctgtgctgctgctggagagccactgtgccgccgcccgggacacagtgcagtgcctgtgtgtggtgaagagcaaccctgagcccagcgtggcctttgagctgcccagcagaaatgtgacagtgaatgaaagtgagcgggagtttgtgtacagcgagaggagcggcctggtgctgaccagcatcctgaccctgcggggccaggcccaggccccacccagggtcatctgcacagccaggaacctgtatggagccaagagcctggagctgcccttccagggcgcccaccggctgatgtgggccaagattggccctgtgggcgctgtggtggcctttgccatcctgattgccatcgtgtgctacatcacccagaccaggaggaagaagaatgtgacagagagccccagcttctctgctggggacaacccccctgtgctcttcagcagtgacttccgcatcagcggggcccctgagaagtatgagagcaaggaggtgtccaccctggagagccactag

SEQ ID NO: 232161 - DNA, 1749 bp, Artificial Sequence
  derived and/or modified sequence
atgatcttcctgaccgccctgcccctgttctggatcatgatcagcgcatcgaggggagggcattggggggcttggatgccaagcagcatctccgccttcgagggtacctgtgtctccattccctgccggtttgatttcccagatgaattgcgacccgccgtggtccacggggtgtggtactttaattctccttatccgaaaaattatccccccgtggtattcaagagccgaacgcaggtggtgcacgagtctttccagggcaggagccggttgctgggggatctgggccttagaaattgcacattgctcctgtctaatgtttcacctgagttgggggggaaatattactttaggggggacttgggggggtacaaccaatacacattttccgaacactcagtcctggatattgtcaacacacccaatatcgtggttccgcctgaggtggtggcaggaaccgaggttgaggtgagttgtatggtcccggacaactgtcctgagttgaggcccgagctcagctggctcggacacgaagggcttggcgagcctgcggtcttgggccgtttgagagaggatgaaggcacatgggtacaggtatcactgctgcatttcgtccctaccagagaggctaacggccaccgacttggctgtcaagcctcattcccgaatacaacccttcaatttgaggggtatgctagcatggatgtgaaataccccccagtgatcgtggaaatgaatagttcagttgaggctatagagggttcacacgtgtcactgctgtgtggtgcagattctaatcctccccccctactgacttggatgcgcgacgggacagtcttgagagaggcagtggctgagtcccttctgcttgagctagaggaggtcacacccgccgaggacggcgtctacgcttgtctggccgaaaacgcgtacggccaggacaacagaacagttgggctcagcgtgatgtatgcaccatggaaacccaccgttaacgggactatggtggcagtcgagggagagactgtttccatcctttgctctacacaatccaaccccgacccaattttgacgatattcaaggagaagcagatcttgtctaccgtcatctatgaatccgagctgcagctggagcttcctgccgtgtcccccgaggatgatggtgaatactggtgtgtcgctgaaaatcagtacgggcaaagggctaccgctttcaacttgtccgtcgagtttgccccggtgctcctcctcgagtcacattgcgccgctgcgagagacacggtgcagtgcctctgcgttgtgaagagtaacccagagcctagcgtggccttcgaactcccttccagaaacgtcacagtgaatgagtctgagagagaattcgtctacagtgagagaagcggactggttctgaccagcattcttactctgagggggcaggctcaggcaccgccccgtgtaatctgcacggccagaaacctttatggtgctaagtcactggaactgccattccagggcgcgcatcgcctgatgtgggccaaaattggccctgtgggtgctgtagtcgcctttgccattctgattgccatcgtgtgttacatcacacagacccgccgcaaaaagaacgtcacagaaagtccgagtttttcagcgggagataacccgccagtgctgttttccagcgattttcggatttccggagcacccgagaaatacgaaagcaaagaggtctctaccctggaaagtcattag

SEQ ID NO: 232162 - DNA, 1749 bp, Artificial Sequence
  derived and/or modified sequence
atgatttttcttacagccttgcctctattctggatcatgatctctgccagtcggggtggacattggggggcttggatgccatcttctatcagtgcttttgaagggacatgcgttagcattccatgcagattcgattttcctgatgaacttagacctgccgttgtgcacggggtgtggtattttaacagtccatatccaaagaattatccgcctgtagtctttaaatcaagaacacaggtggttcacgagagctttcagggaagatcccgcctgctgggagacttagggctccggaactgtacccttctactgagcaacgtttcccctgagcttggcggtaaatactacttccgaggagatctgggtggatacaaccagtatacattttcagaacactccgtgcttgatattgtgaatacaccaaatattgttgtgcctcccgaggtggtggcgggaactgaggtggaagtgtcttgcatggtgcctgacaattgccctgaattaaggccagaattaagttggcttgggcacgagggtctcggggagcccgctgtactcggacggcttcgagaagacgagggaacctgggtgcaggtgagcctgctccactttgtgccgacgagagaagcaaatggccatcggttaggatgtcaggcaagcttccccaataccacactgcagttcgagggctatgcgagcatggacgttaagtacccgcctgtgatagtcgagatgaacagttccgtcgaagcaattgaaggctcccatgtctcactgctgtgcggtgccgatagcaatccccctcccctgttgacttggatgcgagatggaacagtcctacgtgaggcagtggccgagtcactcctgctagaactcgaggaagtgaccccagccgaggacggcgtgtacgcctgcttggctgagaatgcttatggtcaggataaccgtaccgtgggcctgagtgtaatgtacgccccttggaagccaactgtcaacggcaccatggtggccgtagaaggagaaacagtgtccattctatgttctacccaatctaatccggaccccattttgaccattttcaaagaaaaacagatactgtctaccgtgatttatgagagtgaactccaactggagctgcccgcagtcagcccagaggacgacggagagtattggtgtgtcgctgagaaccaatacgggcagcgggctacagccttcaacctgagtgttgaatttgccccagtgctcctattggagagtcattgtgcggcagcaagggacaccgtgcagtgcctctgtgtagtgaaaagtaaccctgaacccagtgttgcatttgaactccccagccgcaacgttactgtcaatgagtctgaacgtgagtttgtatatagtgagcgcagcgggctggtcctgactagcatcctgacactgcgcggacaggcccaggccccacccagagttatttgcaccgcccgaaacctgtacggagctaaaagccttgagttgccctttcagggggcacatcgtcttatgtgggcaaagatcggccctgtcggtgccgtggttgccttcgccatattaatagctattgtgtgctatattacacagacacgccgaaaaaagaatgtgactgaaagtcctagtttttctgccggtgacaacccaccggtgctcttcagttccgacttcagaatctcaggagcgccagagaagtatgagtcgaaggaggtgtcaacactcgagagtcactag

SEQ ID NO: 232163 - DNA, 1749 bp, Artificial Sequence
  derived and/or modified sequence
atgatcttcctgaccgccctgcccctgttctggatcatgatcagcgccagcagaggcggccactggggcgcctggatgcccagcagcatcagcgccttcgagggcacctgcgtgagcatcccctgcagattcgacttccccgacgagctgagacccgccgtggtgcacggcgtgtggtacttcaacagcccctaccccaagaactacccccccgtggtgttcaagagcagaacccaggtggtgcacgagagcttccagggcagaagcagactgctgggcgacctgggcctgagaaactgcaccctgctgctgagcaacgtgagccccgagctgggcggcaagtactacttcagaggcgacctgggcggctacaaccagtacaccttcagcgagcacagcgtgctggacatcgtgaacacccccaacatcgtggtgccccccgaggtggtggccggcaccgaggtggaggtgagctgcatggtgcccgacaactgccccgagctgagacccgagctgagctggctgggccacgagggcctgggcgagcccgccgtgctgggcagactgagagaggacgagggcacctgggtgcaggtgagcctgctgcacttcgtgcccaccagagaggccaacggccacagactgggctgccaggccagcttccccaacaccaccctgcagttcgagggctacgccagcatggacgtgaagtacccccccgtgatcgtggagatgaacagcagcgtggaggccatcgagggcagccacgtgagcctgctgtgcggcgccgacagcaaccccccccccctgctgacctggatgagagacggcaccgtgctgagagaggccgtggccgagagcctgctgctggagctggaggaggtgacccccgccgaggacggcgtgtacgcctgcctggccgagaacgcctacggccaggacaacagaaccgtgggcctgagcgtgatgtacgccccctggaagcccaccgtgaacggcaccatggtggccgtggagggcgagaccgtgagcatcctgtgcagcacccagagcaaccccgaccccatcctgaccatcttcaaggagaagcagatcctgagcaccgtgatctacgagagcgagctgcagctggagctgcccgccgtgagccccgaggacgacggcgagtactggtgcgtggccgagaaccagtacggccagagagccaccgccttcaacctgagcgtggagttcgcccccgtgctgctgctggagagccactgcgccgccgccagagacaccgtgcagtgcctgtgcgtggtgaagagcaaccccgagcccagcgtggccttcgagctgcccagcagaaacgtgaccgtgaacgagagcgagagagagttcgtgtacagcgagagaagcggcctggtgctgaccagcatcctgaccctgagaggccaggcccaggccccccccagagtgatctgcaccgccagaaacctgtacggcgccaagagcctggagctgcccttccagggcgcccacagactgatgtgggccaagatcggccccgtgggcgccgtggtggccttcgccatcctgatcgccatcgtgtgctacatcacccagaccagaagaaagaagaacgtgaccgagagccccagcttcagcgccggcgacaacccccccgtgctgttcagcagcgacttcagaatcagcggcgcccccgagaagtacgagagcaaggaggtgagcaccctggagagccactag

SEQ ID NO: 232164 - DNA, 651 bp, Artificial Sequence
  derived and/or modified sequence
atgaccagcagaagatggttccaccccaacatcaccggcgtggaggccgagaacctgctgctgaccagaggcgtggacggcagcttcctggccagacccagcaagagcaaccccggcgacttcaccctgagcgtgagaagaaacggcgccgtgacccacatcaagatccagaacaccggcgactactacgacctgtacggcggcgagaagttcgccaccctggccgagctggtgcagtactacatggagcaccacggccagctgaaggagaagaacggcgacgtgatcgagctgaagtaccccctgaactgcgccgaccccaccagcgagagatggttccacggccacctgagcggcaaggaggccgagaagctgctgaccgagaagggcaagcacggcagcttcctggtgagagagagccagagccaccccggcgacttcgtgctgagcgtgagaaccggcgacgacaagggcgagagcaacgacggcaagagcaaggtgacccacgtgatgatcagatgccaggagctgaagtacgacgtgggcggcggcgagagattcgacagcctgaccgacctggtggagcactacaagaagaaccccatggtggagaccctgggcaccgtgctgcagctgaagcagcccctgtag

SEQ ID NO: 232165 - DNA, 1383 bp, Artificial Sequence
  derived and/or modified sequence
atgaccagcagaagatggttccaccccaacatcaccggcgtggaggccgagaacctgctgctgaccagaggcgtggacggcagcttcctggccagacccagcaagagcaaccccggcgacttcaccctgagcgtgagaagaaacggcgccgtgacccacatcaagatccagaacaccggcgactactacgacctgtacggcggcgagaagttcgccaccctggccgagctggtgcagtactacatggagcaccacggccagctgaaggagaagaacggcgacgtgatcgagctgaagtaccccctgaactgcgccgaccccaccagcgagagatggttccacggccacctgagcggcaaggaggccgagaagctgctgaccgagaagggcaagcacggcagcttcctggtgagagagagccagagccaccccggcgacttcgtgctgagcgtgagaaccggcgacgacaagggcgagagcaacgacggcaagagcaaggtgacccacgtgatgatcagatgccaggagctgaagtacgacgtgggcggcggcgagagattcgacagcctgaccgacctggtggagcactacaagaagaaccccatggtggagaccctgggcaccgtgctgcagctgaagcagcccctgaacaccaccagaatcaacgccgccgagatcgagagcagagtgagagagctgagcaagctggccgagaccaccgacaaggtgaagcagggcttctgggaggagttcgagaccctgcagcagcaggagtgcaagctgctgtacagcagaaaggagggccagagacaggagaacaagaacaagaacagatacaagaacatcctgcccttcgaccacaccagagtggtgctgcacgacggcgaccccaacgagcccgtgagcgactacatcaacgccaacatcatcatgcccgagttcgagaccaagtgcaacaacagcaagcccaagaagagctacatcgccacccagggctgcctgcagaacaccgtgaacgacttctggagaatggtgttccaggagaacagcagagtgatcgtgatgaccaccaaggaggtggagagaggcaagagcaagtgcgtgaagtactggcccgacgagtacgccctgaaggagtacggcgtgatgagagtgagaaacgtgaaggagagcgccgcccacgactacaccctgagagagctgaagctgagcaaggtgggccagggcaacaccgagagaaccgtgtggcagtaccacttcagaacctggcccgaccacggcgtgcccagcgaccccggcggcgtgctggacttcctggaggaggtgcaccacaagcaggagagcatcatggacgccggccccgtggtggtgcactgcagatag

SEQ ID NO: 232166 - DNA, 651 bp, Artificial Sequence
  derived and/or modified sequence
atgaccagtaggcgctggttccacccaaacatcaccggggtagaagccgagaatttactgctcactcggggagtggacgggtctttcctggcaagaccgagcaaatccaatcccggtgacttcaccctgagcgtcaggcgcaatggcgctgtcactcacatcaagattcaaaacacaggggactactacgatttgtacggaggcgagaagttcgctaccctggccgagcttgtgcagtactatatggagcaccatggacaactcaaggagaagaatggcgatgtaatcgaactaaagtaccccctgaactgcgccgaccccaccagcgaaagatggttccacgggcacctaagtggtaaggaagccgagaaactccttacagagaaagggaagcacgggtcattcctggtgagggaatctcagagccatcctggcgacttcgttctgtcagtgaggacgggagatgataagggcgagtcaaatgacgggaaatcaaaggttacccatgttatgatcaggtgccaagaacttaagtacgacgtgggcggcggggaacgatttgattcccttaccgacctcgtggagcattacaaaaaaaatcctatggtggagaccctcgggactgttctgcagctaaagcagcccctttag

SEQ ID NO: 232167 - DNA, 1383 bp, Artificial Sequence
  derived and/or modified sequence
atgacgtctcgtagatggttccatccgaacattaccggcgttgaggccgaaaacctgctcctgacacgcggagtggatggctccttcttggcaaggcccagtaagagtaatcccggggacttcacactatctgtccgcagaaacggagccgtcacgcacattaagattcagaacacaggcgactactacgacctgtacggtggtgagaagttcgccactctggctgagctcgttcagtattatatggagcaccatggacagcttaaagaaaaaaacggggatgtgattgagctgaaatatcctcttaattgcgcagaccctacatcggagcggtggttccacgggcatctgtcgggaaaagaagccgagaaattgctgactgagaagggaaagcatggaagctttctcgtgcgcgaatcccagtcccatccaggggactttgtgctgtccgtgcgtacaggcgacgacaaaggtgagagcaacgacggcaaatcgaaggtcacccatgtgatgatcaggtgccaggagctgaaatatgatgtgggtggcggagagcgttttgactccttaacggacctggtggagcattacaaaaagaatcccatggtcgagacactcggtactgtcttacaacttaagcagcccctgaataccacacgaattaatgccgccgagatagaatctcgagtgcgggaactgtctaagctggccgaaacaactgacaaagtgaagcagggtttctgggaggaatttgagactctccagcaacaagagtgtaaattgctttactctcgcaaagaggggcagagacaggaaaataagaataagaatagatacaaaaatatattgccattcgatcacacaagggtcgtgctgcatgacggagatcccaacgagcctgtttctgattatataaacgccaacataataatgcctgaatttgaaacaaagtgtaataacagtaaacctaagaaatcctatatagccacgcagggatgtctgcagaatacagtaaacgacttctggcggatggttttccaagaaaacagccgcgttattgtgatgactactaaagaagttgagcgcgggaaatccaagtgtgtgaaatattggccggacgagtacgccctgaaggaatacggagtgatgagggttagaaatgtaaaggagtccgcggcgcacgactacacacttcgtgaactcaagcttagtaaagtgggacaggggaatactgaacgtacagtctggcagtatcacttccggacgtggcccgaccacggcgtgccttcagaccctggcggcgttctggacttcctggaggaagtccaccacaaacaggagtccatcatggacgcaggcccagtggtggtccattgcaggtag

SEQ ID NO: 232168 - DNA, 651 bp, Artificial Sequence
  derived and/or modified sequence
atgaccagccgccgctggttccaccccaacatcaccggggtggaggccgagaacctgctgctgacccggggcgtggatggcagcttcctggcccggcccagcaagagcaaccctggggacttcaccctgtctgtgagaagaaatggagctgtgacccacatcaagatccagaacacaggagactactatgacctgtatggaggagagaagtttgccaccctggccgagctggtgcagtactacatggagcaccacggccagctgaaggagaagaatggagatgtgattgagctgaagtaccccctgaactgtgccgaccccaccagcgagcgctggttccacggccacctgagcggcaaggaggccgagaagctgctgacagagaagggcaagcacggcagcttcctggtgcgggagagccagagccaccctggggactttgtgctgtctgtgaggactggagatgacaagggggagagcaatgatggcaagagcaaggtgacccacgtgatgatccgctgccaggagctgaagtatgatgtgggcggcggggagagatttgacagcctgacagacctggtggagcactacaagaagaaccccatggtggagaccctgggcaccgtgctgcagctgaagcagcccctgtag

SEQ ID NO: 232169 - DNA, 1383 bp, Artificial Sequence
  derived and/or modified sequence
atgaccagccgccgctggttccaccccaacatcaccggggtggaggccgagaacctgctgctgacccggggcgtggatggcagcttcctggcccggcccagcaagagcaaccctggggacttcaccctgtctgtgagaagaaatggagctgtgacccacatcaagatccagaacacaggagactactatgacctgtatggaggagagaagtttgccaccctggccgagctggtgcagtactacatggagcaccacggccagctgaaggagaagaatggagatgtgattgagctgaagtaccccctgaactgtgccgaccccaccagcgagcgctggttccacggccacctgagcggcaaggaggccgagaagctgctgacagagaagggcaagcacggcagcttcctggtgcgggagagccagagccaccctggggactttgtgctgtctgtgaggactggagatgacaagggggagagcaatgatggcaagagcaaggtgacccacgtgatgatccgctgccaggagctgaagtatgatgtgggcggcggggagagatttgacagcctgacagacctggtggagcactacaagaagaaccccatggtggagaccctgggcaccgtgctgcagctgaagcagcccctgaacaccacccgcatcaatgctgctgagattgagagccgggtgcgggagctgagcaagctggccgagaccacagacaaggtgaagcagggcttctgggaggagtttgagaccctgcagcagcaggagtgcaagctgctgtacagcaggaaggagggccagaggcaggagaacaagaacaagaaccgctacaagaacatcctgccctttgaccacaccagggtggtgctgcatgatggagaccccaatgaacctgtgtctgactacatcaatgccaacatcatcatgcctgagtttgagaccaagtgcaacaacagcaagcccaagaagagctacatcgccacccagggctgcctgcagaacacagtgaatgacttctggaggatggtgttccaggagaacagccgggtgattgtgatgaccaccaaggaggtggagcggggcaagagcaaatgtgtgaagtactggccagatgaatatgccctgaaggagtatggagtgatgagggtgagaaatgtgaaggagagcgctgcccatgactacaccctgcgggagctgaagctgagcaaggtgggccagggcaacacagagaggacagtgtggcagtaccacttccgcacctggccagaccacggcgtgcccagcgaccccggcggcgtgctggacttcctggaggaggtgcaccacaagcaggagagcatcatggatgctggccctgtggtggtgcactgcaggtag

SEQ ID NO: 232170 - DNA, 651 bp, Artificial Sequence
  derived and/or modified sequence
atgaccagccggcggtggttccaccccaacatcaccggcgtggaggcagagaaccttctcctgacacgaggcgtcgacggatcttttcttgccaggccttccaagtcaaatccgggagattttactcttagcgtaagacgcaacggcgctgtgacacacattaaaattcagaacaccggagactattatgacttgtatggtggagagaagtttgccactctagctgagctggtgcagtattatatggagcaccatggacagctgaaagagaaaaatggtgacgtgatagaactgaaatatcctttgaattgtgcagatccaacctctgagcggtggttccacggccatctcagcggcaaggaggcagagaaattactcaccgagaagggtaaacacggtagcttcttggtacgggagtcccagagccacccgggggatttcgttctttccgtccgtacgggggacgacaagggggagagcaatgatgggaagtcgaaggttacacacgtcatgattcggtgccaggagctgaaatacgatgtgggtggcggagaaagattcgactcattgactgacctggtggaacattacaaaaaaaaccctatggtcgagacactcggtaccgtgctgcagctgaaacaaccactatag

SEQ ID NO: 232171 - DNA, 1383 bp, Artificial Sequence
  derived and/or modified sequence
atgaccagccggcggtggttccaccccaacatcaccggcgtggaggcagaaaatctcctgctgacccggggagtggacggctcttttttggctcgtccctccaagtcaaaccccggggattttacgctgagtgttcgcagaaacggcgctgtgactcatataaagatccagaatacgggcgactattacgatctgtatgggggcgaaaagttcgcgaccctcgcagagctggtgcagtattatatggagcaccacggacaactgaaggaaaagaacggggatgtgatcgagctcaaatatcctcttaattgtgcagatccaacctctgaacggtggttccatggccatctcagtggcaaagaagccgaaaagctcctgaccgagaaaggaaagcacgggtcgttcctcgtgcgggagtcacaaagccatcccggggattttgtactttctgtccgcacaggcgatgataaaggggagagtaacgacggtaagagcaaggttacacacgtcatgatccgttgtcaggaacttaagtacgacgtaggaggcggagagagattcgactccctcacagatttagttgagcattacaaaaagaacccaatggtggagactctcggtaccgttctgcagctcaagcagccattgaacacaactagaatcaacgctgcggaaattgaaagtagggtgcgcgagctgagcaagctggctgagacaacggacaaggttaagcaaggcttctgggaggaatttgagactttacagcaacaggaatgtaaactcctgtatagtcgcaaagagggccagcggcaggagaacaagaataagaatcgttacaagaatatcctgccattcgaccacactcgagtggtgctgcacgatggggaccccaacgagcctgtctccgattatattaatgccaacattatcatgcccgaatttgaaactaagtgtaacaacagcaaaccgaaaaaaagttatattgcgactcaaggatgcctgcagaacaccgtcaatgacttctggagaatggtgtttcaggaaaatagtcgtgtgattgtcatgactacaaaagaggtggaaaggggcaagtcaaaatgtgtgaagtattggcctgacgaatacgctctgaaggaatatggcgtgatgcgcgtgcggaatgtgaaggaatcagccgcacacgattacaccctgagagaactgaaactcagcaaagtgggtcaaggcaatacagaaagaacggtttggcagtaccattttcgaacgtggccagaccatggagtgccgtctgaccccggcggcgtgctggacttcctagaggaggtccaccacaagcaggagtcaattatggatgcgggtccagtagtcgttcattgtcgatag

SEQ ID NO: 232172 - DNA, 651 bp, Artificial Sequence
  derived and/or modified sequence
atgacaagccggagatggtttcatcccaacattacaggagtggaagccgaaaacctgttgctgactcgcggagtcgatggttctttcctcgccaggccttcgaaaagtaatcctggcgattttacactctccgtgcgaagaaatggagctgtcacacacatcaaaattcaaaacactggagactactacgatctgtacgggggagagaagtttgccaccttggccgaactcgtgcaatattatatggaacaccatggccagctcaaagagaaaaacggagacgtgatcgaattaaaatacccactcaattgtgccgaccctacttctgagagatggttccacggccatcttagcgggaaagaggctgagaagctcttaacagagaaaggcaaacacgggtcattcttggtcagggagagtcaaagccatcccggtgatttcgtgctaagtgtgagaacaggagatgacaagggagagagtaacgacggaaaatcaaaggtgacccacgtgatgattaggtgccaggagctcaagtacgatgtcggaggtggggaacgctttgatagccttaccgacctcgttgagcactataaaaagaacccaatggtcgagaccctcggcacagtgttgcagctgaaacagcccctgtag

SEQ ID NO: 232173 - DNA, 1383 bp, Artificial Sequence
  derived and/or modified sequence
atgaccagcaggcggtggtttcaccctaacatcacaggagtggaagctgagaacctgctcctgactcggggtgtggacggctctttcctggctcggccttctaagagcaacccaggagacttcaccctgagtgtccggagaaatggggctgttactcatatcaaaatccagaatacgggggattactacgacctctatggcggagaaaagttcgcaacactggctgaactggtgcagtactacatggaacatcacggccagctgaaagagaaaaacggtgacgtgatcgagctgaagtaccccctgaattgtgcggaccctactagtgagcgatggttccacggtcacctatcaggcaaagaggccgagaagctactaactgaaaagggtaaacacggttcatttcttgtcagggaatcacaatctcatcccggagactttgtgctgtcagttcgtaccggcgacgacaagggtgagagcaatgacgggaagtcgaaagtgacccacgtaatgataaggtgtcaggaactgaagtacgatgtcggaggcggagagaggtttgactctctgactgacctcgtggagcactataaaaaaaatcctatggttgaaaccctaggcaccgtcctccagctaaagcagcccctaaataccacccggataaacgcagctgagatagagagcagagtccgtgaattaagtaagttggccgagaccaccgataaggtgaagcagggcttctgggaggaatttgagaccctgcagcagcaagagtgtaaactgctgtactcccgcaaggaggggcagcggcaggagaacaagaataaaaatcggtataagaatattctcccttttgaccatacaagagtggttttgcacgatggggaccctaacgagccagtgagcgattacatcaacgcgaatatcatcatgcctgagtttgaaacaaaatgcaataactcaaaaccaaagaagtcatatatcgccactcaaggttgcctgcaaaacaccgtgaacgatttttggcgaatggtcttccaggagaatagccgggtaatcgtaatgaccaccaaagaagttgaaaggggcaagagtaaatgcgtgaagtactggccagacgagtacgccttgaaggagtacggcgtgatgcgcgttcgcaacgtgaaggaatctgcagcgcacgactatactctccgagagcttaagctgagcaaggtcggacagggtaacaccgaaagaaccgtctggcagtaccacttcaggacctggccagaccacggggtgccgtccgaccctggtggcgtcctggatttcctcgaggaggtccaccacaagcaagagtcaataatggatgctggcccagtggtcgtccactgccggtag

SEQ ID NO: 232174 - DNA, 801 bp, Artificial Sequence
  derived and/or modified sequence
ccccaggcctggaggggggtctgtgcgcggccggctggctctgccccgcgtccggtcccgagcgggcctccctcgggccagcccgatgtgaccgagcccagcggagcctgagcaaggagcgggtccgtcgcggagccggagggcgggaggaacatgacatcgcggagatggtttcacccaaatatcactggtgtggaggcagaaaacctactgttgacaagaggagttgatggcagttttttggcaaggcctagtaaaagtaaccctggagacttcacactttccgttagaagaaatggagctgtcacccacatcaagattcagaacactggtgattactatgacctgtatggaggggagaaatttgccactttggctgagttggtccagtattacatggaacatcacgggcaattaaaagagaagaatggagatgtcattgagcttaaatatcctctgaactgtgcagatcctacctctgaaaggtggtttcatggacatctctctgggaaagaagcagagaaattattaactgaaaaaggaaaacatggtagttttcttgtacgagagagccagagccaccctggagattttgttctttctgtgcgcactggtgatgacaaaggggagagcaatgacggcaagtctaaagtgacccatgttatgattcgctgtcaggaactgaaatacgacgttggtggaggagaacggtttgattctttgacagatcttgtggaacattataagaagaatcctatggtggaaacattgggtacagtactacaactcaagcagccattg

SEQ ID NO: 232175 - DNA, 1876 bp, Artificial Sequence
  derived and/or modified sequence
gcggaggaggagcgagccgggccggggggcagctgcacagtctccgggatccccaggcctggaggggggtctgtgcgcggccggctggctctgccccgcgtccggtcccgagcgggcctccctcgggccagcccgatgtgaccgagcccagcggagcctgagcaaggagcgggtccgtcgcggagccggagggcgggaggaacatgacatcgcggagatggtttcacccaaatatcactggtgtggaggcagaaaacctactgttgacaagaggagttgatggcagttttttggcaaggcctagtaaaagtaaccctggagacttcacactttccgttagaagaaatggagctgtcacccacatcaagattcagaacactggtgattactatgacctgtatggaggggagaaatttgccactttggctgagttggtccagtattacatggaacatcacgggcaattaaaagagaagaatggagatgtcattgagcttaaatatcctctgaactgtgcagatcctacctctgaaaggtggtttcatggacatctctctgggaaagaagcagagaaattattaactgaaaaaggaaaacatggtagttttcttgtacgagagagccagagccaccctggagattttgttctttctgtgcgcactggtgatgacaaaggggagagcaatgacggcaagtctaaagtgacccatgttatgattcgctgtcaggaactgaaatacgacgttggtggaggagaacggtttgattctttgacagatcttgtggaacattataagaagaatcctatggtggaaacattgggtacagtactacaactcaagcagccccttaacacgactcgtataaatgctgctgaaatagaaagcagagttcgagaactaagcaaattagctgagaccacagataaagtcaaacaaggcttttgggaagaatttgagacactacaacaacaggagtgcaaacttctctacagccgaaaagagggtcaaaggcaagaaaacaaaaacaaaaatagatataaaaacatcctgccctttgatcataccagggttgtcctacacgatggtgatcccaatgagcctgtttcagattacatcaatgcaaatatcatcatgcctgaatttgaaaccaagtgcaacaattcaaagcccaaaaagagttacattgccacacaaggctgcctgcaaaacacggtgaatgacttttggcggatggtgttccaagaaaactcccgagtgattgtcatgacaacgaaagaagtggagagaggaaagagtaaatgtgtcaaatactggcctgatgagtatgctctaaaagaatatggcgtcatgcgtgttaggaacgtcaaagaaagcgccgctcatgactatacgctaagagaacttaaactttcaaaggttggacaagggaatacggagagaacggtctggcaataccactttcggacctggccggaccacggcgtgcccagcgaccctgggggcgtgctggacttcctggaggaggtgcaccataagcaggagagcatcatggatgcagggccggtcgtggtgcactgcaggtgacagctcctgctgcccctctaggccacagcctgtccctgtctcctagcgcccagggcttgcttttacctacccactcctagctctttaactgtaggaagaatttaatatctgtttgaggcatagagcaactgcattgagggacattttgatcccaaggcatatttctcctagaccctacagcactgccattggccatggccatggcaacatgctcagttaaaacagcaaagactaagtcagcattatctctgagtccaccagaagttgtgcattaaacaacttcatcctgg

SEQ ID NO: 232176 - protein, 225 aa, Artificial Sequence
  derived and/or modified sequence
MAELKSLSGDAYLALSHGYAAAAAGLAYGAAREPEAARGYGTPGPGGDLPAAPAPRAPAQAAESSGEQSGDEDDAFEQRRRRRGPGSAADGRRRPREQRSLRLSINARERRRMHDLNDALDGLRAVIPYAHSPSVRKLSKIATLLLAKNYILMQAQALDEMRRLVAFLNQGQGLAAPVNAAPLTPFGQATVCPFSAGAALGPCPDKCAAFSGTPSALCKHCHEKP

SEQ ID NO: 232177 - DNA, 678 bp, Artificial Sequence
  derived and/or modified sequence
atggctgaactaaagtctctatcaggagacgcatatctggccctgtcgcatggttatgctgcagctgccgcaggcctggcctacggagccgctcgggagcctgaggctgcccgaggctatggaacgcctgggcccgggggcgacttacccgcggctcccgctccgcgcgcccctgctcaggcagccgaaagctctggcgagcaatctggagacgaagacgacgcctttgagcagagacgacggcgccgtggacccggatccgctgcggatggacgccggcgccctagagagcagaggtcgctgagattgtccatcaacgcaagggagcgacgacggatgcatgatctgaacgatgctctggatgggttaagggcagttattccctacgcacactccccttcagtgagaaagttgagtaagatcgcaacactgctgctggccaaaaattacattctcatgcaggcacaggcattagacgaaatgcgccgactggtggcctttcttaatcaagggcaaggtcttgctgctccggtgaacgccgcccctctaacaccattcggccaggctacagtgtgcccattctctgccggcgccgcgctgggcccttgtccagacaagtgtgctgcgtttagtgggacacccagcgccctgtgcaaacattgccatgagaagccttag

SEQ ID NO: 232178 - DNA, 678 bp, Artificial Sequence
  derived and/or modified sequence
atggccgagctgaagagcctgtctggagatgcctacctggccctgagccacggctacgccgctgctgctgctggcctggcctacggggccgcccgggagcctgaggccgcccggggctacggcaccccaggccctggaggagacctgcctgctgccccagccccccgggccccagcccaggccgctgagagcagtggagagcagagcggagatgaagatgatgcctttgagcagaggagaagaagaagaggccctggcagcgctgctgatggaagaagaagaccccgggagcagaggagcctgcggctgagcatcaatgcccgggagaggaggaggatgcatgacctgaatgatgccctggatggcctgcgggctgtgatcccctatgcccacagccccagcgtgaggaagctgagcaagatcgccaccctgctgctggccaagaactacatcctgatgcaggcccaggccctggatgagatgaggcggctggtggccttcctgaaccagggccagggcctggccgcccctgtgaatgctgcccccctgacccccttcggccaggccaccgtgtgccccttctctgctggggccgccctgggcccctgcccagacaagtgtgccgccttcagcggcaccccatctgccctgtgcaagcactgccacgagaagccctag

SEQ ID NO: 232179 - DNA, 678 bp, Artificial Sequence
  derived and/or modified sequence
atggccgagctgaagagcctgagcggcgacgcctacctggccctgagccatggctacgcagcagctgctgcagggctggcttatggtgcagcacgtgaacctgaagccgcacgaggatacggcactcctggccccggcggcgatctcccggcggcccctgcgcccagggcgccggcccaggccgcagaaagtagtggtgagcagtcaggtgacgaagatgacgccttcgagcagaggcgtcggcgccgaggccccggctctgcagccgacggcaggaggaggccacgcgaacagagaagtctgagactgtcaatcaacgctagagagcgcaggcggatgcatgatctgaacgacgcacttgacggcctgagagctgtgattccatacgcccactctccatctgtgcgcaaattgtccaaaatcgccacactgttgctcgcgaaaaactacatattgatgcaggctcaagcattggacgagatgcgtcgattggtagcgtttctgaatcaaggccagggcctggcagccccggtgaatgccgcacctttgacccccttcggacaggccacagtgtgcccgttctctgccggggcagctctgggcccatgtcctgacaaatgcgccgcgttcagcggaacgccctctgccctgtgcaaacattgtcacgaaaagccatag

SEQ ID NO: 232180 - DNA, 594 bp, Artificial Sequence
  derived and/or modified sequence
agcagtcgcggtgtgcggctcggcgcgggctcacaaagagctcggcctcgcggactgagccggcggcagcggggcggggacggcggcgtacccgggcagcccagcgccctggccaggcgtgcctgtgcttaatcagcactgacgactggtgctgcttcagttgatttgatacacctagaggcagcctcatctccaacttgccttgacttcgtctggggagctgccgtgggggacccctggactggcagcattcccacccctcactttggcaaccctggtctaactccgcggagggagctgttcatcctctgggggctgctgggccagaaatatctcttacctgataatgtcaggcatcagaggttcctgtttcgtggtctcctgaatatttacgcgttgctgaatctcctgtggacaaaccaccaataggccaggactgtcctgtggacagacggggtgagcctcttcttgtgtctggagattctgaaaagatttgatcaccaggagatttttcgggacattaccaaaccactcattttagtggctgcctccgggtgatgatggctgtgtgaacgactgccatggcccaccgga

SEQ ID NO: 232181 - DNA, 678 bp, Artificial Sequence
  derived and/or modified sequence
atggctgaactgaagtctctcagcggagatgcatatttggccctttctcacggatatgccgctgcagctgcagggctggcgtacggggcagcacgggagcccgaagcggcaaggggctacgggacaccgggacctggcggtgacctgccagctgctcctgccccacgtgcacccgcacaggcagctgaaagttcgggggaacagtctggcgatgaagacgacgcgtttgaacaaagaagaagacgccgaggtcccggtagtgcggcagatggacgcagaagaccgcgtgaacagcgctcactccggttgtccattaacgctcgcgaaagaaggcggatgcacgacctcaacgacgctctggacggcctgcgtgccgtgatcccctatgctcatagccctagcgtgaggaaattgtccaagatagcgactctgctgctggccaaaaattatatcttgatgcaggctcaggccctggacgagatgaggcgattggtggcctttcttaatcagggtcagggcctcgccgctcccgttaacgccgctcctctgacccctttcggccaggcgactgtgtgtcccttttcagccggagccgctttaggcccatgccctgataaatgtgctgcattttccggcactccttcagctctgtgcaaacactgtcacgagaaaccatag

SEQ ID NO: 232182 - DNA, 1057 bp, Artificial Sequence
  derived and/or modified sequence
tgattggacagcagcgaggtcccaccgggcgcctccgcggcttaaaaccgaagcgggggcgagggggaggtagagcccgccccctgcgcgtcgcggctgggagggagaggaggtgggagagaaggaagaggcggaggaggcagcgggcgccgaggctctgggacccgcaggcaagccagaccgacgcgcagagccgggagcctcatcgcagcggcagcggcagcggcgggctcgggccggcctcgggggctgctcacccacatgagcatccgcccacccggcgagcccccgagcccaggcggcgcggccatggccgagctcaagtcgctgtcgggggacgcgtacctggcactaagccacggctacgcggcggcggctgcgggtctcgcctacggggcggcgcgagaacccgaagcggcccgcggctacggcactccgggcccgggcggcgacctccccgcggcgcctgcacctcgcgccccagctcaggcggcggagagcagcggcgaacagagcggggacgaggacgacgccttcgagcagcggcggcggcggcgcgggccagggagcgcggcggacgggcggcggcggccgcgagagcagcggtctctgcggctcagcatcaacgcgcgcgagcggcggcgcatgcacgacctaaacgacgcgctggacgggctgcgagccgtcatcccctacgcgcacagcccgtcggtgcgcaagctctccaagatcgccacgctgctgctcgccaagaactatatcctcatgcaggcgcaggccctggacgagatgcggcgcctggtggccttcctcaaccagggccagggcctggccgcgcccgtaaacgccgcgcccttgacgcccttcggccaggccactgtgtgccccttctccgcaggcgccgccctggggccctgccctgacaagtgcgccgccttctccgggacgccctccgcgctttgcaaacactgtcacgagaagccgtgaccgcgcgggcccccggccctcccgcacgcgtcctccgatcgcccctgtgactgtctctctgcccggacag

SEQ ID NO: 232183 - DNA, 678 bp, Artificial Sequence
  derived and/or modified sequence
atggccgagctgaagagcctgagcggcgacgcctacctggccctgagccacggctacgccgccgccgccgccggcctggcctacggcgccgccagagagcccgaggccgccagaggctacggcacccccggccccggcggcgacctgcccgccgcccccgcccccagagcccccgcccaggccgccgagagcagcggcgagcagagcggcgacgaggacgacgccttcgagcagagaagaagaagaagaggccccggcagcgccgccgacggcagaagaagacccagagagcagagaagcctgagactgagcatcaacgccagagagagaagaagaatgcacgacctgaacgacgccctggacggcctgagagccgtgatcccctacgcccacagccccagcgtgagaaagctgagcaagatcgccaccctgctgctggccaagaactacatcctgatgcaggcccaggccctggacgagatgagaagactggtggccttcctgaaccagggccagggcctggccgcccccgtgaacgccgcccccctgacccccttcggccaggccaccgtgtgccccttcagcgccggcgccgccctgggcccctgccccgacaagtgcgccgccttcagcggcacccccagcgccctgtgcaagcactgccacgagaagccctag

SEQ ID NO: 232184 - protein, 227 aa, Artificial Sequence
  derived and/or modified sequence
MSYFRTPQTHPGPLPSGQGGAASPGLSLGLCSPVEPVVVASGGTGPLSQKAEQVAPAAQAWGPALAMPQARGCPGGTSWETLRKEYSRNCHKFPHVRQLESLGWDNGYSRSRAPDLGGPSRPRPLMLCGLSPRVLPVPSEAVGKEASSQPDICILTLAMMIAGIPTVPVPGVREEDLIWAAQAFMMAHPEPEGAVEGARWEQAHAHTASGKMPLVRSKRGQPPGSCL

SEQ ID NO: 232185 - DNA, 684 bp, Artificial Sequence
  derived and/or modified sequence
atgagctacttcagaaccccccagacccaccccggccccctgcccagcggccagggcggcgccgccagccccggcctgagcctgggcctgtgcagccccgtggagcccgtggtggtggccagcggcggcaccggccccctgagccagaaggccgagcaggtggcccccgccgcccaggcctggggccccgccctggccatgccccaggccagaggctgccccggcggcaccagctgggagaccctgagaaaggagtacagcagaaactgccacaagttcccccacgtgagacagctggagagcctgggctgggacaacggctacagcagaagcagagcccccgacctgggcggccccagcagacccagacccctgatgctgtgcggcctgagccccagagtgctgcccgtgcccagcgaggccgtgggcaaggaggccagcagccagcccgacatctgcatcctgaccctggccatgatgatcgccggcatccccaccgtgcccgtgcccggcgtgagagaggaggacctgatctgggccgcccaggccttcatgatggcccaccccgagcccgagggcgccgtggagggcgccagatgggagcaggcccacgcccacaccgccagcggcaagatgcccctggtgagaagcaagagaggccagccccccggcagctgcctgtag

SEQ ID NO: 232186 - DNA, 684 bp, Artificial Sequence
  derived and/or modified sequence
atgagctacttcaggaccccccaaacacacccgggcccacttccaagtggacagggaggcgctgcaagtccaggactttctctcggtctgtgctcccccgtggagcctgttgtggtggcttcaggtggcactggccctctcagtcagaaagcagagcaggtagctccggcagctcaggcctggggtcctgccctagccatgcctcaggcacgcggctgtccaggtggaacttcttgggaaacactgcgtaaagagtatagcaggaactgccataagtttccacatgtacggcagctggagtctctgggatgggacaatgggtattcacgcagccgagccccagacctgggcggaccttcccgcccccgccccctgatgctgtgcggcttgtcacctagagttctacccgtgccctccgaggcggtgggaaaggaggcgagctcacagccagatatatgcattttgacactcgccatgatgatagccgggatccctacagtgccggtgcctggtgtcagggaggaggaccttatttgggccgctcaggccttcatgatggcacatcccgagccggagggggccgttgaaggggcgcgttgggagcaagcacatgcccatacagccagcggaaagatgcctttggtgaggagcaagcgcgggcagccccccggatcctgtctgtag

SEQ ID NO: 232187 - DNA, 684 bp, Artificial Sequence
  derived and/or modified sequence
atgagctacttccgcaccccccagacccaccctggccccctgcccagcggccagggcggggccgccagccctggcctgagcctgggcctgtgcagccctgtggagcctgtggtggtggccagcggcggcaccggccccctgagccagaaggccgagcaggtggccccagctgcccaggcctggggccctgccctggccatgccccaggcccggggctgccctgggggcacctcctgggagaccctgaggaaggagtacagcaggaactgccacaagttcccccacgtgcggcagctggagagcctgggctgggacaatggctacagccgcagccgggccccagacctgggcggccccagccggccccggcccctgatgctgtgtggcctgagcccccgggtgctgcctgtgcccagcgaggccgtgggcaaggaggccagcagccagcctgacatctgcatcctgaccctggccatgatgattgctggcatccccaccgtgcctgtgcctggggtgcgggaggaggacctgatctgggccgcccaggccttcatgatggcccaccctgagcctgagggcgctgtggagggcgcccgctgggagcaggcccacgcccacacagccagcggcaagatgcccctggtgcgcagcaagaggggccagcccccaggcagctgcctgtag

SEQ ID NO: 232188 - DNA, 684 bp, Artificial Sequence
  derived and/or modified sequence
atgagctacttccggaccccccagacccaccccggccccctgccctcaggccagggtggggcagcctcacctggcctgtccctagggctgtgctcccctgtggaacctgtggtcgttgccagcggtggcacagggccccttagccagaaagctgagcaagtagcgcctgccgcccaggcttggggccccgctctcgcaatgccccaggcacgggggtgtccaggcggaacctcctgggaaacgctcagaaaggaatattcccggaattgccataaattccctcatgtgcgccagttagaaagcttgggctgggacaacggctactcacgttccagggctcctgatttgggcggtccgtcccggccaaggcctcttatgttatgcggactttcaccccgggtcctgccagtgccctctgaagctgtagggaaggaggcatcctcccagcccgatatttgcattctgacactcgccatgatgatcgctgggatacccaccgtcccagtgccaggtgtgcgcgaagaagacctgatttgggccgcccaggccttcatgatggctcatcccgagccggaaggagctgtggaaggggcacgttgggagcaggctcacgctcatacagcttcaggcaagatgcctctagtccggagcaaacggggtcagccccctggctcttgcctatag

SEQ ID NO: 232189 - DNA, 684 bp, Artificial Sequence
  derived and/or modified sequence
atgtcttactttcggacccctcagactcatcctggacccttgccgagcggacagggtggggcagcatcgcctgggctttctctcggcctgtgctctccagtcgagcccgtcgtggtggcatctgggggaaccggtcctctgtctcagaaagcggaacaggttgccccagcagcccaagcttggggacctgctttggccatgcctcaggccagaggatgcccaggcggaacatcttgggagacgttgagaaaagaatattcgcgtaattgccacaagttccctcatgtgcgtcaactggaatcacttggatgggataatggctatagtagaagccgggcacctgatttggggggaccaagcaggccaagaccgctcatgctgtgcgggttgagccctcgcgtattacccgtcccgtctgaggcagttggaaaagaggcctccagtcagcccgacatctgcattctgacgctggctatgatgatagcgggaatccccactgtcccagttcccggagttagagaagaagaccttatttgggcagcccaggcctttatgatggcccatccagaacccgaaggagccgtggagggcgcacgttgggagcaggctcacgcacacaccgcttccggaaagatgcccctcgtgagatctaagcgaggacagccccctggcagttgcctgtag

SEQ ID NO: 232190 - DNA, 757 bp, Artificial Sequence
  derived and/or modified sequence
gcggcagatcactattccctcacaaaccggggctttggggaagccatgtcctacttcaggactccacaaactcatccaggtcctctgccttccggccaaggtggggctgcttctccaggcttgtcccttggcctctgtagtcctgtagagccagtggtggtggcctctggtggaacaggcccactgagccagaaagctgagcaggtggcacctgctgcccaggcctggggcccagccctggcaatgccacaagccaggggctgccctggggggactagctgggagacactacggaaggaatacagccgaaactgccacaaattcccgcatgtgaggcagctggagagcttgggctgggacaatggctactccagaagcagagcccctgacctgggtggccccagcaggcctaggcccctgatgctgtgtgggctgtcaccacgggttctaccggtaccctctgaggcagtggggaaggaggccagctcccagcctgatatctgcatcctcaccctcgccatgatgatcgctggcatccccaccgtgcccgtcccaggagttcgggaagaggacctgatctgggccgctcaagctttcatgatggcccatccggagccagagggtgctgtggagggggcgcggtgggagcaggcacatgcccacacagcctctgggaagatgcccctagtgagatctaaaaggggccagcctcctggctcctgcttgtagatggatgaaatagcaccagatatgtagg

SEQ ID NO: 232191 - protein, 147 aa, Artificial Sequence
  derived and/or modified sequence
MLGLPWKGGLSWALLLLLLGSQILLIYAWHFHEQRDCDEHNVMARYLPATVEFAVHTFNQQSKDYYAYRLGHILNSWKEQVESKTVFSMELLLGRTRCGKFEDDIDNCHFQESTELNNTFTCFFTISTRPWMTQFSLLNKTCLEGFH

SEQ ID NO: 232192 - protein, 147 aa, Artificial Sequence
  derived and/or modified sequence
MWSLPPSRALSCAPLLLLFSFQFLVTYAWRFQEEEEWNDQKQIAVYLPPTLEFAVYTFNKQSKDWYAYKLVPVLASWKEQGYDKMTFSMNLQLGRTMCGKFEDDIDNCPFQESPELNNTCTCFFTIGIEPWRTRFDLWNKTCSGGHS

SEQ ID NO: 232193 - DNA, 444 bp, Artificial Sequence
  derived and/or modified sequence
atgctagggctgccatggaagggaggcttgtcctgggcattgctactgctgctgctgggctctcagattctcctgatctacgcctggcacttccatgaacagagagattgtgatgaacacaacgtgatggccaggtatttaccggcaactgtagagtttgccgtgcacacttttaatcaacaatctaaagattactatgcgtacaggttaggtcacatcctgaacagttggaaagagcaggtggaatccaaaacagtcttctctatggagttgttgcttggaagaacgcgatgtggcaaattcgaggacgacatcgacaattgccatttccaggagagtacagaactgaacaacacatttacctgtttcttcaccatcagcacgagaccgtggatgactcagttcagcttgctcaacaaaacctgtctggagggcttccattag

SEQ ID NO: 232194 - DNA, 444 bp, Artificial Sequence
  derived and/or modified sequence
atgtggagcctccccccatcccgggcattgagttgtgccccacttctcttgcttttcagtttccagtttttggtcacatacgcctggcgattccaggaggaagaggagtggaatgatcagaaacagattgctgtctacctgcctcctacactggagttcgccgtctatacattcaataagcaatctaaggactggtacgcctataagttggtgcccgtgctggcatcttggaaagagcagggctacgacaagatgacatttagcatgaacctgcagcttggacggacgatgtgcgggaaattcgaggacgatattgacaactgcccctttcaggagtcaccagaattgaacaatacctgcacatgtttcttcacaattggaatcgagccatggcgcactaggttcgatctgtggaataagacttgttccggaggccattcttag

SEQ ID NO: 232195 - DNA, 444 bp, Artificial Sequence
  derived and/or modified sequence
atgctaggcctcccttggaaaggaggtttatcttgggcacttttactgcttctcctgggttcccagatattacttatctacgcatggcattttcacgaacagagagactgtgatgagcacaacgtaatggcccgctatctcccagccactgtggaatttgccgtccacacatttaatcagcagagtaaggactactatgcatatcgcctcggacacattctgaatagctggaaagagcaagtagagtcgaagactgtgttcagtatggagctgctgctcggaagaactagatgcggcaaatttgaagatgatatcgacaattgtcacttccaggagagcaccgagctcaataatacctttacctgcttcttcacaatctcaacgcggccatggatgacccagttttccttactcaacaaaacatgcctggaaggattccattag

SEQ ID NO: 232196 - DNA, 444 bp, Artificial Sequence
  derived and/or modified sequence
atgtggtccttacccccatcccgagctctgagctgtgccccgctcctgctactctttagctttcagtttctggtaacctacgcctggcggtttcaagaagaagaagaatggaatgatcagaaacagattgccgtgtatctgccacctacgctcgaattcgccgtgtacacctttaacaagcaatcaaaggactggtatgcatacaaattagtccccgtcttagcgtcctggaaggaacaggggtacgataaaatgacattctctatgaacctacaactgggaagaaccatgtgtggcaagttcgaggacgatattgacaattgtccatttcaagagtcaccagaactgaataacacctgcacttgctttttcacaattggcattgaaccttggcggacccggtttgacctgtggaataaaacctgttccggcggacactcttag

SEQ ID NO: 232197 - DNA, 444 bp, Artificial Sequence
  derived and/or modified sequence
atgctaggcctcccttggaaaggaggtttatcttgggcacttttactgcttctcctgggttcccagatattacttatctacgcatggcattttcacgaacagagagactgtgatgagcacaacgtaatggcccgctatctcccagccactgtggaatttgccgtccacacatttaatcagcagagtaaggactactatgcatatcgcctcggacacattctgaatagctggaaagagcaagtagagtcgaagactgtgttcagtatggagctgctgctcggaagaactagatgcggcaaattcgaagacgacattgataactgccattttcaggaatctaccgagctgaataatacttttacatgttttttcacaatttcaacacggccctggatgacacaattttctctcttgaataagacctgcctggagggctttcattag

SEQ ID NO: 232198 - DNA, 444 bp, Artificial Sequence
  derived and/or modified sequence
atgtggtccttacccccatcccgagctctgagctgtgccccgctcctgctactctttagctttcagtttctggtaacctacgcctggcggtttcaagaagaagaagaatggaatgatcagaaacagattgccgtgtatctgccacctacgctcgaattcgccgtgtacacctttaacaagcaatcaaaggactggtatgcatacaaattagtccccgtcttagcgtcctggaaggaacaggggtacgataaaatgacattctctatgaacctacaactgggaagaaccatgtgtggcaagttcgaggacgacattgataattgcccgttccaagaatctcctgaacttaacaatacttgtacctgtttctttaccatcggcatcgaaccgtggcgcacaagattcgacctgtggaacaagacatgttctggcggacactcatag

SEQ ID NO: 232199 - DNA, 444 bp, Artificial Sequence
  derived and/or modified sequence
atgctgggcctgccctggaagggcggcctgagctgggccctgctgctgctgctgctgggcagccagatcctgctgatctacgcctggcacttccacgagcagagagactgcgacgagcacaacgtgatggccagatacctgcccgccaccgtggagttcgccgtgcacaccttcaaccagcagagcaaggactactacgcctacagactgggccacatcctgaacagctggaaggagcaggtggagagcaagaccgtgttcagcatggagctgctgctgggcagaaccagatgcggcaagttcgaggacgacatcgacaactgccacttccaggagagcaccgagctgaacaacaccttcacctgcttcttcaccatcagcaccagaccctggatgacccagttcagcctgctgaacaagacctgcctggagggcttccactag

SEQ ID NO: 232200 - DNA, 444 bp, Artificial Sequence
  derived and/or modified sequence
atgtggagcctgccccccagcagagccctgagctgcgcccccctgctgctgctgttcagcttccagttcctggtgacctacgcctggagattccaggaggaggaggagtggaacgaccagaagcagatcgccgtgtacctgccccccaccctggagttcgccgtgtacaccttcaacaagcagagcaaggactggtacgcctacaagctggtgcccgtgctggccagctggaaggagcagggctacgacaagatgaccttcagcatgaacctgcagctgggcagaaccatgtgcggcaagttcgaggacgacatcgacaactgccccttccaggagagccccgagctgaacaacacctgcacctgcttcttcaccatcggcatcgagccctggagaaccagattcgacctgtggaacaagacctgcagcggcggccacagctag

SEQ ID NO: 232201 - DNA, 444 bp, Artificial Sequence
  derived and/or modified sequence
atgctcggattgccctggaaaggtggactgagttgggcattacttttgctcctacttggcagccagattctgctcatttacgcatggcacttccatgaacaaagggactgcgacgaacataacgtaatggctcgttatcttccagctacagtagagttcgctgtccacacattcaatcagcagtccaaggactactacgcataccgtctcggtcacattctcaattcctggaaggagcaggtagagtccaagaccgtcttcagtatggaactgcttttagggcggacccgctgtgggaaatttgaagatgatattgacaattgtcacttccaggagtctaccgagctgaacaacacatttacctgctttttcacaatttccacgcggccctggatgacacaattcagtttgctcaacaagacgtgcttagaaggtttccactag

SEQ ID NO: 232202 - DNA, 444 bp, Artificial Sequence
  derived and/or modified sequence
atgtggagtttgccaccatctcgtgcactatcatgcgcccctttactactgcttttctctttccagttcctcgttacatatgcctggagatttcaggaagaggaggagtggaatgaccagaagcagatagctgtttaccttcctccaaccctggagtttgctgtctatacctttaacaaacagagcaaggactggtacgcttacaagctggtccctgtgttagcaagctggaaggaacagggctatgacaaaatgacatttagtatgaacctacagctgggccgaactatgtgcgggaagttcgaagacgacatcgataattgtccttttcaggagagccctgaacttaacaacacatgcacctgtttttttaccattggaattgagccatggagaaccaggttcgatctgtggaacaagacatgtagcggaggtcatagctag

SEQ ID NO: 232203 - DNA, 444 bp, Artificial Sequence
  derived and/or modified sequence
atgctgggcctgccctggaagggcggcctgtcctgggccctgctgctgctgctgctgggcagccagatcctgctgatctatgcctggcacttccacgagcagagggactgtgatgagcacaacgtgatggcccgctacctgcctgccaccgtggagtttgctgtgcacaccttcaaccagcagagcaaggactactatgcctaccgcctgggccacatcctgaacagctggaaggagcaggtggagagcaagacagtgttctccatggagctgctgctgggccgcacccgctgtgggaagtttgaagatgacatcgacaactgccacttccaggagagcacagagctgaacaacaccttcacctgcttcttcaccatcagcacccggccctggatgacccagttcagcctgctgaacaagacctgcctggagggcttccactag

SEQ ID NO: 232204 - DNA, 444 bp, Artificial Sequence
  derived and/or modified sequence
atgtggagcctgccccccagccgggccctgagctgtgcccccctgctgctgctcttctccttccagttcctggtgacctacgcctggaggttccaggaggaggaggagtggaatgaccagaagcagattgctgtgtacctgccccccaccctggagtttgctgtgtacaccttcaacaagcagagcaaggactggtacgcctacaagctggtgcctgtgctggcctcctggaaggagcagggctatgacaagatgaccttctccatgaacctgcagctgggccgcaccatgtgtgggaagtttgaagatgacatcgacaactgccccttccaggagagccctgagctgaacaacacctgcacctgcttcttcaccatcggcatcgagccctggaggaccaggtttgacctgtggaacaagacctgcagcggcggccacagctag

SEQ ID NO: 232205 - DNA, 959 bp, Artificial Sequence
  derived and/or modified sequence
agccttcaaagctagtggcagagggtagctcccctcctgcctgtggcttgtgctggcctagagagtatagggcagaaggatggcagatgagtgactccacatccagagctgcctccctttaatccaggatcctgtccttcctgtcctgtaggagtgcctgttgccagtgtggggtgagacaagtttgtcccacagggctgtctgagcagataagattaagggctgggtctgtgctcaattaactcctgtgggcacgggggctgggaagagcaaagtcagcggtgcctacagtcagcaccatgctgggcctgccgtggaagggaggtctgtcctgggcgctgctgctgcttctcttaggctcccagatcctgctgatctatgcctggcatttccacgagcaaagggactgtgatgaacacaatgtcatggctcgttacctccctgccacagtggagtttgctgtccacacattcaaccaacagagcaaggactactatgcctacagactggggcacatcttgaattcctggaaggagcaggtggagtccaagactgtattctcaatggagctactgctggggagaactaggtgtgggaaatttgaagacgacattgacaactgccatttccaagaaagcacagagctgaacaatactttcacctgcttcttcaccatcagcaccaggccctggatgactcagttcagcctcctgaacaagacctgcttggagggattccactgagtgaaacccactcacaggcttgtccatgtgctgctcccacattccgtggacatcagcactactctcctgaggactcttcagtggctgagcagctttggacttgtttgttatcctattttgcatgtgtttgagatctcagatcagtgttttagaaaatccacacatcttgagcctaatcatgtagtgtagatcattaaacatcagcattttaagaaa

SEQ ID NO: 232206 - DNA, 444 bp, Artificial Sequence
  derived and/or modified sequence
atgtggagtctgccgccgagcagggctctgtcctgtgcgccactgctgcttctcttcagcttccagttcctggttacctatgcttggcgtttccaagaggaagaggagtggaatgaccaaaaacaaattgctgtttatctccctcccaccctggagtttgccgtgtacacattcaacaagcagagcaaggactggtatgcctacaagctggtgcctgtcctggcttcctggaaggagcagggttatgataagatgacattctccatgaatctgcaactgggcagaaccatgtgtgggaaatttgaagatgacattgacaactgcccttttcaagagagcccagagctgaacaatacctgcacctgcttcttcaccattggaatagagccctggaggacacggtttgacctctggaacaagacgtgctcaggcgggcattcctga

SEQ ID NO: 232207 - DNA, 444 bp, Artificial Sequence
  derived and/or modified sequence
atgctgggcctgccctggaagggcggcctgagctgggccctgctgctcctccttctcggaagccagatcctcttgatttacgcatggcactttcacgagcagcgggattgtgacgaacataatgtgatggctaggtacctccctgctaccgtggagttcgccgttcatacgttcaatcagcaaagcaaggattattacgcctaccgcctgggccatatcctgaattcatggaaggagcaggtggaaagtaaaaccgtgttctccatggagctgcttctgggacgaactagatgtggcaagttcgaagacgatatagacaattgccacttccaggaatccaccgaactcaataacacatttacatgttttttcaccataagtacccgtccttggatgacccagttttctctgctgaataagacgtgtctggaggggttccactag

SEQ ID NO: 232208 - DNA, 444 bp, Artificial Sequence
  derived and/or modified sequence
atgtggagcctgccccccagccgggccctgagctgcgcccccctgttactgttgttttcttttcaattccttgtaacttacgcgtggaggttccaagaagaggaagagtggaacgaccagaagcagatcgctgtgtatctgccccctactctcgaattcgcggtttacaccttcaacaagcaatccaaggactggtatgcctacaagctggtccccgtgctcgcatcttggaaggaacaggggtacgacaagatgaccttctctatgaacctccagttagggaggacaatgtgtggaaaatttgaagatgatatcgacaattgtccgttccaggagtcaccggagttgaacaacacttgtacatgttttttcacaatcgggatcgaaccttggagaacaagatttgatctctggaataaaacttgttcaggagggcattcttag

SEQ ID NO: 232209 - RNA, 444 nt, Artificial Sequence
  derived and/or modified sequence
augcuaggccucccuuggaaaggagguuuaucuugggcacuuuuacugcuucuccuggguucccagauauuacuuaucuacgcauggcauuuucacgaacagagagacugugaugagcacaacguaauggcccgcuaucucccagccacuguggaauuugccguccacacauuuaaucagcagaguaaggacuacuaugcauaucgccucggacacauucugaauagcuggaaagagcaaguagagucgaagacuguguucaguauggagcugcugcucggaagaacuagaugcggcaaauuugaagaugauaucgacaauugucacuuccaggagagcaccgagcucaauaauaccuuuaccugcuucuucacaaucucaacgcggccauggaugacccaguuuuccuuacucaacaaaacaugccuggaaggauuccauuag

SEQ ID NO: 232210 - RNA, 444 nt, Artificial Sequence
  derived and/or modified sequence
augugguccuuacccccaucccgagcucugagcugugccccgcuccugcuacucuuuagcuuucaguuucugguaaccuacgccuggcgguuucaagaagaagaagaauggaaugaucagaaacagauugccguguaucugccaccuacgcucgaauucgccguguacaccuuuaacaagcaaucaaaggacugguaugcauacaaauuaguccccgucuuagcguccuggaaggaacagggguacgauaaaaugacauucucuaugaaccuacaacugggaagaaccauguguggcaaguucgaggacgauauugacaauuguccauuucaagagucaccagaacugaauaacaccugcacuugcuuuuucacaauuggcauugaaccuuggcggacccgguuugaccuguggaauaaaaccuguuccggcggacacucuuag

SEQ ID NO: 232211 - RNA, 444 nt, Artificial Sequence
  derived and/or modified sequence
augcuaggccucccuuggaaaggagguuuaucuugggcacuuuuacugcuucuccuggguucccagauauuacuuaucuacgcauggcauuuucacgaacagagagacugugaugagcacaacguaauggcccgcuaucucccagccacuguggaauuugccguccacacauuuaaucagcagaguaaggacuacuaugcauaucgccucggacacauucugaauagcuggaaagagcaaguagagucgaagacuguguucaguauggagcugcugcucggaagaacuagaugcggcaaauucgaagacgacauugauaacugccauuuucaggaaucuaccgagcugaauaauacuuuuacauguuuuuucacaauuucaacacggcccuggaugacacaauuuucucucuugaauaagaccugccuggagggcuuucauuag

SEQ ID NO: 232212 - RNA, 444 nt, Artificial Sequence
  derived and/or modified sequence
augugguccuuacccccaucccgagcucugagcugugccccgcuccugcuacucuuuagcuuucaguuucugguaaccuacgccuggcgguuucaagaagaagaagaauggaaugaucagaaacagauugccguguaucugccaccuacgcucgaauucgccguguacaccuuuaacaagcaaucaaaggacugguaugcauacaaauuaguccccgucuuagcguccuggaaggaacagggguacgauaaaaugacauucucuaugaaccuacaacugggaagaaccauguguggcaaguucgaggacgacauugauaauugcccguuccaagaaucuccugaacuuaacaauacuuguaccuguuucuuuaccaucggcaucgaaccguggcgcacaagauucgaccuguggaacaagacauguucuggcggacacucauag

SEQ ID NO: 232213 - protein, 232 aa, Artificial Sequence
  derived and/or modified sequence
MTEGVLPGLYLGNFIDAKDLDQLGRNKITHIISIHESPQPLLQDITYLRIPVADTPEVPIKKHFKECINFIHCCRLNGGNCLVHCFAGISRSTTIVTAYVMTVTGLGWRDVLEAIKATRPIANPNPGFRQQLEEFGWASSQKLRRQLEERFGESPFRDEEELRALLPLCKRCRQGSATSASSAGPHSAASEGTVQRLVPRTPREAHRPLPLLARVKQTFSCLPRCLSRKGGK

SEQ ID NO: 232214 - protein, 132 aa, Artificial Sequence
  derived and/or modified sequence
MTVTGLGWRDVLEAIKATRPIANPNPGFRQQLEEFGWASSQKLRRQLEERFGESPFRDEEELRALLPLCKRCRQGSATSASSAGPHSAASEGTVQRLVPRTPREAHRPLPLLARVKQTFSCLPRCLSRKGGK

SEQ ID NO: 232215 - protein, 295 aa, Artificial Sequence
  derived and/or modified sequence
MTEGVLPGLYLGNFIDAKDLDQLGRNKITHIISIHESPQPLLQDITYLRIPVADTPEVPIKKHFKECINFIHCCRLNGGNCLVHCFAGISRSTTIVTAYVMTVTGLGWRDVLEAIKATRPIANPNPGFRQQLEEFGWASSQKGARHRTSKTSGAQCPPMTSATCLLAARVALLSAALVREATGRTAQRCRLSPRAAAERLLGPPPHVAAGWSPDPKYQICLCFGEEDPGPTQHPKEQLIMADVQVQLRPGSSSCTLSASTERPDGSSTPGNPDGITHLQCSCLHPKRAASSSCTR

SEQ ID NO: 232216 - protein, 235 aa, Artificial Sequence
  derived and/or modified sequence
MGNGMTKVLPGLYLGNFIDAKDLDQLGRNKITHIISIHESPQPLLQDITYLRIPVADTPEVPIKKHFKECINFIHCCRLNGGNCLVHCFAGISRSTTIVTAYVMTVTGLGWRDVLEAIKATRPIANPNPGFRQQLEEFGWASSQKLRRQLEERFGESPFRDEEELRALLPLCKRCRQGSATSASSAGPHSAASEGTVQRLVPRTPREAHRPLPLLARVKQTFSCLPRCLSRKGGK

SEQ ID NO: 232217 - DNA, 888 bp, Artificial Sequence
  derived and/or modified sequence
atgaccgagggcgtgctgcccggcctgtacctgggcaacttcatcgacgccaaggacctggaccagctgggcagaaacaagatcacccacatcatcagcatccacgagagcccccagcccctgctgcaggacatcacctacctgagaatccccgtggccgacacccccgaggtgcccatcaagaagcacttcaaggagtgcatcaacttcatccactgctgcagactgaacggcggcaactgcctggtgcactgcttcgccggcatcagcagaagcaccaccatcgtgaccgcctacgtgatgaccgtgaccggcctgggctggagagacgtgctggaggccatcaaggccaccagacccatcgccaaccccaaccccggcttcagacagcagctggaggagttcggctgggccagcagccagaagggcgccagacacagaaccagcaagaccagcggcgcccagtgcccccccatgaccagcgccacctgcctgctggccgccagagtggccctgctgagcgccgccctggtgagagaggccaccggcagaaccgcccagagatgcagactgagccccagagccgccgccgagagactgctgggcccccccccccacgtggccgccggctggagccccgaccccaagtaccagatctgcctgtgcttcggcgaggaggaccccggccccacccagcaccccaaggagcagctgatcatggccgacgtgcaggtgcagctgagacccggcagcagcagctgcaccctgagcgccagcaccgagagacccgacggcagcagcacccccggcaaccccgacggcatcacccacctgcagtgcagctgcctgcaccccaagagagccgccagcagcagctgcaccagatag

SEQ ID NO: 232218 - DNA, 708 bp, Artificial Sequence
  derived and/or modified sequence
atgggcaacggcatgaccaaggtgctgcccggcctgtacctgggcaacttcatcgacgccaaggacctggaccagctgggcagaaacaagatcacccacatcatcagcatccacgagagcccccagcccctgctgcaggacatcacctacctgagaatccccgtggccgacacccccgaggtgcccatcaagaagcacttcaaggagtgcatcaacttcatccactgctgcagactgaacggcggcaactgcctggtgcactgcttcgccggcatcagcagaagcaccaccatcgtgaccgcctacgtgatgaccgtgaccggcctgggctggagagacgtgctggaggccatcaaggccaccagacccatcgccaaccccaaccccggcttcagacagcagctggaggagttcggctgggccagcagccagaagctgagaagacagctggaggagagattcggcgagagccccttcagagacgaggaggagctgagagccctgctgcccctgtgcaagagatgcagacagggcagcgccaccagcgccagcagcgccggcccccacagcgccgccagcgagggcaccgtgcagagactggtgcccagaacccccagagaggcccacagacccctgcccctgctggccagagtgaagcagaccttcagctgcctgcccagatgcctgagcagaaagggcggcaagtag

SEQ ID NO: 232219 - DNA, 699 bp, Artificial Sequence
  derived and/or modified sequence
atgaccgagggcgtgctgcccggcctgtacctgggcaacttcatcgacgccaaggacctggaccagctgggcagaaacaagatcacccacatcatcagcatccacgagagcccccagcccctgctgcaggacatcacctacctgagaatccccgtggccgacacccccgaggtgcccatcaagaagcacttcaaggagtgcatcaacttcatccactgctgcagactgaacggcggcaactgcctggtgcactgcttcgccggcatcagcagaagcaccaccatcgtgaccgcctacgtgatgaccgtgaccggcctgggctggagagacgtgctggaggccatcaaggccaccagacccatcgccaaccccaaccccggcttcagacagcagctggaggagttcggctgggccagcagccagaagctgagaagacagctggaggagagattcggcgagagccccttcagagacgaggaggagctgagagccctgctgcccctgtgcaagagatgcagacagggcagcgccaccagcgccagcagcgccggcccccacagcgccgccagcgagggcaccgtgcagagactggtgcccagaacccccagagaggcccacagacccctgcccctgctggccagagtgaagcagaccttcagctgcctgcccagatgcctgagcagaaagggcggcaagtag

SEQ ID NO: 232220 - DNA, 1732 bp, Artificial Sequence
  derived and/or modified sequence
gttgtcccgcgggccgtgggcccggcacactggggctttgtccggccccccgccgcgacccgaggcgggggccccacatgaccgaaggggtacttcctggactctacctcggaaacttcattgatgccaaagacctggatcagctgggccgaaataagatcacacacatcatctctatccatgagtcaccccagcctctgctgcaggatatcacctaccttcgcatcccggtcgctgatacccctgaggtacccatcaaaaagcacttcaaagaatgtatcaacttcatccactgctgccgccttaatggggggaactgccttgtgcactgctttgcaggcatctctcgcagcaccacgattgtgacagcgtatgtgatgactgtgacggggctaggctggcgggacgtgcttgaagccatcaaggccaccaggcccatcgccaaccccaacccaggctttaggcagcagcttgaagagtttggctgggccagttcccagaagggtgccagacataggacctcaaaaacctctggtgcccaatgccctccgatgacttcagcaacctgcctgctggctgcacgtgtggctcttctctccgcagcgctggtgcgcgaagccaccgggcgcacagcccagcgctgtcgtctgagtccgcgggcggccgccgagcgcctgctggggccgccacctcacgttgcagcaggatggtcaccggacccaaagtaccagatctgtctgtgcttcggtgaggaggacccgggccccacacagcaccccaaggagcagctcatcatggcggacgtgcaggtgcagcttcggcctgggagctcgtcctgcactctaagtgcctcaaccgagcgcccagatgggtcctcaacccctggcaaccccgatggcatcactcaccttcaatgcagctgcctccatcctaagcgagccgcttcctcttcttgtacccgctgaaggcagcccccaacaggggggctccctactcccacccaaccctgcccacactaagcccatagacttggggcctcccccggcacatcacccaggtctgccggacggcagaggtggatcgcggccttccactcctctgtcacggggccccggaactcgagagtaggccacaccgccccccagctgggcatggggcttcggcaggaaactgaacttgatcttgaggccccagaaaggcagcaactggagcagaagcaagacttcatctcttgctgacagcccaatttgtcaatagcgctttcctcagagccagccttaacctgctgttgagtccattaaaacgtttgcttaaagtttttaccaataattagatcatcagggttgtttagtgtgggatcaagccataacaaaactgcctagcctctcaggggcctagaatttacagaaccttcctcctccctgcagctagtctctcttctttattctgggggctgggaaggatcccaaaacagggaacttggccgaaccctgggctttggatgctaaccactgaagtaccagcacctgtaggatgctgtctttgaagaaactgaggcggacctccaaatgcagccctaaggcagaggtcaacgtggaagaccagcccttctccaagccccactggtctttgcaagctgtacgttgtaggcaatctgagaactggaaagggggactacaaccagaaagttggttaccctgccatgggaataaagtagctgttttccacccca

SEQ ID NO: 232221 - DNA, 1454 bp, Artificial Sequence
  derived and/or modified sequence
cgcgcctgccggtgccagggtggggtaaggcccccgcccccacctccggaggtggcggccccacgcggccccaacaaactgccgttgtcccgcgggccgtgggcccggcacactggggctttgtccggccccccgccgcgacccgaggcgggggccccacatgaccgaaggggtaggaggagcctgcggcggcggcggtggcagcggcggctccaccaccatttccctcccgggccgggggtcggcgggcggtggcggtggctgggcagggctgggcagggccgcggacgccaggccccccgttccccgccaggctgcaggcgtcgggcctgggccgtcagggcagctgtgaccggatcgcttcccgggcggcgagctgggggtgcacccggaccgccgcccccgggatcatgggcaatggcatgaccaaggtacttcctggactctacctcggaaacttcattgatgccaaagacctggatcagctgggccgaaataagatcacacacatcatctctatccatgagtcaccccagcctctgctgcaggatatcacctaccttcgcatcccggtcgctgatacccctgaggtacccatcaaaaagcacttcaaagaatgtatcaacttcatccactgctgccgccttaatggggggaactgccttgtgcactgctttgcaggcatctctcgcagcaccacgattgtgacagcgtatgtgatgactgtgacggggctaggctggcgggacgtgcttgaagccatcaaggccaccaggcccatcgccaaccccaacccaggctttaggcagcagcttgaagagtttggctgggccagttcccagaagcttcgccggcagctggaggagcgcttcggcgagagccccttccgcgacgaggaggagttgcgcgcgctgctgccgctgtgcaagcgctgccggcagggctccgcgacctcggcctcctccgccgggccgcactcagcagcctccgagggaaccgtgcagcgcctggtgccgcgcacgccccgggaagcccaccggccgctgccgctgctggcgcgcgtcaagcagactttctcttgcctcccccggtgtctgtcccgcaagggcggcaagtgaggatgcagtccagccgtggctccccacttccgactggctcccttcgggggctgtctgcgccttccacgccccccaggacgggcccagaggctgggggagccccgcggcggcctgaaccctgcctcccgcgcccgccctgctcgtccgcgtctgcagtcagcgtccccaacctgtgcgtctctgtgtccgggccggcctgctgcagccacctggtgccttagtccttgggctgggggagggggcccacccttaaaggcggcgggaggggagggagggagagtggagggtttgacgggcctggagggtattaaagagacacagaagaagctgcctgtc

SEQ ID NO: 232222 - DNA, 1349 bp, Artificial Sequence
  derived and/or modified sequence
caacaaactgccgttgtcccgcgggccgtgggcccggcacactggggctttgtccggccccccgccgcgacccgaggcgggggccccacatgaccgaaggggtaggaggagcctgcggcggcggcggtggcagcggcggctccaccaccatttccctcccgggccgggggtcggcgggcggtggcggtggctgggcagggctgggcagggccgcggacgccaggccccccgttccccgccaggctgcaggcgtcgggcctgggccgtcagggcagctgtgaccggatcgcttcccgggcggcgagctgggggtgcacccggaccgccgcccccgggatcatgggcaatggcatgaccaagatgccaaagacctggatcagctgggccgaaataagatcacacacatcatctctatccatgagtcaccccagcctctgctgcaggatatcacctaccttcgcatcccggtcgctgatacccctgaggtacccatcaaaaagcacttcaaagaatgtatcaacttcatccactgctgccgccttaatggggggaactgccttgtgcactgctttgcaggcatctctcgcagcaccacgattgtgacagcgtatgtgatgactgtgacggggctaggctggcgggacgtgcttgaagccatcaaggccaccaggcccatcgccaaccccaacccaggctttaggcagcagcttgaagagtttggctgggccagttcccagaagcttcgccggcagctggaggagcgcttcggcgagagccccttccgcgacgaggaggagttgcgcgcgctgctgccgctgtgcaagcgctgccggcagggctccgcgacctcggcctcctccgccgggccgcactcagcagcctccgagggaaccgtgcagcgcctggtgccgcgcacgccccgggaagcccaccggccgctgccgctgctggcgcgcgtcaagcagactttctcttgcctcccccggtgtctgtcccgcaagggcggcaagtgaggatgcagtccagccgtggctccccacttccgactggctcccttcgggggctgtctgcgccttccacgccccccaggacgggcccagaggctgggggagccccgcggcggcctgaaccctgcctcccgcgcccgccctgctcgtccgcgtctgcagtcagcgtccccaacctgtgcgtctctgtgtccgggccggcctgctgcagccacctggtgccttagtccttgggctgggggagggggcccacccttaaaggcggcgggaggggagggagggagagtggagggtttgacgggcctggagggtattaaagagacacagaagaagctgcctgtc

SEQ ID NO: 232223 - DNA, 1077 bp, Artificial Sequence
  derived and/or modified sequence
ctttgtccggccccccgccgcgacccgaggcgggggccccacatgaccgaaggggtacttcctggactctacctcggaaacttcattgatgccaaagacctggatcagctgggccgaaataagatcacacacatcatctctatccatgagtcaccccagcctctgctgcaggatatcacctaccttcgcatcccggtcgctgatacccctgaggtacccatcaaaaagcacttcaaagaatgtatcaacttcatccactgctgccgccttaatggggggaactgccttgtgcactgctttgcaggcatctctcgcagcaccacgattgtgacagcgtatgtgatgactgtgacggggctaggctggcgggacgtgcttgaagccatcaaggccaccaggcccatcgccaaccccaacccaggctttaggcagcagcttgaagagtttggctgggccagttcccagaagcttcgccggcagctggaggagcgcttcggcgagagccccttccgcgacgaggaggagttgcgcgcgctgctgccgctgtgcaagcgctgccggcagggctccgcgacctcggcctcctccgccgggccgcactcagcagcctccgagggaaccgtgcagcgcctggtgccgcgcacgccccgggaagcccaccggccgctgccgctgctggcgcgcgtcaagcagactttctcttgcctcccccggtgtctgtcccgcaagggcggcaagtgaggatgcagtccagccgtggctccccacttccgactggctcccttcgggggctgtctgcgccttccacgccccccaggacgggcccagaggctgggggagccccgcggcggcctgaaccctgcctcccgcgcccgccctgctcgtccgcgtctgcagtcagcgtccccaacctgtgcgtctctgtgtccgggccggcctgctgcagccacctggtgccttagtccttgggctgggggagggggcccacccttaaaggcggcgggaggggagggagggagagtggagggtttgacgggcctggagggtattaaagagacacagaagaagctgcctgtc

SEQ ID NO: 232224 - DNA, 1212 bp, Artificial Sequence
  derived and/or modified sequence
cctcggctctctccggggctgtttctccatcctgtcccgcctctgcctgtcattgcctttctgcctccccagccccagaatttccatccctgcaccctgcaagtctacctctctcctctcctctcctcctaagacctgccttcctcctctcccctctcatacccaagctggcctcccttggttccctcggtacttcctggactctacctcggaaacttcattgatgccaaagacctggatcagctgggccgaaataagatcacacacatcatctctatccatgagtcaccccagcctctgctgcaggatatcacctaccttcgcatcccggtcgctgatacccctgaggtacccatcaaaaagcacttcaaagaatgtatcaacttcatccactgctgccgccttaatggggggaactgccttgtgcactgctttgcaggcatctctcgcagcaccacgattgtgacagcgtatgtgatgactgtgacggggctaggctggcgggacgtgcttgaagccatcaaggccaccaggcccatcgccaaccccaacccaggctttaggcagcagcttgaagagtttggctgggccagttcccagaagcttcgccggcagctggaggagcgcttcggcgagagccccttccgcgacgaggaggagttgcgcgcgctgctgccgctgtgcaagcgctgccggcagggctccgcgacctcggcctcctccgccgggccgcactcagcagcctccgagggaaccgtgcagcgcctggtgccgcgcacgccccgggaagcccaccggccgctgccgctgctggcgcgcgtcaagcagactttctcttgcctcccccggtgtctgtcccgcaagggcggcaagtgaggatgcagtccagccgtggctccccacttccgactggctcccttcgggggctgtctgcgccttccacgccccccaggacgggcccagaggctgggggagccccgcggcggcctgaaccctgcctcccgcgcccgccctgctcgtccgcgtctgcagtcagcgtccccaacctgtgcgtctctgtgtccgggccggcctgctgcagccacctggtgccttagtccttgggctgggggagggggcccacccttaaaggcggcgggaggggagggagggagagtggagggtttgacgggcctggagggtattaaagagacacagaagaagctgcctgtc

SEQ ID NO: 232225 - DNA, 1256 bp, Artificial Sequence
  derived and/or modified sequence
gccccggccgccgcggcccggcgctgaccagctcggtccgcccgcctctgaccttctgttctcgccggtctccgtgcggcggcatctccgtgtccctgtgactcgagaccgcggctgtcgggtctccccctctctgaccctgcgtctctgtccccgctgtgtccgccctctctccgtgactctgtgtgtctctcgctgtcttgctgtggctgtcactcccaggctgtctcccagtacttcctggactctacctcggaaacttcattgatgccaaagacctggatcagctgggccgaaataagatcacacacatcatctctatccatgagtcaccccagcctctgctgcaggatatcacctaccttcgcatcccggtcgctgatacccctgaggtacccatcaaaaagcacttcaaagaatgtatcaacttcatccactgctgccgccttaatggggggaactgccttgtgcactgctttgcaggcatctctcgcagcaccacgattgtgacagcgtatgtgatgactgtgacggggctaggctggcgggacgtgcttgaagccatcaaggccaccaggcccatcgccaaccccaacccaggctttaggcagcagcttgaagagtttggctgggccagttcccagaagcttcgccggcagctggaggagcgcttcggcgagagccccttccgcgacgaggaggagttgcgcgcgctgctgccgctgtgcaagcgctgccggcagggctccgcgacctcggcctcctccgccgggccgcactcagcagcctccgagggaaccgtgcagcgcctggtgccgcgcacgccccgggaagcccaccggccgctgccgctgctggcgcgcgtcaagcagactttctcttgcctcccccggtgtctgtcccgcaagggcggcaagtgaggatgcagtccagccgtggctccccacttccgactggctcccttcgggggctgtctgcgccttccacgccccccaggacgggcccagaggctgggggagccccgcggcggcctgaaccctgcctcccgcgcccgccctgctcgtccgcgtctgcagtcagcgtccccaacctgtgcgtctctgtgtccgggccggcctgctgcagccacctggtgccttagtccttgggctgggggagggggcccacccttaaaggcggcgggaggggagggagggagagtggagggtttgacgggcctggagggtattaaagagacacagaagaagctgcctgtc

SEQ ID NO: 232226 - DNA, 1651 bp, Artificial Sequence
  derived and/or modified sequence
ctgttctcgccggtctccgtgcggcggcatctccgtgtccctgtgactcgagaccgcggctgtcgggtctccccctctctgaccctgcgtctctgtccccgctgtgtccgccctctctccgtgactctgtgtgtctctcgctgtcttgctgtggctgtcactcccaggctgtctcccagtgagtcctgctctccgtctgcatgtgtccctctcccttgtcgctgactcctcggctctctccggggctgtttctccatcctgtcccgcctctgcctgtcattgcctttctgcctccccagccccagaatttccatccctgcaccctgcaagtctacctctctcctctcctctcctcctaagacctgccttcctcctctcccctctcatacccaagctggcctcccttggttccctcggttggttaactggccccctagcctaccctccccagagccccagacccctctcacagaggactcagggcccacaaaagggaagagagtgctccctgagccctgaggtccatacccttcatgggacagagaggggctgtgggccccccagctgccctgggggtggaagggggtgcagcccctgccccactgacccttgcctgtccttcctctaggtacttcctggactctacctcggaaacttcattgatgccaaagacctggatcagctgggccgaaataagatcacacacatcatctctatccatgagtcaccccagcctctgctgcaggatatcacctaccttcgcatcccggtcgctgatacccctgaggtacccatcaaaaagcacttcaaagaatgtatcaacttcatccactgctgccgccttaatggggggaactgccttgtgcactgctttgcaggcatctctcgcagcaccacgattgtgacagcgtatgtgatgactgtgacggggctaggctggcgggacgtgcttgaagccatcaaggccaccaggcccatcgccaaccccaacccaggctttaggcagcagcttgaagagtttggctgggccagttcccagaagcttcgccggcagctggaggagcgcttcggcgagagccccttccgcgacgaggaggagttgcgcgcgctgctgccgctgtgcaagcgctgccggcagggctccgcgacctcggcctcctccgccgggccgcactcagcagcctccgagggaaccgtgcagcgcctggtgccgcgcacgccccgggaagcccaccggccgctgccgctgctggcgcgcgtcaagcagactttctcttgcctcccccggtgtctgtcccgcaagggcggcaagtgaggatgcagtccagccgtggctccccacttccgactggctcccttcgggggctgtctgcgccttccacgccccccaggacgggcccagaggctgggggagccccgcggcggcctgaaccctgcctcccgcgcccgccctgctcgtccgcgtctgcagtcagcgtccccaacctgtgcgtctctgtgtccgggccggcctgctgcagccacctggtgccttagtccttgggctgggggagggggcccacccttaaaggcggcgggaggggagggagggagagtggagggtttgacgggcctggagggtattaaagagacacagaagaagctgcctgtc

SEQ ID NO: 232227 - DNA, 888 bp, Artificial Sequence
  derived and/or modified sequence
atgactgagggggtgctacccgggctgtatctcggaaattttatagacgccaaggatctcgaccagctgggccggaacaaaattacacacatcatcagcattcacgagagcccacagcctttactgcaggatatcacttatctgagaattcctgtcgccgataccccggaggtaccaattaaaaaacactttaaagagtgcatcaattttattcattgttgccgactgaatggaggaaactgcctcgtgcactgcttcgctggcatctcgagatctactacaatcgttacagcttacgttatgaccgtgacgggactggggtggcgggatgtgctcgaggccatcaaagcaacccgcccaatcgccaatcccaaccccggctttagacagcaattggaagagttcggctgggcttcgtctcagaagggagcgcgccatcgaaccagtaaaacctccggggctcagtgtcccccaatgacaagcgcaacctgcctgctcgcagcaagggtcgcgctgttatctgccgctctggtgagagaggcaacaggcagaacagcccaacgctgtagactctcgcctcgcgccgcagcagagagacttctgggaccacccccccatgttgctgccggctggagcccagatcccaagtatcagatctgtctgtgcttcggggaagaagatcctggccctacccagcatccgaaggaacagctgatcatggctgacgtccaggtccaacttcgtcccggttctagctcctgcacgctgagcgcttccacggagcggcctgatggatcatcaacgccaggtaaccccgacggcataacccatcttcaatgcagctgcttgcatccgaagcgggccgcatctagttcctgcacgcggtag

SEQ ID NO: 232228 - DNA, 708 bp, Artificial Sequence
  derived and/or modified sequence
atggggaatgggatgaccaaagttctgcccggtctctatctgggtaacttcattgacgctaaggatttagatcagctcggccggaataaaatcactcacatcatttcaatacatgaatctcctcaacccttactgcaagatattacctatctcagaatccccgtggctgacacaccggaagtgccaatcaagaagcacttcaaagagtgtataaactttattcattgttgtcgccttaatggcggaaactgcttggtgcactgcttcgctggaatcagcagaagtaccaccatcgtgactgcttatgttatgacagtaacaggcttgggctggcgggatgtgctcgaggcgataaaagctaccagacccatcgccaaccctaacccgggttttagacaacagctggaggagtttgggtgggctagcagtcagaagctcagacgtcagctcgaagaaaggttcggtgaaagtcccttccgggatgaggaagagcttagggcccttttaccactctgcaaacggtgtcgccagggaagcgcgacgtcggcttcaagcgctggaccgcactctgccgcctcagaaggtactgttcaaaggctggtccctagaacccctcgcgaagcccataggcccctgccactgctggctcgagtcaaacaaactttctcctgtctccccaggtgcctgtcaagaaagggcggcaagtag

SEQ ID NO: 232229 - DNA, 264 bp, Artificial Sequence
  derived and/or modified sequence
atgggaaatggtatgactaagatgcccaagacctggatcagctgggcagagatacggagccacactagcagtctaagtatgagtcaccccagtttatgctgcagaatttctccgaccttcgcgagcaggagccttatccctctccggtacccatccaagtccacctctaagaatgtgtctactagtagcactgcagcagccctcatgggagggaccgctttgtgcacagccctgcaggcctcgctagccgcaccacggctgtag

SEQ ID NO: 232230 - DNA, 699 bp, Artificial Sequence
  derived and/or modified sequence
atgacggagggagtgcttcccggcttgtatctcggcaattttattgacgctaaagatctggaccagctgggacgtaataagatcactcatattatttccatccacgaaagtccccaaccactgctgcaagacattacctacctccggatcccagttgcggatacccccgaagtaccgatcaagaaacatttcaaagaatgtatcaactttatccactgctgtcgtctcaatggtggaaactgcctcgttcattgcttcgcaggcattagccgaagcacaacaattgtgaccgcttacgttatgacagtgaccgggctggggtggagggacgttttggaggccatcaaggctacacgcccaatcgcaaatcccaaccccggttttaggcagcaactggaggaattcggatgggcaagtagccagaagctgcggcggcagctcgaggaacgcttcggagaaagccccttcagagatgaggaggaactccgtgccctgcttcccctgtgcaagcgttgtagacagggcagtgcaacgtctgcttctagcgccggcccccactctgctgcctcagaaggcaccgttcagcgcctggttccccgaaccccgcgggaagcacaccggcccctgcctttgctggcacgggtgaaacagacttttagttgcctgcctcggtgtctatccagaaaagggggcaaatag

SEQ ID NO: 232231 - DNA, 888 bp, Artificial Sequence
  derived and/or modified sequence
atgacagagggcgtgctgcccggcctgtacctgggcaacttcattgatgccaaggacctggaccagctgggcaggaacaagatcacccacatcatcagcatccacgagagcccccagcccctgctgcaggacatcacctacctgcgcatccctgtggccgacaccccagaggtgcccatcaagaagcacttcaaggagtgcatcaacttcatccactgctgccgcctgaatggaggcaactgcctggtgcactgctttgctggcatcagccgcagcaccaccatcgtgacagcctacgtgatgacagtgacaggcctgggctggagagatgtgctggaggccatcaaggccacccggcccatcgccaaccccaaccctggcttccggcagcagctggaggagtttggctgggccagcagccagaagggggcccggcacaggaccagcaagaccagcggggcccagtgcccccccatgaccagcgccacctgcctgctggccgcccgggtggccctgctgtctgctgccctggtgcgggaggccaccggccgcacagcccagcgctgccgcctgagccccagggctgctgctgagcggctgctgggccccccaccccacgtggccgccggctggagcccagaccccaagtaccagatctgcctgtgctttggagaggaggaccccggccccacccagcaccccaaggagcagctgatcatggctgatgtgcaggtgcagctgcggcccggcagcagcagctgcaccctgagcgccagcacagagaggccagatggcagcagcaccccaggcaacccagatggcatcacccacctgcagtgcagctgcctgcaccccaagagagctgccagcagcagctgcaccaggtag

SEQ ID NO: 232232 - DNA, 708 bp, Artificial Sequence
  derived and/or modified sequence
atgggaaatggcatgaccaaggtgctgcccggcctgtacctgggcaacttcattgatgccaaggacctggaccagctgggcaggaacaagatcacccacatcatcagcatccacgagagcccccagcccctgctgcaggacatcacctacctgcgcatccctgtggccgacaccccagaggtgcccatcaagaagcacttcaaggagtgcatcaacttcatccactgctgccgcctgaatggaggcaactgcctggtgcactgctttgctggcatcagccgcagcaccaccatcgtgacagcctacgtgatgacagtgacaggcctgggctggagagatgtgctggaggccatcaaggccacccggcccatcgccaaccccaaccctggcttccggcagcagctggaggagtttggctgggccagcagccagaagctgcggcggcagctggaggagagatttggagagagccccttcagagatgaggaggagctgcgggccctgctgcccctgtgcaagcgctgccggcagggcagcgccaccagcgccagcagcgctggcccccacagcgctgccagcgagggcaccgtgcagaggctggtgcccaggaccccccgggaggcccaccggcccctgcccctgctggcccgggtgaagcagaccttcagctgcctgccccgctgcctgagcaggaagggcggcaagtag

SEQ ID NO: 232233 - DNA, 699 bp, Artificial Sequence
  derived and/or modified sequence
atgacagagggcgtgctgcccggcctgtacctgggcaacttcattgatgccaaggacctggaccagctgggcaggaacaagatcacccacatcatcagcatccacgagagcccccagcccctgctgcaggacatcacctacctgcgcatccctgtggccgacaccccagaggtgcccatcaagaagcacttcaaggagtgcatcaacttcatccactgctgccgcctgaatggaggcaactgcctggtgcactgctttgctggcatcagccgcagcaccaccatcgtgacagcctacgtgatgacagtgacaggcctgggctggagagatgtgctggaggccatcaaggccacccggcccatcgccaaccccaaccctggcttccggcagcagctggaggagtttggctgggccagcagccagaagctgcggcggcagctggaggagagatttggagagagccccttcagagatgaggaggagctgcgggccctgctgcccctgtgcaagcgctgccggcagggcagcgccaccagcgccagcagcgctggcccccacagcgctgccagcgagggcaccgtgcagaggctggtgcccaggaccccccgggaggcccaccggcccctgcccctgctggcccgggtgaagcagaccttcagctgcctgccccgctgcctgagcaggaaaggaggcaagtag

SEQ ID NO: 232234 - DNA, 888 bp, Artificial Sequence
  derived and/or modified sequence
atgaccgagggcgtgctgcccggcctgtacctgggcaacttcatcgatgctaaagaccttgaccagttggggcgcaataagataacccatattatttccatccacgagtccccacagcctctgctgcaggacatcacctatctacggatcccagtggctgatacccccgaggttcccatcaaaaagcatttcaaggagtgcattaatttcatccattgctgcagactaaatggaggtaactgtctagtccattgctttgctgggataagtcgcagtacaacgatcgttaccgcttacgtcatgaccgtcaccggcctggggtggcgcgacgtgttggaggctatcaaggcaacccggccaattgcaaaccccaatccagggttcagacagcagctcgaagaatttggctgggcttcctctcagaagggcgcaaggcatcggacctcaaagacatccggggcccagtgcccaccaatgacctcagccacatgcctcctagctgccagggtggccctgctgtctgccgccttggtccgagaagctacaggacgtacagcacagagatgccgtttaagccctcgcgctgcagcagagagactgctcggtccaccaccacacgtggcagccggttggtctcctgacccaaaataccagatatgcctttgctttggggaggaggacccaggacccacacagcaccccaaggaacagctcataatggctgatgttcaggttcagctgcgacccgggtccagctcgtgcaccctcagtgctagcaccgaaaggcccgacggctcttccactcctggaaaccctgacggcattacacacctgcaatgtagctgcttacaccctaagcgcgccgcgagcagctcctgtacacggtag

SEQ ID NO: 232235 - DNA, 708 bp, Artificial Sequence
  derived and/or modified sequence
atgggcaacggcatgaccaaggtgctgcccggcctgtacctgggcaattttatagatgctaaggatttggatcagctaggcaggaacaagattactcacatcataagtatccacgaatcacctcaacctctcctccaagatatcacgtatctgaggatcccggtagccgacacaccggaggtgccaataaagaagcacttcaaggaatgcataaacttcattcactgctgtaggctgaatggtgggaattgtctcgtccactgcttcgcgggcatctcccggagcaccacaatcgtgacggcttacgttatgaccgtcaccggattggggtggagagatgtgttggaagccatcaaagcaactcgcccaatcgccaaccctaatccgggttttcggcagcagttagaggagttcggatgggctagtagtcagaaattgcggcggcagttggaagaacgctttggtgagtctccctttagggacgaagaggaattacgggcactgcttcccctttgtaagaggtgcagacagggaagtgccacatccgcaagttctgcagggccccatagcgctgcttcggaaggaacggtgcagcgtctggtccccagaaccccccgcgaggcccaccgtcccctccccttgctggcacgggtaaaacaaacattcagttgtctgcccagatgtttatctagaaaaggtggcaagtag

SEQ ID NO: 232236 - DNA, 699 bp, Artificial Sequence
  derived and/or modified sequence
atgaccgagggcgtgctgcccggcctgtacctgggcaacttcatcgatgcaaaggatttggatcagctggggcgtaataagatcacccatattattagtattcacgaaagcccgcagcccctcctacaggatatcacataccttcgcatcccggtggctgacacaccggaagttcctattaagaagcacttcaaggaatgtatcaactttatccactgttgccggctgaatggcggaaactgcctcgtgcactgcttcgcagggatctctagaagcacgactatcgtgaccgcctatgtcatgaccgtcactggcctgggctggcgtgatgttttggaggctatcaaggcaacgagacctatcgccaaccccaatcccggcttccgtcaacagctggaggagttcggttgggcttctagccaaaaattacggaggcagcttgaggagagattcggtgagagcccatttcgagacgaagaagagctccgcgcattactgcccttatgcaaacgctgtagacaaggatctgcaacgtcggcctcctccgctggaccgcatagcgcggcttcggaagggacagtgcagcgcttggtgccgaggactccacgggaggctcacaggccacttccccttcttgcgagagtgaagcagaccttcagctgtctgccaagatgcctctcacgaaaggggggcaagtag

SEQ ID NO: 232237 - DNA, 888 bp, Artificial Sequence
  derived and/or modified sequence
atgactgaaggagtactgcctgggctgtacctgggcaattttatcgacgcgaaagatctcgaccagctgggaagaaacaaaatcacccatattataagcatccatgagagccctcagccactgctccaagacatcacctacctacgaattcccgtagcggacacacctgaggtgcccataaaaaagcattttaaagaatgtattaactttattcactgctgccgcctgaatggcggaaattgtctcgtgcactgttttgctggaattagcaggagcactactatcgtgactgcctacgtgatgacggtgacaggcttaggctggagggatgtgctggaggctatcaaggccactcggcctattgcaaaccctaaccccggttttaggcagcaactcgaagaattcggatgggctagtagtcaaaagggcgctagacaccggacttctaaaaccagtggtgcccaatgcccccctatgacttccgcgacatgtctgcttgctgcccgtgtggctctgctctccgccgcactggtgcgagaagctaccgggaggacagcacagcgctgtagactatccccgcgagcggctgccgagcgactccttggacctccacctcacgtggcagctggctggagcccagacccgaagtaccaaatctgcttatgcttcggcgaagaggatcctgggccaacccaacatcccaaggagcagttgatcatggctgacgttcaggtccagttgagacctggcagtagcagctgtacactgtccgcatcaaccgagcgcccagacggctcctcaacaccagggaatcccgacgggatcacccaccttcaatgctcttgcctgcacccaaagcgtgctgcttcaagctcctgcacaagatag

SEQ ID NO: 232238 - DNA, 708 bp, Artificial Sequence
  derived and/or modified sequence
atgggaaacggcatgacaaaagtcctccccggtttgtatctcggaaatttcatcgatgcgaaggacttggaccagctgggcagaaataagatcacacacatcatcagcatccacgagtcgccccagcccctgctacaggatatcacttacttacgaattcccgtggctgacacaccggaggtgcccattaagaagcacttcaaagaatgtatcaacttcatacactgttgccgccttaacggcggtaactgcctggtgcattgtttcgccggaatcagtcggtcaacgaccatcgttacggcctacgtgatgactgtaaccggacttgggtggcgtgatgttctggaagctatcaaggctactcgcccaattgccaatcccaatcctgggtttcgacagcagctagaggagttcgggtgggcctcttcacaaaaactaagaagacagctcgaagagcggtttggcgagagcccatttcgcgacgaggaggagctacgggctctgctccctctctgcaagcgctgcagacagggatccgctacgagcgcctcaagcgccggaccacattccgccgctagcgagggcactgtacagcggttagtgcccaggactcctagggaagcacatagaccactccctctcctggccagggtgaagcagacgtttagttgtctcccgcgttgcctctcacgtaaagggggtaagtag

SEQ ID NO: 232239 - DNA, 264 bp, Artificial Sequence
  derived and/or modified sequence
atggggaatggtatgactaagatgcccaaaacatggatttcatgggcagagattcgaagccacacgtcatccttgtctatgtcccatccaagcctttgctgtcggattagtccgacttttgccagtagatctttgattcccctgcgttatcctagcaagagtacgtctaagaacgtatcgacatcttccacagcagcagctctgatgggagggacagcattatgcacggccctgcaggcctcactggcagcccctaggttgtag

SEQ ID NO: 232240 - DNA, 699 bp, Artificial Sequence
  derived and/or modified sequence
atgactgagggggtgcttcctggtctctatctagggaattttatcgacgctaaggacctggatcagctgggtcggaacaaaatcacccatatcattagtattcacgagagtccgcagccgctgctacaggacatcacttacctccggatccccgtcgcagatactcccgaggttcctatcaaaaagcacttcaaggagtgcatcaacttcattcactgctgtagacttaatggtggtaactgtttagtgcactgttttgctggtatttcccgcagcaccaccatcgtcaccgcctatgtgatgacggtaactggcctcggctggcgtgatgtactcgaagcaatcaaggctactcggcctattgcaaacccaaatccaggctttcggcaacagctagaggaattcggatgggcttcatctcagaagctgaggagacaacttgaggagagattcggagaatctccattcagagacgaagaagaactccgcgcactgctcccactttgcaagcgatgtcgccagggaagtgctaccagcgcctccagcgcaggaccccactctgccgctagcgagggaacggtgcaacggttagtccctaggaccccacgcgaagcccatcgcccactgccgctgctcgcccgagtgaagcagactttcagctgtttgccgaggtgtctgtcccgcaaagggggtaaatag

SEQ ID NO: 232241 - protein, 586 aa, Artificial Sequence
  derived and/or modified sequence
MSAGDAVCTGWLVKSPPERKLQRYAWRKRWFVLRRGRMSGNPDVLEYYRNKHSSKPIRVIDLSECAVWKHVGPSFVRKEFQNNFVFIVKTTSRTFYLVAKTEQEMQVWVHSISQVCNLGHLEDGADSMESLSYTPSSLQPSSASSLLTAHAASSSLPRDDPNTNAVATEETRSESELLFLPDYLVLSNCETGRLHHTSLPTRCDSWSNSDRSLEQASFDDVFVDCLQPLPSSHLVHPSCHGSGAQEVPSSRPQAALIWSREINGPPRDHLSSSPLLESSLSSTIQVDKNQGSLPCGAKELDIMSNTPPPRPPKPSHLSERRQEEWSTHSGSKKPECTLVPRRISLSGLDNMRTWKADVEGQSLRHRDKRLSLNLPCRFSPMYPTASASIEDSYVPMSPQAGASGLGPHCSPDDYIPMNSGSISSPLPELPANLEPPPVNRDLKPQRKSRPPPLDLRNLSIIREHASLTRTRTVPCSRTSFLSPERNGINSARFFANPVSREDEESYIEMEEHRTASSLSSGALTWTKKFSLDYLALDFNSASPAPMQQKLLLSEEQRVDYVQVDEQKTQALQSTKQEWTDERQSKV

SEQ ID NO: 232242 - DNA, 1761 bp, Artificial Sequence
  derived and/or modified sequence
atgagcgccggcgacgccgtgtgcaccggctggctggtgaagagcccccccgagagaaagctgcagagatacgcctggagaaagagatggttcgtgctgagaagaggcagaatgagcggcaaccccgacgtgctggagtactacagaaacaagcacagcagcaagcccatcagagtgatcgacctgagcgagtgcgccgtgtggaagcacgtgggccccagcttcgtgagaaaggagttccagaacaacttcgtgttcatcgtgaagaccaccagcagaaccttctacctggtggccaagaccgagcaggagatgcaggtgtgggtgcacagcatcagccaggtgtgcaacctgggccacctggaggacggcgccgacagcatggagagcctgagctacacccccagcagcctgcagcccagcagcgccagcagcctgctgaccgcccacgccgccagcagcagcctgcccagagacgaccccaacaccaacgccgtggccaccgaggagaccagaagcgagagcgagctgctgttcctgcccgactacctggtgctgagcaactgcgagaccggcagactgcaccacaccagcctgcccaccagatgcgacagctggagcaacagcgacagaagcctggagcaggccagcttcgacgacgtgttcgtggactgcctgcagcccctgcccagcagccacctggtgcaccccagctgccacggcagcggcgcccaggaggtgcccagcagcagaccccaggccgccctgatctggagcagagagatcaacggcccccccagagaccacctgagcagcagccccctgctggagagcagcctgagcagcaccatccaggtggacaagaaccagggcagcctgccctgcggcgccaaggagctggacatcatgagcaacacccccccccccagaccccccaagcccagccacctgagcgagagaagacaggaggagtggagcacccacagcggcagcaagaagcccgagtgcaccctggtgcccagaagaatcagcctgagcggcctggacaacatgagaacctggaaggccgacgtggagggccagagcctgagacacagagacaagagactgagcctgaacctgccctgcagattcagccccatgtaccccaccgccagcgccagcatcgaggacagctacgtgcccatgagcccccaggccggcgccagcggcctgggcccccactgcagccccgacgactacatccccatgaacagcggcagcatcagcagccccctgcccgagctgcccgccaacctggagcccccccccgtgaacagagacctgaagccccagagaaagagcagacccccccccctggacctgagaaacctgagcatcatcagagagcacgccagcctgaccagaaccagaaccgtgccctgcagcagaaccagcttcctgagccccgagagaaacggcatcaacagcgccagattcttcgccaaccccgtgagcagagaggacgaggagagctacatcgagatggaggagcacagaaccgccagcagcctgagcagcggcgccctgacctggaccaagaagttcagcctggactacctggccctggacttcaacagcgccagccccgcccccatgcagcagaagctgctgctgagcgaggagcagagagtggactacgtgcaggtggacgagcagaagacccaggccctgcagagcaccaagcaggagtggaccgacgagagacagagcaaggtgtag

SEQ ID NO: 232243 - DNA, 1761 bp, Artificial Sequence
  derived and/or modified sequence
atgtccgcaggcgatgctgtgtgcacaggctggctggtaaagtctccacccgaaagaaaactgcagagatacgcctggcgaaagcggtggttcgtactgagaagagggcggatgtccggcaaccctgatgtccttgaatattatcggaataaacatagctcgaaaccaatcagggtgatcgatctgtccgaatgtgctgtctggaagcacgttggaccttcattcgttagaaaagagtttcagaacaactttgtcttcattgtgaagactacctcaaggacattttacctggtcgcaaaaaccgaacaggagatgcaggtttgggtgcactccatttcacaggtctgcaatttgggacaccttgaggatggagccgattccatggagtccctgagctacaccccttcttcactgcagcctagctcagcatcaagcctgctcaccgcacacgccgcaagcagcagtttgcccagggacgaccctaacaccaatgctgtcgcaaccgaggaaacacggagcgaatccgaactgctgttcctgccggactatctggtactgtcgaattgcgaaaccgggcgcctccatcatacatcccttcctactaggtgcgatagctggtcaaacagcgacagaagtctcgaacaggcttcattcgacgatgtgtttgtggactgcctgcagcccttgccctcgtcacacctggtccacccttcttgccacggatcgggcgcccaggaagtgcccagcagccgtccccaggccgcattaatctggtcacgggaaattaacggcccaccacgggatcatctgagttcttccccactgctcgaatcctcccttagtagtactatccaggtggacaaaaaccagggctccctgccgtgcggagccaaagagctcgatatcatgagcaacacccctccaccccggcctcctaagccctcacacctgagtgagcgtcgccaagaggaatggtccacccatagtggaagtaaaaaacccgaatgcacattagtgccccggagaatctctctgtccggtttggacaatatgcgcacgtggaaagcagacgtcgagggtcaatcccttcgacaccgtgataagaggctgtccctcaacctcccatgtcgcttctctcccatgtacccaacagcgtcggccagtatcgaggattcctacgtccccatgtcccctcaggccggcgctagcggcctcgggcctcattgttctcctgatgactatatcccaatgaacagcggtagcattagctccccacttcctgaactgcccgccaacctcgaaccccccccagtcaacagagacctgaaacctcagcgtaagtctagacctccacccttagatctcagaaaccttagtatcatcagagagcatgcaagcctaacaagaaccaggaccgtcccatgcagtaggacaagtttcctatctccggaacgaaacggcatcaatagcgcacgattttttgcgaaccctgtctcccgggaagatgaagagagctacattgagatggaggagcaccggaccgcttcctccctgtccagcggtgctttaacctggacgaaaaagtttagccttgactaccttgccttagatttcaactccgcatcacccgcgcccatgcagcagaaacttctcctctccgaggagcaacgggtcgactacgtgcaggtcgacgagcagaaaacacaggcccttcaatccacgaagcaggagtggacggatgagcggcagtccaaggtctag

SEQ ID NO: 232244 - DNA, 1761 bp, Artificial Sequence
  derived and/or modified sequence
atgtctgctggagatgctgtgtgcaccggctggctggtgaagagccccccagagaggaagctgcagagatatgcctggaggaagcgctggtttgtgctgcggcggggccgcatgagcggcaacccagatgtgctggagtactacagaaacaagcacagcagcaagcccatccgggtcatcgacctgtctgaatgtgctgtgtggaagcacgtgggccccagctttgtgaggaaggagttccagaacaactttgtgttcatcgtgaagaccaccagcaggaccttctacctggtggccaagacagagcaggagatgcaggtgtgggtgcacagcatcagccaggtgtgcaacctgggccacctggaggatggagctgacagcatggagagcctgagctacacccccagcagcctgcagcccagcagcgccagcagcctgctgacagcccatgctgccagcagcagcctgcccagagatgaccccaacaccaatgctgtggccacagaggagaccaggtctgagagcgagctgctcttcctgcctgactacctggtgctgagcaactgtgaaacaggccgcctgcaccacaccagcctgcccacccgctgtgacagctggagcaacagcgacaggagcctggagcaggccagctttgatgatgtgtttgtggactgcctgcagcccctgcccagcagccacctggtgcaccccagctgccacggcagcggggcccaggaggtgcccagcagccggccccaggccgccctgatctggagccgggagatcaatggaccaccccgggaccacctgagcagcagccccctgctggagagcagcctgagcagcaccatccaggtggacaagaaccagggcagcctgccctgtggggccaaggagctggacatcatgagcaacaccccaccacccaggcctcccaagcccagccacctgtctgagcggcggcaggaggagtggagcacccacagcggcagcaagaagccagaatgtaccctggtgccccggcgcatcagcctgagcggcctggacaacatgaggacctggaaggcagatgtggagggccagagcctgcggcaccgggacaagaggctgagcctgaacctgccctgccgcttcagccccatgtaccccacagccagcgccagcattgaggacagctatgtgcccatgagcccccaggccggggccagcggcctgggcccccactgcagcccagatgactacatccccatgaacagcggcagcatcagcagccccctgcctgagctgcctgccaacctggagcccccacctgtgaacagagacctgaagccccagaggaagagccggcccccacccctggacctgaggaacctgagcatcatccgggagcacgccagcctgaccaggaccaggacagtgccctgcagcaggaccagcttcctgagccctgagagaaatggcatcaacagcgcccgcttctttgccaaccctgtgtccagagaagatgaggagagctacatcgagatggaggagcacaggacagccagcagcctgagcagcggggccctgacctggaccaagaagttcagcctggactacctggccctggacttcaacagcgccagccctgcccccatgcagcagaagctgctgctgtctgaggagcagagggtggactatgtgcaggtggatgagcagaagacccaggccctgcagagcaccaagcaggagtggacagatgagcggcagagcaaggtgtag

SEQ ID NO: 232245 - DNA, 4718 bp, Artificial Sequence
  derived and/or modified sequence
cccagctggaggaagcggcggcggcggccacgatgagtgcgggcgacgcagtgtgcaccggctggctcgttaagtcgccccccgagaggaagctacagcgctacgcctggcgcaagcgctggtttgtcctccggcgaggccgcatgagcggcaaccccgatgtcttggagtactacaggaacaagcactccagcaagcccatccgggtgatagacctcagcgagtgtgcagtgtggaagcatgtgggccccagctttgttcggaaggaatttcagaataatttcgtgttcattgtcaagactacttcccgtacattctacctggtggccaaaactgagcaagaaatgcaggtgtgggtgcacagcatcagtcaggtctgcaaccttggccacctggaggatggtgcagattccatggagagcctctcttacacgccctcctccctgcagccatcctctgccagctcccttcttaccgcccatgctgccagctcctctttgccaagagatgacccaaacactaatgccgtagccactgaggaaaccagaagtgagtcagagcttctcttccttccagattatctggttttgtccaactgcgagactggaagactgcaccataccagtctacccaccagatgtgatagctggtcaaactcagaccgttcattggaacaggcttcatttgatgatgtttttgttgactgcctgcagccgctcccctccagtcatttggtccacccctcatgccatggcagtggagctcaggaggtgccatcctcgaggcctcaggctgccctgatctggagtagagaaatcaatgggccacccagggaccacttgtcttcttcaccattgctggaaagttccttaagttccaccattcaggtagataaaaatcaaggttccttaccctgtggagcaaaagaactagacattatgtccaacactccacctccccgcccccctaagccaagccatctgtctgaacggcgccaagaggagtggagtacacacagtggtagcaagaagccagaatgcactctggttccaagaagaatctccctctctggtttagacaacatgagaacctggaaagctgatgtagaaggccaatccttaagacaccgagacaagcggcttagtttgaatttgccatgcaggttctccccgatgtaccccacagcttcagccagtatcgaagacagctatgtgcccatgagcccccaggctggtgcctctggtcttggaccccactgcagccctgatgactacattccaatgaactcaggaagcatctcaagcccgttgcctgagctgcctgcaaacctggaacctcccccagtgaatagagatctcaagcctcagaggaaatcacggccacctcctctggacctgagaaacctctcgatcatccgggaacatgcatctcttaccaggacccgcactgtgccttgcagtcgaaccagctttctctctccagaaagaaatggtattaattctgcaagattttttgctaatcctgtttccagagaagacgaagaaagctacatcgaaatggaggagcaccgaacagccagttccctgagcagtggtgcccttacgtggacaaagaaattcagcctagattatttggccctggacttcaattcagcatcaccagcccccatgcagcagaaacttctcctttcagaagaacaaagagtagactatgtccaagtggatgagcagaagacacaggctctccagagcacaaaacaggagtggacggatgaaaggcaatccaaagtatgagaggtgcgggcttgtgccatgtgtgaaacagggaagcttggggctcagtttgagttttttcttttttttttttttttgtccactaaaaacacactgatggtcaacacaggtcaaaaccaagagagaatgtgtagttttcaaggtcttggccagaacctttaggaaagaagacctgtttatacattgaaggaagaaaagaaggaagcagttgccttccggagggggctctgagagaatctagcctcccctctgtcctattggagcaaagattggagtgagtgttgccaccaacaggattttatcgtttgactccaatacctgaaattctgacttctctcctgtgcttcaatgagaatgataaattatcctagcaaaggggcctctggagaccatcttgttccagcctctgaagacagttgaggagatcaagcccagcaatggtggcagaatcttactccacagacttcagcagactagtcatttcaatacccaaagaaagacaagtgacaggggcaatggatctcaggctctgagataagtatatcagatgacactggtggctctaaggatattgcaattaagcagctacctgtagccaggtattctgctgctcttggccttttcccacgcatcgtctcgtgtcttctccgaaagaccttggaagataggcctggaagagactgttgatgccactttgaagaaaagaacactgagaactagaggagggaacactttgcccaagattactcacaaagccaagacccagagtccagcttagagaatagagttgttcaggctgccaattgcaagctcattcctctacctcatacttcctctgaggattttgacaaaatggattaattgggtgagccttggagacatgtgggaaacacctgcagacacaaaatgagtagtcatcctgtctccctttcaatagggatctgaacaggtgttttgatacttgaaagatgtgcatgtcaagtgagggtttctttctgcgatgttcaactggaactctcccatcagtagttacaattagaaatacctactgatggttagtctgaaggccattctcatggtcacctatacagtgtgtttccctgtgagctagcagacacaatgaccaggaaaaaacctatgaattccattcttaggtttcccagccaattgctcccttctgctttagaagtgactaggtactgagagtacaaacactcccactttataatgaaggcgtcatgtcaccccttcctttacaggtcctggggtccaggagacccagaatgaaggtgtcagttgggcatgaagtgttatttagtgtccattcttgatccttctgagcacctacagctggaaactaagcagatactggtcctgcattctgactgagattgtgtcttctttatgaggatagatcaaattggcagtcaggcccatgatagtcagtgcagttggggcagttgtagactttgctacaggatttcagggtttccaatcaccccacaggtaagtgaatgccaaagtcttcttttttcagaccatacaagaagtcattttgattttcaaagaagccgttttgattttcaaagaagcaggttctggtgacattattttcttccttggacaaagtggggggaaatttctaagtattttaactgagttcagggtccttagtgagcctggacagagcaaggagagggctccccactccctaagccccacagccagctctgcatcaccacacacagccagagcctgtgaggagctgccttcttccccatgtgacttgcaaagagtctcaggcaagaaaccagggcttcaaactgctagttcccatggagggtagttccctcgtgtggagcacttgtgttaggatcactgattatctgacaaaggctggtgcagaaaaaaaattgtaggcccaagtgtcaagaaccacaccagattggagatagaaaagaatagctgaaattatgtcagtggtgaaatgtcactccattgacccaccgaaaaaagaaaagaaatctgtttctaccaaacatttccagaaacgtatttatagcatgaagaaacacacatgggtagtgtgacctgtttggatgtgattacttaaaaatggaatgctctgaataggcactctctacattaaaggtatggaaggcgataggggtcagaattttaaaaatttaattttgaaaaaggtgactcacccctcatttccagagtgtaggcaattatgtcctgctttgataaaactgctagaggatggctatgcaaaagcataacgattcaaggaaacaaagtacaggtagtttttgagctgacagcagcaaaggcaccataagtcaaaatattggttttggtggagatgatcgatgtgtgtgtgtgagagagagctatgtttctaaccaagggcctaatgtttgttacagaaatgatcccagagacctacaagatgtgggaatcagcataacagggcaatgcagcaattaaccccacatcgttttctgtagttcctttttgtttcattttcttctgtctcacctcgttagaaaattcctcccagtcaggggtcgtccagtgcaggacgggggacccaagggtctcaagcctgcaagtccagaaggtgacaaacccaggagcactgggagttaagctttccttggggagggaagagccttgatgtccagcacacagcctggctataaagacacgaagcgacctacccactgtacagtccacttcacaggatcagctgaatcatgacctttaaaagttccgagttgaaactgaaggctctcctcagacctggctttttcctcagtccctgttcataccatctctgcacccacaatcacactgatttttcaaattcattttgtttttgctgtttcatttctggcattaataaaagtcttataagga

SEQ ID NO: 232246 - DNA, 1761 bp, Artificial Sequence
  derived and/or modified sequence
atgagcgccggcgacgccgtgtgcaccggctggctggtgaagagccctcctgagaggaagcttcagcggtacgcctggaggaaacggtggtttgtgctgaggcgggggaggatgtccgggaatcctgatgtcctggaatactataggaataaacactccagtaaaccaatacgggtcatcgacctgagtgagtgcgctgtttggaaacacgtagggccttcattcgtgagaaaagagttccagaacaattttgtgtttatagtcaaaacgacttcacgtactttttacctggtagcaaaaaccgaacaagagatgcaggtctgggtgcactccatctcacaagtttgtaacttgggtcaccttgaagatggagccgattctatggaaagcctttcttataccccaagctccctgcaaccttcgagcgcctcatctctcctcacagctcatgcagcctcctcctctctgcctagagacgacccgaacacgaacgccgtggcaacggaggagacccgctccgagtcggaactcctctttctgcctgactatctggtgctctccaactgcgagaccgggcggcttcaccatactagtcttccaaccagatgcgactcatggagcaactccgatagatctctggaacaggcctccttcgacgacgtgtttgtcgactgccttcagccacttccctcatcccatctggtccatccctcctgccatggctcaggagcccaagaggtcccttctagtcgccctcaggccgctttgatttggtcccgggaaattaatggaccccccagggatcacctctccagctccccgctgctggaatcgtctctgtcaagtaccatccaggtcgataagaatcaaggatcattgccttgcggcgcaaaggaactggacattatgtctaacacacctccacctaggccgcccaagccaagccacctgtcagaaagacggcaggaggaatggtctacccattccgggtcgaagaaacccgagtgcacactagtccctaggaggatctccctctcaggactagacaatatgcggacatggaaagcagatgtcgaagggcagtctctcaggcatagggataaacgattgagcttaaatttgccttgcagattctctcccatgtatccaaccgcgtccgcatcaattgaagattcctatgtgccaatgtccccacaggccggagcgtcgggtctggggccccactgcagtcctgacgattatattccgatgaactccggcagtataagcagtccactgcctgaattaccagcaaacctggaaccacccccagtgaacagagacctgaagccccagcggaaaagcaggccccccccactagacttgaggaatctgtcaataattcgcgagcacgcttctctcacgcggactaggacagtgccttgtagccggacctctttcctgagtccggaacggaatgggatcaacagtgctaggtttttcgctaatcccgtttcgcgcgaagatgaagagtcttatatcgagatggaagaacatcggaccgcaagctccctgtcgagcggcgcacttacgtggaccaagaaattctctctcgactatttggcccttgattttaactctgcatctcctgcccccatgcagcagaagctgctgctttcagaggaacaacgcgttgactacgtgcaggtggatgagcagaagacacaggcattgcagagcacgaagcaagagtggactgacgaaagacaatctaaagtttag

SEQ ID NO: 232247 - DNA, 1761 bp, Artificial Sequence
  derived and/or modified sequence
atgagtgccggagacgccgtttgcaccggatggctagtaaaatcccctccggagcgtaagttgcagcggtacgcatggcgaaagcggtggtttgttcttcgaaggggcagaatgagcgggaaccctgacgttctcgagtactatcgtaataagcactctagcaaaccaatccgggtgatcgacctgagtgaatgcgcggtctggaagcatgtgggcccatcctttgtgaggaaggagtttcagaataacttcgttttcatcgttaaaaccaccagtcgtactttttaccttgtggctaagactgagcaggagatgcaggtgtgggtccactctatctcacaggtttgtaatctgggacacctggaggacggggctgattcaatggagagcctcagctatacgccgagcagcctacaaccctcctccgcttcctctctcctgacagctcacgctgctagttcatctcttcctagagatgatccgaataccaatgcagtggccactgaagaaacgaggagtgagagcgagctgctctttctcccagattatctggtgctaagcaactgtgagactggacgcctccatcatacctctttaccaacccgctgcgactcatggtccaacagtgataggtctctggaacaagccagcttcgatgatgtcttcgtggattgcctgcaacctctgcccagttcccatttggtacaccctagttgtcatggatcgggagcacaggaggtgccgagttccagacctcaggccgcacttatatggtcacgagagattaacggacccccacgagaccatctctcgtcttcccctctgctggagagtagccttagcagcaccattcaggtggataagaatcagggcagcctcccctgcggcgctaaggagctggacattatgagcaatacacctcctccccgtccacccaagccgagccacctgagcgagcgacggcaggaagaatggagcactcacagcggttccaagaagcctgagtgcacgttggtccccagaagaatttctttgagtggcttggataatatgcgcacgtggaaggcagatgtggaaggccagtctctgcgtcaccgggataaaagactgtcactgaacctgccttgtagattctcgccaatgtatcccactgcatctgcttctattgaagattcatacgtccctatgtcccctcaggcaggggctagcggtctagggcctcactgcagcccagatgattatatcccgatgaatagtgggtccatctccagtcctctgcccgaactccccgctaatctagaaccaccacctgtaaaccgtgacctgaagcctcaacggaagagtaggccacctcctctggacttacgtaacctcagtatcattcgagagcacgccagtctcacacggacacgcacggtaccttgcagccgaacctctttccttagccccgaaagaaacggaataaatagcgccagattttttgctaaccctgtttcacgcgaggatgaggagagttatatagagatggaagagcacagaaccgccagcagcctctctagcggggcactgacttggaccaaaaagttttccttggactatcttgctctggacttcaattcagctagcccggcaccaatgcaacagaagctcctgctgtctgaggagcagcgggtcgattatgtccaagtcgacgaacaaaaaacccaggctctgcagtccacaaagcaggagtggaccgacgagcgtcaatccaaggtgtag

SEQ ID NO: 232248 - protein, 308 aa, Artificial Sequence
  derived and/or modified sequence
MFVQLLRAIYVPQNVYCIHVDEKAPMKYKTAVQTLVNCFENVFISSKTEKVAYAGFTRLQADINCMKVLVHSKFQWNYVINLCGQDFPIKTNREIIHYIRSKWSDKNITPGVIQPLHIKSKTSQSHLEFVPKGSIYAPPNNRFKDKPPHNLTIYFGSAYYVLTRKFVEFILTDIHAKDMLQWSKDIRSPEQHYWVTLNRLKDAPGATPNAGWEGNVRAIKRKSEEGNVHDGCKGRYVEDICVYGPGDLPWLIQSPSLFANKFEPSTDPLVVTCLERRHRLQVLRQAEVPIEPHWHFQQQSHFNMRLNR

SEQ ID NO: 232249 - DNA, 927 bp, Artificial Sequence
  derived and/or modified sequence
atgttcgtgcagctgctgagagccatctacgtgccccagaacgtgtactgcatccacgtggacgagaaggcccccatgaagtacaagaccgccgtgcagaccctggtgaactgcttcgagaacgtgttcatcagcagcaagaccgagaaggtggcctacgccggcttcaccagactgcaggccgacatcaactgcatgaaggtgctggtgcacagcaagttccagtggaactacgtgatcaacctgtgcggccaggacttccccatcaagaccaacagagagatcatccactacatcagaagcaagtggagcgacaagaacatcacccccggcgtgatccagcccctgcacatcaagagcaagaccagccagagccacctggagttcgtgcccaagggcagcatctacgccccccccaacaacagattcaaggacaagcccccccacaacctgaccatctacttcggcagcgcctactacgtgctgaccagaaagttcgtggagttcatcctgaccgacatccacgccaaggacatgctgcagtggagcaaggacatcagaagccccgagcagcactactgggtgaccctgaacagactgaaggacgcccccggcgccacccccaacgccggctgggagggcaacgtgagagccatcaagagaaagagcgaggagggcaacgtgcacgacggctgcaagggcagatacgtggaggacatctgcgtgtacggccccggcgacctgccctggctgatccagagccccagcctgttcgccaacaagttcgagcccagcaccgaccccctggtggtgacctgcctggagagaagacacagactgcaggtgctgagacaggccgaggtgcccatcgagccccactggcacttccagcagcagagccacttcaacatgagactgaacagatag

SEQ ID NO: 232250 - DNA, 2064 bp, Artificial Sequence
  derived and/or modified sequence
ataagctccacctcgagttccattaaggtattgaatgcacagtctttgttgggggaagcatttctttttttctttaatggagagtgaagttggccgcctcgaaggccaggaggactctgctcctgtcaggaaagatactcaagctatcatctgtaaacatgaacaacatttactgctggatggggaatcaccagcgcatggaagaactcttggtggatgcgttgtctggagcctgctcactccgccacgttactcagcaatgctttccctgtttctggataccacgctcccttctgaacgatgaagcatgaagcaccacgctccataaaagaccctccctctccccgtgggagggctcaggaagctatgagacctgagtatgtactgccttaaatcaacagcaacagaaggatctggtcccaaggaaatactcagagaagcaaaagcagcaacttttcaatctgcaggtcagaaccaacaggaataaaactctccagggacagatggcaacaaaacctgccaagcaactctactcaagtgactgaagcaggcgccgctgccggggaggaaccgatgggagagaaaggccaggctgggccctgacaccgccaggactccccctccaggaaccagggggcttctcctggaagcttaaaggaaaaaatacttaaattatggtaataagaatgcacctggagctcaagatatgagccagcttcgagccacaaagtctggacttgtcgtgagggcagtcatttgcatcttcatttttctttacttaaggaatccaactcctgcagaatcagaagaagaacctgcccaaccagaagtagtagaatgtggcttttacccagatgaactgtgttccgctttatttgaagggaaaggggcggccccctaaattgcaaaattttgcaaaacccctcataaatctgaaatacatgctcatttacacacaccaggaaactgctccaggatttctcgggggctgcatttcataaccagacccctgtctgcagaagagggcgatttctctttggcatatattataactattcataaggagctggccatgtttgtgcagcttctcagagctatttatgtacctcaaaatgtttattgtattcatgttgatgaaaaggccccaatgaagtataagactgctgtgcaaaccttggttaactgttttgaaaacgtttttatttcctccaagacagagaaggtggcttatgctggctttacaagactacaggcagatattaattgtatgaaagttctagtgcattctaaatttcaatggaactatgtcatcaatctttgtggacaggattttcccatcaaaaccaacagagaaatcatacactacatcagaagcaaatggagtgataaaaatattactcctggagtaatccaaccattgcacattaaatccaagacaagtcaaagtcatctcgaattcgttcctaaaggaagtatctatgcacctccaaataacagattcaaagacaaaccaccccataacttaaccatttattttggaagtgcttactatgtacttacaaggaagtttgtagagttcatactgactgacatccatgcaaaagacatgcttcagtggtccaaagacatccgcagcccagagcaacactactgggtgaccctgaaccgactaaaagatgctccaggtgctacaccaaacgctggctgggaaggaaatgttcgagccattaagcggaaaagtgaggaaggaaatgttcatgatggatgtaaaggccgctacgtcgaagacatctgcgtatacggaccaggagacctgccgtggctcattcagtcgccttctctgtttgccaacaaattcgaaccctcgacagacccgcttgtggttacctgcttagagcggcggcacagacttcaagtgctgaggcaggcagaagttcctatagagccacactggcattttcaacagcagagtcatttcaatatgagactgaaccgctagggagtgtttgctttcttactggtatcattctgtttccttgacttgaaacaagagaacattgaacc

SEQ ID NO: 232251 - DNA, 927 bp, Artificial Sequence
  derived and/or modified sequence
atgttcgtccaactactccgcgctatctatgtcccccaaaacgtttattgcatacacgttgacgaaaaagctcccatgaaatataaaaccgcggtgcagactctagtcaattgctttgaaaacgtttttatcagctcaaagaccgaaaaggttgcctacgcagggtttactcgtttacaggccgatataaactgcatgaaggtgctggtccacagcaagtttcagtggaattatgtaatcaatttgtgcggacaggacttccctatcaagacaaaccgagagattatccactatatccggtccaaatggagtgacaagaacatcacaccaggggtgatccaacccctgcatatcaaatcgaagacttcacagagccatcttgagttcgtgcctaagggatccatatacgctccgcccaacaataggttcaaagacaaacctcctcacaacttaacgatatactttgggagtgcctactacgtcctgaccaggaagttcgtggagttcattctcacagatattcatgccaaagacatgctgcaatggtctaaagatatcaggtctccggaacaacactattgggtaacactgaacaggctgaaagatgcacctggagccacaccgaacgcaggctgggaaggcaacgtgcgggctatcaagagaaagagcgaagaagggaacgtccacgacggttgtaagggacgctatgttgaagacatctgtgtgtacggacctggggatctgccctggcttatccaatcccccagcctcttcgctaataagtttgagccttcgaccgatccactggtggtgacctgtctggagcggcgtcacagactccaggtgctgcggcaggccgaagtgccgattgaacctcactggcacttccagcagcagagccatttcaatatgagattaaaccgctag

SEQ ID NO: 232252 - DNA, 927 bp, Artificial Sequence
  derived and/or modified sequence
atgtttgtgcagctgctgcgggccatctacgtgccccagaatgtgtactgcatccacgtggatgagaaggcccccatgaagtacaagacagctgtgcagaccctggtgaactgctttgaaaatgtgttcatcagcagcaagacagagaaggtggcctatgccggcttcacccggctgcaggccgacatcaactgcatgaaggtgctggtgcacagcaagttccagtggaactacgtgatcaacctgtgtggccaggacttccccatcaagaccaaccgggagatcatccactacatccgcagcaagtggagcgacaagaacatcaccccaggagtcatccagcccctgcacatcaagagcaagaccagccagagccacctggagtttgtgcccaagggcagcatctatgccccacccaacaaccgcttcaaggacaagccaccccacaacctgaccatctactttggaagtgcctactacgtgctgaccaggaagtttgtggagttcatcctgacagacatccacgccaaggacatgctgcagtggagcaaggacatccgcagccctgagcagcactactgggtgaccctgaaccggctgaaggatgcccctggggccaccccaaatgccggctgggagggcaatgtgcgggccatcaagaggaagtctgaggagggcaatgtgcatgatggctgcaagggccgctacgtggaggacatctgtgtgtatggccctggggacctgccctggctgatccagagccccagcctgtttgccaacaagtttgagcccagcacagaccccctggtggtgacctgcctggagcggcggcaccggctgcaggtgctgcggcaggccgaggtgcccatcgagccccactggcacttccagcagcagagccacttcaacatgaggctgaacagatag

SEQ ID NO: 232253 - DNA, 927 bp, Artificial Sequence
  derived and/or modified sequence
atgttcgtgcagctgctgcgggccatctacgtgccccagaacgtgtactgcattcacgtcgatgagaaggccccaatgaaatataagactgccgtacaaacactagtaaattgctttgagaatgtatttatctcatctaaaacagaaaaggtggcttatgctggatttacccgtttgcaggccgacattaattgtatgaaggtgctggtccactctaagtttcagtggaattatgttattaatttgtgcggacaggatttccctatcaagaccaatagggagataattcactacatcagatcaaaatggtctgacaagaacatcaccccgggagtcatacagcctctgcacattaaatctaaaaccagccagtcccacctcgaattcgtacccaaggggagcatctacgctcctccgaataacaggtttaaggataagccaccacacaacctcacaatttatttcggatctgcttactacgtactgacacggaagttcgtcgaattcatcctcaccgacatccacgctaaagacatgctgcagtggtccaaggatatccgaagtcctgaacagcattattgggtcacgttaaatagactaaaggacgcgcctggcgctacaccaaacgctggatgggagggaaacgtcagggcaatcaaacgcaaatctgaggagggtaatgtgcacgatggctgtaaaggaagatacgtggaagacatctgcgtttatggacctggcgacctgccttggctcattcaaagtccgtctcttttcgccaataaattcgagcccagcaccgacccacttgtcgttacatgcctggagaggagacaccgccttcaagtgttgaggcaggccgaagttccaatcgaaccacactggcattttcagcagcagtctcattttaacatgagactgaatcgctag

SEQ ID NO: 232254 - DNA, 927 bp, Artificial Sequence
  derived and/or modified sequence
atgttcgttcagcttctcagagccatctacgtccctcagaacgtctattgtattcacgtggacgagaaagcacctatgaagtataagacggcagttcaaacactcgtgaactgctttgagaatgtgttcatctccagtaagactgaaaaggtcgcctacgctgggtttacccgcctccaggctgacattaattgcatgaaagtgttagttcacagcaagtttcagtggaattatgtgatcaatctgtgtggacaggactttcctataaaaactaatagggagataatacactacattcggagtaagtggtctgacaaaaacatcacccccggagttatccagcctctgcatatcaagtcaaagacgtctcaaagccacttggaatttgtgcctaagggatccatctacgcccctccgaacaataggttcaaggataagcctcctcacaatcttacaatttacttcggctcagcatactatgtgcttacccggaagtttgtggagtttatacttactgacattcacgcaaaagacatgctgcaatggagcaaagacatacggtcccccgagcaacactattgggttaccctgaatagattgaaggatgcccctggggctaccccaaatgcaggatgggaaggaaatgtccgggcaatcaagcgtaagtcggaggaggggaacgtgcacgacggttgtaagggaagatacgtggaggatatatgcgtttacggacccggtgatctcccctggctgatccagagtccttccctcttcgccaataaatttgaaccatcaaccgatccacttgtggtgacctgcctcgaacggcgacacaggctgcaagtgctgaggcaggctgaggtacccattgaaccgcattggcatttccagcagcagagtcattttaatatgcgcctgaatagatag

SEQ ID NO: 232255 - protein, 201 aa, Artificial Sequence
  derived and/or modified sequence
MGSGRRALSAVPAVLLVLTLPGLPVWAQNDTEPIVLEGKCLVVCDSNPATDSKGSSSSPLGISVRAANSKVAFSAVRSTNHEPSEMSNKTRIIYFDQILVNVGNFFTLESVFVAPRKGIYSFSFHVIKVYQSQTIQVNLMLNGKPVISAFAGDKDVTREAATNGVLLYLDKEDKVYLKLEKGNLVGGWQYSTFSGFLVFPL

SEQ ID NO: 232256 - DNA, 606 bp, Artificial Sequence
  derived and/or modified sequence
atggggtctggacgacgggctctgtccgcagtcccggcagtgctgctagtactcactctacctggcctgcctgtgtgggcacagaatgacactgagccaatagtgctggaggggaagtgtttggtggtctgcgacagtaatcctgctaccgactccaaagggtctagctcttcccccctcggcattagtgtgcgggctgcgaacagtaaagtcgctttcagtgcagtccgctctacaaatcacgagccaagcgagatgagcaataaaactaggattatctatttcgatcaaatcctcgtgaatgtcggtaacttttttactcttgaatccgtcttcgtcgcccctaggaagggaatctacagttttagctttcacgttattaaggtttaccagagccaaacaattcaagtcaacttaatgctgaatggtaagcccgtcataagcgccttcgctggggataaggatgtgactcgggaggccgcaacgaatggagtcctgctctacctggacaaagaagataaggtctacctgaagcttgaaaaggggaacctggtcgggggttggcagtactcaactttttcgggttttctagtttttcccctgtag

SEQ ID NO: 232257 - DNA, 606 bp, Artificial Sequence
  derived and/or modified sequence
atgggttcggggcgccgtgctctttccgccgtgcccgcagtcctgctggtgcttactcttcccggacttcctgtatgggcccagaacgacactgaaccgatagtgctggaaggcaagtgcctagttgtatgtgactccaatccggcaaccgattcaaagggtagctcctcttcccctttaggcatatcagtccgggctgctaactccaaggtagccttttccgccgttagatccaccaaccatgaaccttccgaaatgtccaataaaaccagaatcatctattttgaccaaatcctggtcaacgttggcaacttctttacactggagagcgtgtttgttgctcccagaaaaggaatctacagtttttccttccatgtaattaaagtgtatcagtctcagactatccaggttaatttgatgctcaatggtaagcccgtgatcagtgcattcgccggagacaaggacgttactcgagaggctgccaccaatggtgtccttctatatctcgataaagaagacaaagtctatctgaagctcgaaaagggaaatctggtgggcggttggcagtactctacatttagcggatttctggtgtttccactatag

SEQ ID NO: 232258 - DNA, 606 bp, Artificial Sequence
  derived and/or modified sequence
atgggttcggggcgccgtgctctttccgccgtgcccgcagtcctgctggtgcttactcttcccggacttcctgtatgggcccagaacgacactgaaccgatagtgctggaaggcaagtgcctagttgtatgtgactccaatccggcaaccgattcaaagggtagctcctcttcccctttaggcatatcagtccgggctgctaactccaaggtagccttttccgccgttagatccaccaaccatgaaccttccgaaatgtccaataaaaccagaatcatctattttgaccaaatcctggtcaatgtcggcaattttttcacactggaatccgtgtttgttgctccacgcaagggaatctattccttctctttccacgtcattaaggtctatcagtcacagacaatccaggtaaatctaatgcttaatggcaagcccgtgatctcagccttcgctggtgacaaggatgttacaagagaagccgctactaacggagtgctgctctatctcgataaggaagacaaggtgtatttgaagctagagaaaggaaacctggtgggcggatggcaatattccacatttagtggctttttagtctttccgctttag

SEQ ID NO: 232259 - DNA, 3024 bp, Artificial Sequence
  derived and/or modified sequence
ggggcgggctcccggccaggcgcggtcgggacgcccgccggtccccaggttcggggcagcgcgcagcgcgggtccgcggcggcttatcctttttcgcgacccggcctggcagcgccgcgctccgcttggagggcactcggcggcagagttccgcgctgggaggggtgaggggaccagccgcctcctctgcggactcagatcgagcaggagagagtgggcgcggagctggggccagcgcagggccgtgggctcctctctgggcacgcatcctttacgccacgggctttcaggggctgaggggcctcgaaccttgccaatcaccagtgctgtgcgccccgcttgctttggggtgcgttaaacgtcaggagagagctgctcagatggggtcaccagacgccttctcccccttttctcggagcccgcgggttgcgcgataagccaacccagccggacgctgcgctcctataaatagagcgcgtgtgcccgcttcgcgctctccgggctgcacgagggacgagaaagttgtgcgcagggactgggggcgggcggccaggcaggagaggaccccgccggaccagccgccctgaacgctgcgcccggcgccctggacctgatcctgcgaatccgcgctttcggtgcgagggacctggctagccgctgcctccctccctacctctgggtgacaccaggtttgggggatttttttgaccaggcgaaagtgggagtcgctggcgtcctggccatgaacacagcctcgcgttcttctcagcctgggaaggaccttctgcctctgtaactcgtccctgccgcaagccagacaggactggcacccgcgccgctgggcacccgccacccttgtggcttctctttgagtcccctctttttgttcctgctccgtggtttagctggtggtgcttgagtttggggtgagaatttattattattattattttttgccttgaggtgtgaatgtgagggtttgatgactttcagatgtctaggaaccagagtgggtgcaggggccccaggcagggctgattcttgggcggaggagagtagggtaaagggtgctgcatgagctccttaaaggacaaaggtaacagagccagcgagagagctcgaggggagactttgacttcaagccacagaattggtggaagtgtgcgcgccgccgccgccgtcgctcctgcagcgctgtcgacctagccgctagcatcttcccgagcaccgggatcccggggtaggaggcgacgcgggcgagcaccagcgccagccggctgcggctgcccacacggctcaccatgggctccgggcgccgggcgctgtccgcggtgccggccgtgctgctggtcctcacgctgccggggctgcccgtctgggcacagaacgacacggagcccatcgtgctggagggcaagtgtctggtggtgtgcgactcgaacccggccacggactccaagggctcctcttcctccccgctggggatatcggtccgggcggccaactccaaggtcgccttctcggcggtgcggagcaccaaccacgagccatccgagatgagcaacaagacgcgcatcatttacttcgatcagatcctggtgaatgtgggtaattttttcacattggagtctgtctttgtagcaccaagaaaaggaatttacagtttcagttttcacgtgattaaagtctaccagagccaaactatccaggttaacttgatgttaaatggaaaaccagtaatatctgcctttgcgggggacaaagatgttactcgtgaagctgccacgaatggtgtcctgctctacctagataaagaggataaggtttacctaaaactggagaaaggtaatttggttggaggctggcagtattccacgttttctggctttctggtgttccccctataggattcaatttctccatgatgttcatccaggtgagggatgacccactcctgagttattggaagatcattttttcatcattggattgatgtcttttattggtttctcatgggtggatatggattctaaggattctagcctgtctgaaccaatacaaaatttcacagattatttgtgtgtgtctgtttcagtatatttggattgggactctaagcagataatacctatgcttaaatgtaacagtcaaaagctgtctgcaagacttattctgaatttcatttcctgggattactgaattagttacagatgtggaattttatttgtttagttttaaaagactggcaaccaggtctaaggattagaaaactctaaagttctgacttcaatcaacggttagtgtgatactgccaaagaactgtatactgtgttaatatattgattatatttgtttttattcctttggaattagtttgtttggttcttgtaaaaaacttggattttttttttcagtaactggtattatgttttctcttaaaataaggtaatgaatggcttgcccacaaatttaccttgactacgatatcatcgacatgacttctctcaaaaaaaaagaatgcttcatagttgtattttaattgtatatgtgaaagagtcatattttccaagttatattttctaagaagaagaatagatcataaatctgacaaggaaaaagttgcttacccaaaatctaagtgctcaatccctgagcctcagcaaaacagctcccctccgagggaaatcttatactttattgctcaactttaattaaaatgattgataataaccactttattaaaaacctaaggttttttttttttccgtagacatgaccactttattaactggtggtgggatgctgttgtttctaattatacctatttttcaaggcttctgttgtatttgaagtatcatctggttttgccttaactctttaaattgtatatatttatctgtttagctaatattaaattcaaatatcccatatctaaatttagtgcaatatcttgtcttttgtataggtcatatgaattcataaaattatttatgtctgttatagaataaagattaatatatgtta

SEQ ID NO: 232260 - DNA, 606 bp, Artificial Sequence
  derived and/or modified sequence
atgggcagcggcagaagagccctgagcgccgtgcccgccgtgctgctggtgctgaccctgcccggcctgcccgtgtgggcccagaacgacaccgagcccatcgtgctggagggcaagtgcctggtggtgtgcgacagcaaccccgccaccgacagcaagggcagcagcagcagccccctgggcatcagcgtgagagccgccaacagcaaggtggccttcagcgccgtgagaagcaccaaccacgagcccagcgagatgagcaacaagaccagaatcatctacttcgaccagatcctggtgaacgtgggcaacttcttcaccctggagagcgtgttcgtggcccccagaaagggcatctacagcttcagcttccacgtgatcaaggtgtaccagagccagaccatccaggtgaacctgatgctgaacggcaagcccgtgatcagcgccttcgccggcgacaaggacgtgaccagagaggccgccaccaacggcgtgctgctgtacctggacaaggaggacaaggtgtacctgaagctggagaagggcaacctggtgggcggctggcagtacagcaccttcagcggcttcctggtgttccccctgtag

SEQ ID NO: 232261 - DNA, 606 bp, Artificial Sequence
  derived and/or modified sequence
atggggagcggccgtcgagccctgtccgcagtccccgccgtgctcctggtgctgaccctgcccgggctgcccgtgtgggctcagaacgataccgagcctatcgtgctggaagggaagtgcctcgtagtgtgcgattcaaatcccgcaaccgattcaaaaggttcgtcttcctcacccctaggaatcagtgtcagggctgccaactccaaggtggccttctccgccgtgcgttctaccaaccatgaaccaagcgaaatgagtaataaaacgcgaatcatatatttcgaccaaatactagtaaatgtgggtaatttttttacgctggaatctgtctttgtcgcccctcgaaagggcatatactctttcagctttcatgtgatcaaagtgtaccagagccaaacaatacaggtcaatcttatgttaaatggcaagcccgtaatttccgcgttcgccggggataaggatgtaaccagggaggctgccaccaacggagtcctgctctaccttgacaaggaggacaaggtgtatctgaaacttgaaaagggcaatttggtagggggctggcagtactcaaccttttccggtttcctcgtgtttcctttgtag

SEQ ID NO: 232262 - DNA, 606 bp, Artificial Sequence
  derived and/or modified sequence
atgggcagcggcagaagagccctgtctgctgtgcctgctgtgctgctggtgctgaccctgcccggcctgcctgtgtgggcccagaatgacacagagcccatcgtgctggagggcaagtgcctggtggtgtgtgacagcaacccagccacagacagcaagggcagcagcagcagccccctgggcatctctgtgcgggccgccaacagcaaggtggccttctctgctgtgcgcagcaccaaccacgagcccagcgagatgagcaacaagacccgcatcatctactttgaccagatcctggtgaatgtgggcaacttcttcaccctggagagcgtgtttgtggcccccaggaagggcatctacagcttctccttccacgtgatcaaggtgtaccagagccagaccatccaggtgaacctgatgctgaatggcaagcctgtgatcagcgcctttgctggggacaaggatgtgacccgggaggccgccaccaatggagtgctgctgtacctggacaaggaggacaaggtgtacctgaagctggagaagggcaacctggtgggcggctggcagtacagcaccttcagcggcttcctggtgttccccctgtag

SEQ ID NO: 232263 - DNA, 606 bp, Artificial Sequence
  derived and/or modified sequence
atgggcagcggccggcgggccctgagcgccgtgcccgccgtgctgctagtcctgacgttgcctgggctacccgtctgggcgcagaatgacacggagccaatagtcctggaaggtaaatgcttagtggtatgcgacagcaatccagctacggacagtaaaggctcttcttctagccccttaggaattagcgtacgcgccgccaactctaaggtggcctttagcgcagtgagatccactaatcacgaaccctcagagatgagcaataagacacgaattatttatttcgaccaaatcctcgtcaatgtggggaacttcttcacccttgagtccgtgtttgttgccccccgaaagggtatctatagttttagcttccatgttatcaaggtgtaccagtctcaaacaatccaagttaatcttatgctgaatggcaagcctgttatcagtgcattcgctggggataaggacgttacaagggaagctgcaaccaatggtgtgcttttgtatctggataaggaggacaaggtttacctgaagcttgaaaagggaaacctggttgggggatggcagtactcaacttttagcggctttctggtcttcccattatag

SEQ ID NO: 232264 - RNA, 606 nt, Artificial Sequence
  derived and/or modified sequence
auggguucggggcgccgugcucuuuccgccgugcccgcaguccugcuggugcuuacucuucccggacuuccuguaugggcccagaacgacacugaaccgauagugcuggaaggcaagugccuaguuguaugugacuccaauccggcaaccgauucaaaggguagcuccucuuccccuuuaggcauaucaguccgggcugcuaacuccaagguagccuuuuccgccguuagauccaccaaccaugaaccuuccgaaauguccaauaaaaccagaaucaucuauuuugaccaaauccuggucaacguuggcaacuucuuuacacuggagagcguguuuguugcucccagaaaaggaaucuacaguuuuuccuuccauguaauuaaaguguaucagucucagacuauccagguuaauuugaugcucaaugguaagcccgugaucagugcauucgccggagacaaggacguuacucgagaggcugccaccaaugguguccuucuauaucucgauaaagaagacaaagucuaucugaagcucgaaaagggaaaucuggugggcgguuggcaguacucuacauuuagcggauuucugguguuuccacuauag

SEQ ID NO: 232265 - RNA, 606 nt, Artificial Sequence
  derived and/or modified sequence
auggguucggggcgccgugcucuuuccgccgugcccgcaguccugcuggugcuuacucuucccggacuuccuguaugggcccagaacgacacugaaccgauagugcuggaaggcaagugccuaguuguaugugacuccaauccggcaaccgauucaaaggguagcuccucuuccccuuuaggcauaucaguccgggcugcuaacuccaagguagccuuuuccgccguuagauccaccaaccaugaaccuuccgaaauguccaauaaaaccagaaucaucuauuuugaccaaauccuggucaaugucggcaauuuuuucacacuggaauccguguuuguugcuccacgcaagggaaucuauuccuucucuuuccacgucauuaaggucuaucagucacagacaauccagguaaaucuaaugcuuaauggcaagcccgugaucucagccuucgcuggugacaaggauguuacaagagaagccgcuacuaacggagugcugcucuaucucgauaaggaagacaagguguauuugaagcuagagaaaggaaaccuggugggcggauggcaauauuccacauuuaguggcuuuuuagucuuuccgcuuuag

SEQ ID NO: 232266 - protein, 251 aa, Artificial Sequence
  derived and/or modified sequence
MGARASGGPLARAGLLLLLLLLLLLGLLAPGAQGARGRGGAEKNSYRRTVNTFSQSVSSLFGEDNVRAAQKFLARLTERFVLGVDMFVETLWKVWTELLDVLGLDVSNLSQYFSPASVSSSPARALLLVGVVLLAYWFLSLTLGFTFSVLHVVFGRFFWIVRVVLFSMSCVYILHKYEGEPENAVLPLCFVVAVYFMTGPMGFYWRSSPSGPSNPSNPSVEEKLEHLEKQVRLLNIRLNRVLESLDRSKDK

SEQ ID NO: 232267 - DNA, 756 bp, Artificial Sequence
  derived and/or modified sequence
atgggcgccagagccagcggcggccccctggccagagccggcctgctgctgctgctgctgctgctgctgctgctgggcctgctggcccccggcgcccagggcgccagaggcagaggcggcgccgagaagaacagctacagaagaaccgtgaacaccttcagccagagcgtgagcagcctgttcggcgaggacaacgtgagagccgcccagaagttcctggccagactgaccgagagattcgtgctgggcgtggacatgttcgtggagaccctgtggaaggtgtggaccgagctgctggacgtgctgggcctggacgtgagcaacctgagccagtacttcagccccgccagcgtgagcagcagccccgccagagccctgctgctggtgggcgtggtgctgctggcctactggttcctgagcctgaccctgggcttcaccttcagcgtgctgcacgtggtgttcggcagattcttctggatcgtgagagtggtgctgttcagcatgagctgcgtgtacatcctgcacaagtacgagggcgagcccgagaacgccgtgctgcccctgtgcttcgtggtggccgtgtacttcatgaccggccccatgggcttctactggagaagcagccccagcggccccagcaaccccagcaaccccagcgtggaggagaagctggagcacctggagaagcaggtgagactgctgaacatcagactgaacagagtgctggagagcctggacagaagcaaggacaagtag

SEQ ID NO: 232268 - DNA, 756 bp, Artificial Sequence
  derived and/or modified sequence
atgggggcccgggccagtggggggcccctggcccgcgcaggcctactgctacttctgcttctactgctccttctaggtctgcttgcaccaggtgcccagggcgccagaggaagaggcggagccgagaagaactcgtacaggagaacagtcaacactttcagccagagcgtcagctccctgtttggggaggataacgtgcgggctgcccagaagtttttagcccggctaaccgagagattcgtgctgggagtggacatgttcgtggaaactttatggaaggtctggaccgaactgttagacgttcttgggttagatgtgagtaatctgtcccagtacttcagccccgcttcggtttcttccagccctgctcgggctctcctgctcgttggggtggtcctcctggcctactggttcttaagcttgacattggggtttactttttctgtcctgcacgtggtctttggacgctttttttggatcgtgcgcgttgtcctcttctctatgtcatgcgtctacattctgcacaagtatgaaggagagcccgaaaatgcagtgctgcccctttgcttcgttgttgctgtgtatttcatgactgggcccatgggcttttactggcgcagttcaccctcaggcccatctaatccgagcaaccccagtgtggaggaaaagctcgagcacctggaaaaacaggtgcgcctgctcaacattcggctgaatagggtcctggaatccctcgacagaagcaaggataaatag

SEQ ID NO: 232269 - DNA, 756 bp, Artificial Sequence
  derived and/or modified sequence
atgggcgcccgggccagcggcggccccctggcccgggccggcctgctgctgctgctgctgctgctgctgctgctgggcctgctggcccctggggcccagggcgcccggggccggggcggcgctgagaagaacagctacagaagaacagtgaacaccttcagccagagcgtgagcagcctgtttggagaagataatgtgcgggccgcccagaagttcctggcccggctgacagaaagatttgtgctgggcgtggacatgtttgtggagaccctgtggaaggtgtggacagagctgctggatgtgctgggcctggatgtgagcaacctgagccagtacttctccccagcctctgtgagcagcagccctgcccgggccctgctgctggtgggcgtggtgctgctggcctactggttcctgagcctgaccctgggcttcaccttctctgtgctgcacgtggtgtttggccgcttcttctggatcgtgcgggtggtgctcttctccatgagctgtgtgtacatcctgcacaagtatgaaggagagccagaaaatgctgtgctgcccctgtgctttgtggtggccgtgtacttcatgacaggccccatgggcttctactggaggagcagccccagcggccccagcaaccccagcaaccccagcgtggaggagaagctggagcacctggagaagcaggtgcggctgctgaacatccggctgaacagagtgctggagagcctggacaggagcaaggacaagtag

SEQ ID NO: 232270 - DNA, 756 bp, Artificial Sequence
  derived and/or modified sequence
atgggcgcccgggccagcggcggccccctggcccgggccggcctgctgctgttgctcctactgctgctactcctcggtctgctggcccccggtgcccaaggggcccgcgggagagggggagccgagaaaaactcctaccgcagaactgttaatacgttctctcagagcgtgtcgtccttgttcggggaggataacgtgcgagcggcccagaagtttctagcccgactcaccgagcggttcgttctcggcgtggatatgttcgtggaaaccctgtggaaggtgtggactgaactgctggacgtacttggcctggatgtctccaatctgagtcaatatttctctccagcctctgtctcatcttcgccggcacgcgcattactgctggtgggagtagttctgttagcgtactggttcctctccctgaccctgggcttcactttcagcgttctgcacgttgtgttcgggcgatttttctggatcgtgcgcgtggtcctgttttccatgtcatgtgtgtatattctccataaatacgagggagaacctgagaatgctgtcctgcctctgtgctttgtcgtcgctgtgtattttatgaccgggcctatgggcttttactggagatccagcccatcaggaccttctaacccaagtaaccccagcgttgaagagaagctggagcacctggaaaagcaagtgaggctgttgaatatcaggcttaacagggtgctggaatccctagacaggtccaaagacaagtag

SEQ ID NO: 232271 - DNA, 756 bp, Artificial Sequence
  derived and/or modified sequence
atgggagcacgcgctagcggcggacccctggcccgtgcaggcctgctcctactactgctgctgctgctcctcctaggcttactggcccctggcgcacaaggcgcaagaggacggggtggagccgaaaaaaatagctacagaaggacagtaaataccttctcccaatccgtaagctccctgtttggggaagacaacgttagggccgctcagaagtttctggccaggctgactgagagattcgtgctcggggtggatatgtttgtcgagacgctgtggaaggtgtggacagaattgctggacgtgttgggcttggacgttagcaacttaagccaatatttctccccagccagtgtttcaagcagccccgcacgtgctctgctgttagtgggggtcgttttgcttgcctattggtttctcagtctgaccttagggttcacgttttccgtgctgcacgtggttttcggcaggttcttctggattgtccgcgtggtgttgtttagcatgtcatgcgtctatattctccacaagtacgagggtgaaccagaaaacgccgtcctgcctctttgctttgtcgtagccgtgtattttatgacaggacccatgggcttctactggcgctcttctccatctggtccctccaatccctccaaccccagtgtcgaggagaaactcgagcacctggaaaagcaagtccggttgctgaacatcaggctgaatagggtcttggagtctcttgatcggtctaaggacaagtag

SEQ ID NO: 232272 - DNA, 6555 bp, Artificial Sequence
  derived and/or modified sequence
gagcgcgccaaccttgccctagccggagcccgctgcggcccagcgcacggccctcaccccgcatcgcgaccccgcgccccgccggccgagcatgggcgcgcgcgcctcaggcgggcccctggcccgggccgggctcctgctgctgctgctgctgctgctgctgctcgggctgctggccccgggcgcgcagggggcgcggggccgcggcggcgcggagaagaacagctaccgccgcacggtcaacaccttctcccagagcgtcagcagcctgttcggcgaggacaacgtgcgcgccgctcagaagttcttggccaggctgactgagagatttgtgctgggagtggatatgttcgtggagacactgtggaaagtctggaccgagctcttggatgttcttggacttgacgtctccaacctgtcccagtatttcagcccagcctcggtgtccagcagcccggcccgcgcgctcctgctggtcggcgtcgtcctcctggcctactggttcttgtccctgaccctgggcttcactttcagcgtcctgcacgtggtgttcggccgcttcttctggatcgtgcgggtcgtcctgttttccatgtcctgcgtgtacatcctgcacaagtacgagggcgagccggagaacgcggtgctgccgctgtgcttcgtggtggccgtctacttcatgaccgggcccatgggcttctactggcgaagcagtcccagcggccccagcaaccccagcaaccccagcgtggaggagaagctggagcacctggagaagcaggtcagactgctcaacatccgtctcaaccgggtgctcgagagcctggaccgctccaaggacaagtgaaggtcagccggccgggcgggtccacagttaccagcacgctgtctcagaaaacgaaaacggaggaaaaaaaccccaaaccccaaacaatcttaataaacacgactgagcaagaaagtggcgctgtgtagggctatttccacccacccggcagctcttaggacacattcccagaagagcggaaagatcattgacgtggaactacacacgaagtgtaattagtgggggaaaaaatattttttaaacaaaggatataaccatatttagttgtacagtaagagaaatttatctgtgcatagagcataaagttaattttttcaagcatttaaatacatcttttgtaaggttttttaataaaggcagattgagtcaagtttattaaaactttacatggaggggaagaatatgctaatttgacatttgagaaaagtttaaatgcgagcgtttgttttcacagcttagggattggtgggtgaggtctgtgtgcgttattttcatgttcccaaactgtgagctttatttcatgttatttttggtggatgttgacttagttcatgaatgttgtcacttctaaatgtggacagttgggctgcaggatgcaactcaacctcttttggatcctagagacccctgccaagcccccatcagtcctatttttaaatgaagacatcgccatttctagaagacctgagattttcttccctctgtgcttcgatgtattttaacctcaacattttgaaacggaaaatgcaaggaggggccaagaaatgtcctggggatttgatgccaggaagtacctggtaaggattggagattgctccagaatctactgcatgtcccaatttgcagtttgctcactagggctatatacaaaagctatacccttgagggtttttttttttttcttttgatttcctcaggaccttagagggaaaacaaacagtagcagctaatattctcaagtatattgctgcttagaaagatcctcaggaacaattagcagcaataagcaagcctttgaaaagatctgaattctttttcctgaaatatttacgatacacaggtgctttttatctgaaatctgttgtgtcctccttttaggcagtctctgtgggcagagagtgggacttgcgaggtggacagctgtggggatcctgggcaagggagtttcagaaggtgtggctcaggggctggtagaaacccccttttgttaggacttgttttttaaaaaagaaagccctaggccaggcgcagtggctgatgcctgtaatcccagcgctttgggaggccgaggagtatggatcacctgaggtcaggagttcaagaccagcctggccaacatggtgaaacccccgtctctactaaaaatacaaaaattagtcaggcatggtggtgggtgcctgtagtccagctactcaggaggctgaggcaggagaattgcttgaacctgggaggtggaggttgcggtgagccgagatcacgccactgcactccagcctaggcaacagagcaagacttcatcttaaaaaaaaaaaaaaaagcccagcattttgcagctttgaagctgctggggatcacgactgtctctgtggcccttacctggccacagatgtaccctggcaacccgctcacagtgccctgcgtgcaggtttatagataacccctgccagacctgctacaaccaagaccttatggtccaggtctcagtttggagaagatttagctgtctaccacttcttgtgtagtgttcctgtgaagttttatttttggttgcaagtatctggaaaacagatgcagatgtttttgtggatgttgttgagacttttgagacttctgtttctaaggtacacatgatgggacccaaactctcctggagagttccattcacttcctgaaacgtgcacctgtttcaggtgcatgtttattcagtgtgcatggatatttaagatttgctggagcaggctgggcagggtggctcacccctataatcccaacactttgggaggccaaggcaggtggatcacctgaggtcaggagtttgagaccagcccggccaacagagtgaaaccccgtctctactaaaaatacaaaaattagccaggcctggtggtgggcgcctgtgatcccagctacttgggaggctgaggctggagaatcgcttgaacatgggaggcggaggttgcagtcagctgagatcataccaccacactctagcctcagcaacagagtgagactccgtctcaaaaaaaattatttgctggatcgaatctttttttttttgagatggagtctcactgtcaaccaggctggagtgcagtggcaccatctcggctcactgcaagctccgcctcctgggttcacgccattctcctacctcagcctcccaagtagccgggactacaggcgcccaccatcatgcccggctaattttttatatttttagtagagacggggtttcaccgtgttagccaggatggtctcgatctcctgacctcgtgatccgcccgcctcggcctcccaaagtgctgggattacaggcgtgagccaccgcgctgggcctagatcaaatctttatccatgcacattggaacacaggattactgggttgaaatcattctagttttgtcatttagatacttgtagatgaatctattttagcacaaggtataaataactcgggaggtcatctctatcttctttccttttgtgcatttggctataccacgtttaggtactaaaacagctttgcttatgttggccaggggaaaacatggcattctgtgcgcaaagctaatgatcgccagccctgccttggcccctcccttgtttatggtcattgtaagatgcccgcatgttaaggcttaagctgtcactgggctgggtgtaatacccgcttcattcctcctcccaccctcttacccgaaacatgaagggcactgtgctctattgagatctcgataagatcatcattttaacttgtattcaactgagggaggtaacatgatatctgggtgctggtggattgagacctcaagcatcaattcaaaattgctgtcgaaaatatgcactattttttttttccactctggctaagtgtaggctctgaagccagttttatagcttgatacattctggtgaaagatgtcttcatttttaatgaaagaacctacagttagtaggtgtcacctcagggtagaaattctgatagaaattctgattatttgaaactctgatagaaatcctagatgctagatttgaagaaaacctgggttttattgcatagatttcaccttttctggggcacatcttaccccaaaataattggggatttttttgttccttctccattccatggaaccttgtagggtgttgggattgggcctcccctcgccacccgccacatgtctttgtttttttctctcttttgtatgtggaaaaatgtatttttgtaccatatctcatacctggagagaaaccttttttctatcttcagggctgtagaatatattagcgtaacacttcactgaatgtgacgtaaaagcattctgatgaaaactggttctgttataattaagactcagtgtttaaaatatcttaatcagtgttaatttcccagtgtttcagtatcacagtaaatacttgttttactgagaacagaaaataatccagaaaaggaaaaggaccagccctctctagattgctggaattgtatggatgtgttggggttggtttagtgatctcttccttgacaccctagcaaagatgcttttgtggagtgcaaacctttcataaatatactttccaggctgggtgcagtggctcaagcttgtaatcccagcactttgggaggccaaggcgggtggatcacttgcggtcgggagttcgagaccagcctggccaacatagtgaaatcccgtctctaccaaaaaatacaaaaaaaaaaaaaaaaaaaaaaatagccaggtgtggtggtgggttcctgtagtcccagctactcaggaggctgaggtgggagaattgtatgaacctgggaggcagaggttgcagtgaactgagatcacaccactgtactccagttgaggcgacagagtgagacccagtctcaaaaaaaaaaaaaagtgtgtgtgtgtgtatatatatgtatatatatatacacacacacacactttccaataccagtcggcattacccgccctttggtttcttttgctttggatttcagcccccatatcatttctggtaacagagcacagcaatagaatttctgggaagcagaccttgtgaatcgtgcctgtgtcttaattcacaaagggtaagtgaatgccgttgaaaggtgtttcatacacttaccccagaaatgagagcctgtctcatgcaggagtcgggaggcagcgatgtcagggaactgggactatgtctttatgactgtgatggtggtaaccaagtggggtggtcccctctggggagctgagtaagaacgcaaaggtttgggtcagtgattaggaagactataatatgactttgtgcatgcccgggagggctgccttgtagagaggatgtgagcagcttagtcgctcatctggccctgtgattcaggcttatggagcgttaagaataacagctgtcaaatggcctagacatggttaatgcaatttgttgctagtggaaatcctgaattgcttcctttctgtgatcactgctacttcttaagatgcttttgatgaatgtcatctgccttacaagttgacacctgataacttctccctgatgggtttccgaactggctgacttaaccaaaaagccagctcttgccatctatcttgcattaaaaggaattcctgaggctcctaaggggtcagctgccccactcctgacttttttatttttaatggtctataccttctgcaacatttttgtttatggccatttgaatagttggactttgactcctcacttgtgaataataggaatatattttgcagaatctaacataatacccttaaaattcatactggacaaccatcagtgtgatgtatagtatctggtgtaaacaaattttattcagcatattaaattattctgtgttttgcttttccttgatatgtaggaggtgcaccagtaccagtttttctcttgtggtggcttaaaacgctgattgccatttgcattgtctactgaaaagctgtggcagcgagtggtattattgaccatgtgttctcatgtctttttgcagatttaaaggttttattgtagtgtccatttaatatctgcatgtgtgtttaatctctgaataccatgtaattaaactgattaacttgtgatggtgatggtgattagcacacactaaaaacccaatgaagcaattgtctccctcttcttaactggaaatcacacttgtgaggtatggtatccattatcaacagtggattcatgattgacttcatattttgtgtatctggttataaattttgtatagcatttaatttggcacttaatataaatccatttgatttgaatagtgtgtgtgtgtacatggtgtgtgtgtgtgtgtgcactttagtttcgtgagccttgggaaactgattctacaaatatcttatatagagataaatgtatcaggcatttttttgcaaagcgatatatacattcctcttatttattaaatcactggctttggtgttatgtagagatatttgtagatctcagaacag

SEQ ID NO: 232273 - protein, 829 aa, Artificial Sequence
  derived and/or modified sequence
MAEAEEQETGSLEESTDESEEEESEEEPKLKYERLSNGVTEILQKDAASCMTVHDKFLALGTHYGKVYLLDVQGNITQKFDVVQVFGLYSGEEFHETFDCPIKIIAVHPHFVRSSCKQFVTGGKKLLLFERSWMNRWKSAVLHEGEGNIRSVKWRGHLIAWANNMGVKIFDIISKQRITNVPRDDISLRPDMYPCSLCWKDNVTLIIGWGTSVKVCSVKERHASEMRDLPSRYVEIVSQFETEFYISGLAPLCDQLVVLSYVKEISEKTEREYCARPRLDIIQPLSETCEEISSDALTVRGFQENECRDYHLEYSEGESLFYIVSPRDVVVAKERDQDDHIDWLLEKKKYEEALMAAEISQKNIKRHKILDIGLAYINHLVERGDYDIAARKCQKILGKNAALWEYEVYKFKEIGQLKAISPYLPRGDPVLKPLIYEMILHEFLESDYEGFATLIREWPGDLYNNSVIVQAVRDHLKKDSQNKTLLKTLAELYTYDKNYGNALEIYLTLRHKDVFQLIHKHNLFSSIKDKIVLLMDFDSEKAVDMLLDNEDKISIKKVVEELEDRPELQHVYLHKLFKRDHHKGQRYHEKQISLYAEYDRPNLLPFLRDSTHCPLEKALEICQQRNFVEETVYLLSRMGNSRSALKMIMEELHDVDKAIEFAKEQDDGELWEDLILYSIDKPPFITGLLNNIGTHVDPILLIHRIKEGMEIPNLRDSLVKILQDYNLQILLREGCKKILVADSLSLLKKMHRTQMKGVLVDEENICESCLSPILPSDAAKPFSVVVFHCRHMFHKECLPMPSMNSAAQFCNICSAKNRGPGSAILEMKK

SEQ ID NO: 232274 - DNA, 2490 bp, Artificial Sequence
  derived and/or modified sequence
atggccgaggccgaggagcaggagaccggcagcctggaggagagcaccgacgagagcgaggaggaggagagcgaggaggagcccaagctgaagtacgagagactgagcaacggcgtgaccgagatcctgcagaaggacgccgccagctgcatgaccgtgcacgacaagttcctggccctgggcacccactacggcaaggtgtacctgctggacgtgcagggcaacatcacccagaagttcgacgtggtgcaggtgttcggcctgtacagcggcgaggagttccacgagaccttcgactgccccatcaagatcatcgccgtgcacccccacttcgtgagaagcagctgcaagcagttcgtgaccggcggcaagaagctgctgctgttcgagagaagctggatgaacagatggaagagcgccgtgctgcacgagggcgagggcaacatcagaagcgtgaagtggagaggccacctgatcgcctgggccaacaacatgggcgtgaagatcttcgacatcatcagcaagcagagaatcaccaacgtgcccagagacgacatcagcctgagacccgacatgtacccctgcagcctgtgctggaaggacaacgtgaccctgatcatcggctggggcaccagcgtgaaggtgtgcagcgtgaaggagagacacgccagcgagatgagagacctgcccagcagatacgtggagatcgtgagccagttcgagaccgagttctacatcagcggcctggcccccctgtgcgaccagctggtggtgctgagctacgtgaaggagatcagcgagaagaccgagagagagtactgcgccagacccagactggacatcatccagcccctgagcgagacctgcgaggagatcagcagcgacgccctgaccgtgagaggcttccaggagaacgagtgcagagactaccacctggagtacagcgagggcgagagcctgttctacatcgtgagccccagagacgtggtggtggccaaggagagagaccaggacgaccacatcgactggctgctggagaagaagaagtacgaggaggccctgatggccgccgagatcagccagaagaacatcaagagacacaagatcctggacatcggcctggcctacatcaaccacctggtggagagaggcgactacgacatcgccgccagaaagtgccagaagatcctgggcaagaacgccgccctgtgggagtacgaggtgtacaagttcaaggagatcggccagctgaaggccatcagcccctacctgcccagaggcgaccccgtgctgaagcccctgatctacgagatgatcctgcacgagttcctggagagcgactacgagggcttcgccaccctgatcagagagtggcccggcgacctgtacaacaacagcgtgatcgtgcaggccgtgagagaccacctgaagaaggacagccagaacaagaccctgctgaagaccctggccgagctgtacacctacgacaagaactacggcaacgccctggagatctacctgaccctgagacacaaggacgtgttccagctgatccacaagcacaacctgttcagcagcatcaaggacaagatcgtgctgctgatggacttcgacagcgagaaggccgtggacatgctgctggacaacgaggacaagatcagcatcaagaaggtggtggaggagctggaggacagacccgagctgcagcacgtgtacctgcacaagctgttcaagagagaccaccacaagggccagagataccacgagaagcagatcagcctgtacgccgagtacgacagacccaacctgctgcccttcctgagagacagcacccactgccccctggagaaggccctggagatctgccagcagagaaacttcgtggaggagaccgtgtacctgctgagcagaatgggcaacagcagaagcgccctgaagatgatcatggaggagctgcacgacgtggacaaggccatcgagttcgccaaggagcaggacgacggcgagctgtgggaggacctgatcctgtacagcatcgacaagccccccttcatcaccggcctgctgaacaacatcggcacccacgtggaccccatcctgctgatccacagaatcaaggagggcatggagatccccaacctgagagacagcctggtgaagatcctgcaggactacaacctgcagatcctgctgagagagggctgcaagaagatcctggtggccgacagcctgagcctgctgaagaagatgcacagaacccagatgaagggcgtgctggtggacgaggagaacatctgcgagagctgcctgagccccatcctgcccagcgacgccgccaagcccttcagcgtggtggtgttccactgcagacacatgttccacaaggagtgcctgcccatgcccagcatgaacagcgccgcccagttctgcaacatctgcagcgccaagaacagaggccccggcagcgccatcctggagatgaagaagtag

SEQ ID NO: 232275 - DNA, 2490 bp, Artificial Sequence
  derived and/or modified sequence
atggcagaagccgaagagcaagaaacaggttcattggaggaatccaccgatgagagtgaggaggaagaatccgaagaggagcctaagctgaagtatgaacgcctgagcaacggcgtcacagagattctccagaaggatgcagccagttgcatgaccgtgcatgataagttcttggccctggggactcattatgggaaagtgtacctcctggacgtgcaggggaatataacacagaagttcgatgttgtgcaagtctttgggttgtactcaggtgaagagttccacgagacattcgactgtcccataaagattattgcagttcaccctcactttgtgaggagtagctgtaagcagttcgtcactgggggaaaaaagcttcttttatttgaacggtcctggatgaaccggtggaagagtgcggtgttgcatgaaggcgagggaaacatcaggagcgtgaagtggagggggcacttaatcgcgtgggcaaacaatatgggagttaaaatcttcgatattattagcaaacagaggataaccaatgtcccgcgggacgatatttccctaaggccagatatgtacccctgttctctttgctggaaagacaatgtgacattgataattgggtggggaacctcagtgaaagtctgcagcgtcaaggagaggcatgccagcgagatgagagatctgccctctagatacgtggagattgtgtcacagtttgaaacagagttttacatatctgggctggcccccctatgcgatcagctggtggttttgagctacgtcaaggagattagcgaaaaaacagagagagaatattgtgctcgacctaggctggacattatacagccactgtccgagacttgcgaagagatctctagtgacgccctgacagtgcgcgggtttcaggagaatgagtgtagagattaccaccttgagtactcagagggtgagtccctgttctacatcgtgtcaccccgtgatgtggtcgtggctaaggaacgagaccaagacgatcacattgactggttgttggagaaaaagaagtatgaagaagccttgatggccgcggagatctcgcagaagaacatcaagaggcacaagattctcgatataggtctcgcatacattaaccacttggtcgagaggggcgactacgatatagctgccagaaagtgtcagaagatcctcggcaaaaatgctgccctctgggagtacgaagtgtataagtttaaggaaatcgggcagctgaaagcaatttccccatacctccctagaggagacccggttcttaagccccttatttatgaaatgattctacatgagttcctcgagtctgattacgagggcttcgccaccctgataagagaatggcccggcgacctgtacaacaactctgtgattgtgcaggccgtcagagatcatctcaaaaaagatagccagaacaagacattgctgaaaacgctggctgagctgtatacatacgataagaattacgggaacgccttagagatctatctaaccctgagacacaaggacgtgttccaactgattcacaaacacaacctattctcttcaattaaagacaaaatcgtgctgctaatggacttcgattccgaaaaagctgttgacatgctgctagataacgaggacaaaattagcatcaagaaggtggtggaggaacttgaagacagaccggaattacaacacgtatatcttcataaattgttcaagcgagatcaccacaagggacagagataccatgagaagcagatctctctatacgccgaatatgatcgcccaaatttacttcctttcctgagggattctacacactgcccactcgagaaggcattagaaatctgccagcagagaaacttcgtggaagagaccgtgtacctactgtccaggatgggcaatagtcggagcgctctgaagatgatcatggaagagcttcacgatgtcgacaaagcaatcgaatttgccaaggaacaggatgacggtgagctttgggaagatctcatcctgtacagtatagataaaccgcctttcatcacaggactcctgaataatattggtacacacgtggaccccatcttgttaatacaccgcatcaaggaagggatggagatccccaacttgagggatagcctggtgaaaatcctacaagattacaatttgcagatcttgctcagggaagggtgcaagaagatcctggtcgcggattccctgtctctgctaaagaagatgcaccgcacacagatgaaaggcgtcttggtggacgaggagaatatttgcgaaagttgtctctccccaatcctccctagcgatgcagccaaaccgttttcagtggttgtcttccattgcaggcacatgttccacaaagagtgtcttcccatgccttcaatgaacagtgccgcgcaattttgtaacatatgttccgccaaaaatcgcgggcccggtagtgccattctggagatgaagaagtag

SEQ ID NO: 232276 - DNA, 2490 bp, Artificial Sequence
  derived and/or modified sequence
atggccgaggccgaggagcaggagaccggcagcctggaggagagcacagatgaaagtgaggaggaggagagcgaggaggagcccaagctgaagtatgaaaggctgagcaatggagtgacagagatcctgcagaaggatgctgccagctgcatgacagtgcatgacaagttcctggccctgggcacccactacggcaaggtgtacctgctggatgtgcagggcaacatcacccagaagtttgatgtggtgcaggtgtttggcctgtacagcggggaggagttccacgagacctttgactgccccatcaagatcatcgctgtgcacccccactttgtgcgcagcagctgcaagcagtttgtgactggaggcaagaagctgctgctgtttgagaggtcctggatgaaccgctggaagtctgctgtgctgcatgaaggagagggcaacatccgctctgtgaagtggaggggccacctgattgcctgggccaacaacatgggcgtgaagatctttgacatcatcagcaagcagaggatcaccaacgtgcccagagatgacatcagcctgcggccagacatgtacccctgcagcctgtgctggaaggacaacgtgaccctcatcatcggctggggcacctctgtgaaggtgtgcagcgtgaaggagagacatgccagcgagatgagggacctgcccagccgctacgtggagatcgtgtcccagtttgaaacagagttctacatcagcggcctggcccccctgtgtgaccagctggtggtgctgtcctatgtgaaggagatcagcgagaagacagagcgggagtactgtgcccggccccggctggacatcatccagcccctgtctgagacctgtgaggagatcagcagtgatgccctgactgtgcggggcttccaggagaatgaatgtcgggactaccacctggagtacagcgagggggagagcctcttctacatcgtgagccccagagatgtggtggtggccaaggagcgggaccaggatgaccacatcgactggctgctggagaagaagaagtatgaggaggccctgatggctgctgagatcagccagaagaacatcaagaggcacaagatcctggacatcggcctggcctacatcaaccacctggtggagcggggggactatgacattgctgccaggaagtgccagaagatcctgggcaagaatgctgccctgtgggagtatgaggtgtacaagttcaaggagatcggccagctgaaggccatcagcccctacctgcccaggggggaccctgtgctgaagcccctcatctatgagatgatcctgcacgagttcctggagagtgactatgagggctttgccaccctcatccgggagtggccaggggacctgtacaacaacagcgtcatcgtgcaggccgtgcgggaccacctgaagaaggacagccagaacaagaccctgctgaagaccctggccgagctgtacacctatgacaagaactatggaaatgccctggagatctacctgaccctgcggcacaaggatgtgttccagctgatccacaagcacaacctcttcagcagcatcaaggacaagatcgtgctgctgatggactttgattctgagaaggctgtggacatgctgctggacaatgaagacaagatcagcatcaagaaggtggtggaggagctggaggacaggcctgagctgcagcacgtgtacctgcacaagctgttcaagagggaccaccacaagggccagcgctaccacgagaagcagatcagcctgtatgcagaatatgaccggcccaacctgctgcccttcctgcgggacagcacccactgccccctggagaaggccctggagatctgccagcagaggaactttgtggaggagaccgtgtacctgctgagcaggatgggcaacagccgcagcgccctgaagatgatcatggaggagctgcatgatgtggacaaggccattgaatttgccaaggagcaggatgatggagagctgtgggaggacctgatcctgtacagcattgacaagccacccttcatcaccggcctgctgaacaacatcggcacccacgtggaccccatcctgctgatccaccgcatcaaggagggcatggagatccccaacctgcgggacagcctggtgaagatcctgcaggactacaacctgcagatcctgctgcgggagggctgcaagaagatcctggtggccgacagcctgagcctgctgaagaagatgcacaggacccagatgaagggcgtgctggtggatgaggagaacatctgtgagagctgcctgagccccatcctgcccagtgatgctgccaagcccttctctgtggtggtgttccactgccgccacatgttccacaaggagtgcctgcccatgcccagcatgaacagcgctgcccagttctgcaacatctgcagcgccaagaacagaggccctggcagcgccatcctggagatgaagaagtag

SEQ ID NO: 232277 - DNA, 2490 bp, Artificial Sequence
  derived and/or modified sequence
atggccgaggccgaggagcaggagaccggcagcctggaggagagcaccgatgagagtgaggaagaggagtctgaagaagagcccaaattaaagtacgagcgtctatcaaacggggtcaccgagattttgcagaaggacgccgcttcatgcatgactgtacatgacaagttcttggccctgggaactcactacggaaaggtgtatctgctggatgtgcaaggaaacattacccagaagttcgatgtcgttcaggtgttcggtctgtattcaggagaggagttccatgaaacctttgattgtcctatcaagattattgctgttcatcctcattttgttagaagttcatgcaaacagttcgtcacaggtgggaaaaaattgctactgtttgagcggtcctggatgaaccggtggaagtcagcagtcctccacgagggagagggtaatattcgctctgtcaagtggagaggccacttaattgcatgggccaacaacatgggggtaaagattttcgacatcatcagcaagcaacggatcacaaacgtgcccagagatgacatcagtctgcgaccagacatgtacccttgttccctgtgctggaaggataacgtgaccttgataattggctggggaacaagtgttaaggtgtgcagcgtgaaagaacgccatgccagtgagatgagggacctgccaagtcggtacgtcgaaatcgttagccaatttgagactgaattctacatttcaggcttggctcccttgtgtgatcaactggtagtgctgtcctacgtcaaggagattagtgaaaaaaccgaacgagagtattgcgctagacctagacttgatatcattcagcctcttagtgagacatgtgaggagatcagttctgatgcactaactgtgcgcggctttcaggagaatgaatgtagagattatcacctggagtattcagaaggggaaagcctcttttatattgtgtctccacgggatgtcgtggttgcaaaagaacgggatcaggacgaccacattgattggctgctggaaaagaagaagtatgaggaagcactcatggcggcggagatctcccagaagaacattaagcgccacaaaatcctggatatcggcctggcatatataaaccacctggtggaacgaggagactacgatatcgcagctaggaagtgccagaaaatattaggaaaaaatgccgccctctgggagtacgaggtatataagttcaaggaaatagggcagctgaaagcaatctccccttatctgccgcgcggagaccccgtgctcaaaccattgatctatgaaatgatactgcacgagttcctagagtcagattatgaaggttttgctaccctgattcgagagtggccaggcgacctgtacaacaattccgtcatcgtgcaagccgttagagaccaccttaagaaagattcacaaaacaaaaccttgctcaaaaccttggccgaactgtacacatatgataagaattacgggaatgccttggaaatctatctaaccctgagacacaaggatgtgttccagctcattcacaaacataacttgttctccagcataaaagacaaaatcgtgctgctgatggactttgactctgagaaagcagtggacatgctgctcgataatgaggacaaaatttcaatcaagaaggtcgttgaggagcttgaggatcggcccgaactccaacatgtttatctgcataagctgtttaagcgtgaccaccacaaagggcaacgctaccatgagaaacagatttctttatatgcagaatacgatcggcctaacctgctgccttttctgcgcgatagcactcactgtcccctagaaaaagcactggagatctgtcaacagcgaaatttcgtggaggagacagtctatctgctcagcagaatgggaaatagcagaagcgccctgaagatgattatggaagaactgcacgacgtggacaaagccattgaattcgccaaggagcaggacgatggcgagctatgggaagacctcatcctctatagtatcgataaaccgcctttcatcacaggactactgaataatataggcactcacgtcgaccccatcctgctgattcaccgcattaaagagggaatggagattcccaacctccgggattccttggtaaaaattttacaagactacaatcttcagatactcttgcgagagggctgtaaaaaaatcctagttgcggattctcttagtcttctgaaaaagatgcatcgcactcagatgaaaggggtgctggtggatgaagagaatatctgtgagagttgtttgtcccccatactcccaagtgacgccgctaagccattcagcgttgtggtgtttcactgtcgtcatatgttccacaaagaatgtctgcccatgcccagcatgaactccgccgcccagttctgcaatatttgcagtgccaagaatcggggaccaggtagtgccattttagaaatgaagaaatag

SEQ ID NO: 232278 - DNA, 2490 bp, Artificial Sequence
  derived and/or modified sequence
atggctgaggcggaggaacaggagaccgggtccttggaggagtcaaccgacgagagcgaggaggaggaatctgaggaagagccgaaactcaagtacgagaggctgtccaatggtgttacagaaatattgcaaaaggatgccgcatcgtgtatgaccgttcatgacaagttcttagctctagggacgcattacgggaaggtgtatctgcttgatgtccaggggaacatcacacagaaatttgatgtagtgcaggtatttgggctgtatagtggagaggagttccacgaaactttcgactgccccatcaaaattatagcagttcacccacacttcgtcaggtctagctgcaagcagttcgttacaggtgggaagaagcttttgctgtttgaacgctcctggatgaatagatggaagtccgcggtactacatgagggggagggtaatatcagatctgtgaagtggcgcggacacttaattgcctgggcaaacaatatgggcgtgaaaatcttcgacatcatttcaaagcaaagaatcacaaacgttcctagagatgacatctcattgcgcccagacatgtacccttgcagtctgtgctggaaagacaacgtgaccttgattattggctgggggaccagtgttaaagtgtgttcagtgaaggagcgccacgcctcggagatgcgagacctccccagccgatacgtggagattgttagccagttcgagaccgagttctacatcagcgggctagctccgctttgcgatcagctggttgtgttgtcttatgtaaaagaaataagcgagaaaacagaaagagaatattgcgctcgtcctcggctggatattatccagcccctgtccgagacctgtgaggagatctctagtgacgctcttactgtgcgcggattccaggaaaatgagtgccgggattaccaccttgaatactcggagggcgagtccttattctatattgtgagtccaagggacgtcgtcgtcgccaaggagcgcgaccaggacgaccatattgactggcttttggaaaagaaaaagtatgaggaggcactgatggcagcggagatatcccagaagaacataaaaaggcacaaaatcctggatatcgggttggcctacataaatcacttggtggagaggggagattacgacatagccgctcggaagtgccaaaagattctgggcaagaacgcagcactgtgggagtatgaggtttacaaatttaaagaaatcggccagctcaaggcaattagcccttatctgccccgtggagaccccgtgctgaaaccactcatctatgagatgatactgcatgaatttttagagtccgactatgaaggctttgccaccctcattcgggagtggcctggggatctctacaacaatagcgtgatcgtgcaagcagtcagagatcacctcaaaaaggactcccaaaacaaaacactccttaagactcttgccgaactttatacatatgataaaaactacggcaatgcgttggagatttacctgacactgagacataaggacgtgttccagctgatccataaacacaacctcttcagttccataaaggacaagattgtgcttttgatggactttgatagtgaaaaagccgttgacatgcttctggacaatgaagataagatctccattaaaaaggtcgtcgaggagctggaagataggcctgagttacaacatgtctatctgcacaagctattcaagagggaccaccataaagggcagagatatcacgaaaagcagatctctttgtacgctgaatacgataggcctaatctactgccgtttttgagggactcaactcattgccccctggagaaagccctggaaatttgtcagcaacgcaatttcgtagaagagaccgtgtatctcctctcccggatgggtaactcaaggagcgctctgaaaatgatcatggaagaactgcatgatgtggataaggccatcgaattcgccaaagaacaggatgacggagagctatgggaagacctgattttatactccattgataagccaccattcattaccgggctcttgaacaatattggaactcatgttgacccgattctcctgattcatagaatcaaggagggtatggaaatcccaaatctcagggactcactggtcaaaattttgcaggactataatctccagatcctcctgcgcgaagggtgtaaaaaaatcctggtggccgactccctgagtttactcaagaaaatgcaccgcacccagatgaaaggcgtcctggtggatgaggagaacatctgtgagtcatgtctgagcccaatcctgccctcagatgcagcaaagccttttagtgttgtggttttccactgcagacacatgttccacaaggaatgtcttcccatgccatctatgaacagcgctgcccagttttgcaacatttgctctgcgaagaacagaggacccggatctgcgatcctggagatgaaaaagtag

SEQ ID NO: 232279 - DNA, 3181 bp, Artificial Sequence
  derived and/or modified sequence
atggcggaagcagaggagcaggaaactgggtcccttgaagaatctacagatgagtctgaggaagaagagagcgaagaggaacccaagctgaagtatgaaaggctttccaatggggtaactgaaatacttcagaaggatgcagctagctgcatgacagtccatgacaagtttttggcattgggcacacattatggcaaggtttatttacttgatgtccaggggaacatcactcagaagtttgatgtagtgcaggtatttggactgtattctggagaagaatttcacgagacttttgactgtcccattaaaattattgctgtgcacccacatttcgtgagatccagttgcaagcagtttgtgaccggagggaagaagctgctactgtttgaacggtcttggatgaacagatggaagtctgctgttctgcatgaaggggaagggaacataaggagtgtgaagtggagaggccatctgattgcttgggccaataatatgggtgtgaagatttttgacatcatctcaaagcaaagaatcaccaatgtgccccgggatgatataagtcttcgcccagacatgtatccctgcagcctctgctggaaggacaatgtgacactgattattggctgggggacttctgtcaaggtgtgctcagtgaaggaacggcatgccagtgaaatgagggatttgccaagtcgatatgttgaaatagtgtctcagtttgaaactgaattctacatcagtggacttgcacctctctgtgatcagcttgttgtactttcgtatgtaaaggagatttcagaaaaaacggaaagagaatactgtgccaggcctagactggacatcatccagccactttctgagacttgtgaagagatctcttctgatgctttgacagtcagaggctttcaggagaatgaatgtagagattatcatttagaatactctgaaggggaatcacttttttacatcgtgagtccgagagatgttgtagtggccaaggaacgagaccaagatgatcacattgactggctccttgaaaagaagaaatatgaagaagcattgatggcagctgaaattagccaaaaaaatattaaaagacataagattctggatattggcttggcatatataaatcacctggtggagagaggagactatgacatagcagcacgcaaatgccagaaaattcttgggaaaaatgcagcactctgggaatatgaagtttataaatttaaagaaattggacagcttaaggctattagtccttatttgccaagaggtgatccagttctgaaaccactcatctatgaaatgatcttacatgaatttttggagagtgattatgagggttttgccacattgatccgagaatggcctggagatctgtataataattcagtcatagttcaagcagttcgggatcatttgaagaaagatagtcagaacaagactttacttaaaaccctggcagaattgtacacctatgacaagaactatggcaatgctctggaaatatacttaacattaagacataaagacgtttttcagttgatccacaagcataatcttttcagttctatcaaggataaaattgttttattaatggattttgattcagagaaagctgttgacatgcttttggacaatgaagataaaatttcaattaaaaaggtagtggaagaattggaagacagaccagagctacagcatgtgtatttgcataagcttttcaagagagaccaccataaggggcagcgttaccatgaaaaacagatcagtctttatgctgaatatgatcgaccaaacttacttccctttctccgagacagtacccattgcccacttgaaaaggctcttgagatctgtcaacagagaaactttgtagaagagacagtttatcttctgagccgaatgggtaatagccgaagtgccctgaagatgattatggaggaattacatgatgttgataaagcaatcgaatttgccaaggagcaagatgatggagagctgtgggaagatttgattttatattccattgacaaaccaccatttattactggcttgttaaacaacattggcacacatgttgacccaattctactgattcaccgtattaaggaaggaatggagatccccaatttgagagattccttggttaaaattctgcaagactacaatttgcaaattctgcttcgtgaaggctgcaagaagattctcgtagctgactctttgtccttactgaagaaaatgcaccgaactcaaatgaaaggtgttcttgttgatgaggagaacatctgtgagtcgtgcctttcccctattcttccatcagatgcagctaagcccttcagcgtggtggtcttccattgccggcacatgttccacaaggagtgcctgcccatgcccagcatgaactctgctgcacagttctgcaacatctgcagtgctaagaaccgtggaccaggaagtgcaattttggagatgaaaaaatagctcatttctccttgtcagtctccttgtcaccactctttttgagactgtttttgcaacaacaaaagcatttgttgacactcgtgctgttaagagatttgtttatgtttatattatactcaaaaacaatttcttcatctattcctgtactaatggtttctctttgcagttcacagagaatttggggctctcttcatgccttgaaattttggggtccatagtgaatattttgttatttatttgtttggctcattctttatatagtaatggaaacataagtctaggagttagaaatgaattttttagaccttagtaaaaccatttaaccataaaatggacaactgagaattctcccagctgcctgaaagcgtcgccaactgtggttatcctgcaagctgctacctgcaacttggacgttgtttccacgtgctctgctggctacgattcttgcattctgggtttggcttttttctgtgtcatcaactatggttatcctctaaataggcatttaatgaaacattgtacaaattgtcactcatttgatgacacctgggaataacattagcaggctgatgtcctgcaccattatgtttactaatcacatgttctgtgtgctgtgacgactgtcaaagagtatctggccatggcggacactcagcatttgttgattgaataaatgttagctcttctcatt

SEQ ID NO: 232280 - protein, 483 aa, Artificial Sequence
  derived and/or modified sequence
MKEEKEHRPKEKRVTLLTPAGATGSGGGTSGDSSKGEDKQDRNKEKKEALSKVVIRRLPPTLTKEQLQEHLQPMPEHDYFEFFSNDTSLYPHMYARAYINFKNQEDIILFRDRFDGYVFLDNKGQEYPAIVEFAPFQKAAKKKTKKRDTKVGTIDDDPEYRKFLESYATDNEKMTSTPETLLEEIEAKNRELIAKKTTPLLSFLKNKQRMREEKREERRRREIERKRQREEERRKWKEEEKRKRKDIEKLKKIDRIPERDKLKDEPKIKVHRFLLQAVNQKNLLKKPEKGDEKELDKREKAKKLDKENLSDERASGQSCTLPKRSDSELKDEKPKRPEDESGRDYREREREYERDQERILRERERLKRQEEERRRQKERYEKEKTFKRKEEEMKKEKDTLRDKGKKAESTESIGSSEKTEKKEEVVKRDRIRNKDRPAMQLYQPGARSRNRLCPPDDSTKSGDSAAERKQESGISHRKEGGEE

SEQ ID NO: 232281 - DNA, 1452 bp, Artificial Sequence
  derived and/or modified sequence
atgaaggaggagaaggagcacagacccaaggagaagagagtgaccctgctgacccccgccggcgccaccggcagcggcggcggcaccagcggcgacagcagcaagggcgaggacaagcaggacagaaacaaggagaagaaggaggccctgagcaaggtggtgatcagaagactgccccccaccctgaccaaggagcagctgcaggagcacctgcagcccatgcccgagcacgactacttcgagttcttcagcaacgacaccagcctgtacccccacatgtacgccagagcctacatcaacttcaagaaccaggaggacatcatcctgttcagagacagattcgacggctacgtgttcctggacaacaagggccaggagtaccccgccatcgtggagttcgcccccttccagaaggccgccaagaagaagaccaagaagagagacaccaaggtgggcaccatcgacgacgaccccgagtacagaaagttcctggagagctacgccaccgacaacgagaagatgaccagcacccccgagaccctgctggaggagatcgaggccaagaacagagagctgatcgccaagaagaccacccccctgctgagcttcctgaagaacaagcagagaatgagagaggagaagagagaggagagaagaagaagagagatcgagagaaagagacagagagaggaggagagaagaaagtggaaggaggaggagaagagaaagagaaaggacatcgagaagctgaagaagatcgacagaatccccgagagagacaagctgaaggacgagcccaagatcaaggtgcacagattcctgctgcaggccgtgaaccagaagaacctgctgaagaagcccgagaagggcgacgagaaggagctggacaagagagagaaggccaagaagctggacaaggagaacctgagcgacgagagagccagcggccagagctgcaccctgcccaagagaagcgacagcgagctgaaggacgagaagcccaagagacccgaggacgagagcggcagagactacagagagagagagagagagtacgagagagaccaggagagaatcctgagagagagagagagactgaagagacaggaggaggagagaagaagacagaaggagagatacgagaaggagaagaccttcaagagaaaggaggaggagatgaagaaggagaaggacaccctgagagacaagggcaagaaggccgagagcaccgagagcatcggcagcagcgagaagaccgagaagaaggaggaggtggtgaagagagacagaatcagaaacaaggacagacccgccatgcagctgtaccagcccggcgccagaagcagaaacagactgtgcccccccgacgacagcaccaagagcggcgacagcgccgccgagagaaagcaggagagcggcatcagccacagaaaggagggcggcgaggagtag

SEQ ID NO: 232282 - DNA, 1452 bp, Artificial Sequence
  derived and/or modified sequence
atgaaagaagaaaaggagcataggccaaaggagaaaagggtaaccctgctgaccccggcgggggctactgggtctggcggtgggacaagtggagattctagtaagggggaagataaacaagacagaaataaagagaagaaggaagcattgagcaaggtcgtcatccgccggttgccaccaaccctcaccaaggaacagctacaggaacacctgcagcctatgcccgagcacgattacttcgaattcttttctaacgatacatctctgtacccacatatgtacgcacgcgcttatatcaactttaagaaccaggaggatataattttattcagggaccgatttgacggttacgtctttctggataacaagggccaggagtacccagcaattgtggagttcgctcctttccagaaagccgccaaaaagaaaacgaaaaaacgcgacacgaaagtgggaaccatagatgatgaccctgagtaccgcaaatttctggaatcatacgccactgacaacgagaagatgaccagtaccccagaaacactgctcgaagaaatcgaagccaaaaaccgtgagttgatcgcaaagaaaaccacccctcttctgagttttttgaagaacaagcaaagaatgcgtgaggagaagcgggaagagcgccggcgccgagaaatcgaacggaagagacagagagaggaagagagacgtaagtggaaggaagaagaaaagagaaaaagaaaagacatcgagaaactcaaaaagatagatcgcattcccgagagagataaattgaaagatgaaccgaagataaaagtgcacagatttctgctgcaggcagtgaatcaaaagaacttattaaagaaacccgaaaagggggacgagaaagaattggacaaaagagaaaaggccaagaagcttgacaaggaaaatctgtcggacgaacgggcctctggtcaatcgtgtactctccctaagcgctcagacagtgagctgaaggacgaaaaacctaagcggcccgaggacgaatctggcagagattatagagaacgggagcgcgaatacgagcgtgatcaggagcgcatactccgtgaacgagagaggctaaagagacaggaggaagagcggagaagacagaaggaacgctacgagaaggaaaaaaccttcaagcgtaaggaggaggagatgaagaaggaaaaagacactctcagggacaagggcaaaaaagcagaatctacagagtccatcggatctagcgagaaaactgaaaagaaggaggaggtggtcaagagagaccgtatccgcaacaaagatcggcccgccatgcagctttaccaaccaggggcccgctctaggaacaggctttgtcctcctgatgacagtaccaaaagtggagatagcgctgccgaacggaagcaggaatccgggatttcccatcggaaagagggtggggaggagtag

SEQ ID NO: 232283 - DNA, 1452 bp, Artificial Sequence
  derived and/or modified sequence
atgaaggaggagaaggagcaccggcccaaggagaagagggtgaccctgctgaccccagctggggccactggaagtggcggcggcaccagcggggacagcagcaaaggagaggacaagcaggacaggaacaaggagaagaaggaggccctgagcaaggtggtgatccggcggctgccccccaccctgaccaaggagcagctgcaggagcacctgcagcccatgcctgagcatgactactttgagttcttcagcaatgacaccagcctgtacccccacatgtatgcccgggcctacatcaacttcaagaaccaggaggacatcatcctcttccgggacagatttgatggctacgtgttcctggacaacaagggccaggagtacccagccatcgtggagtttgcccccttccagaaggccgccaagaagaagaccaagaagagggacaccaaggtgggcaccattgatgatgatcctgagtacaggaagttcctggagagctatgccacagacaatgagaagatgaccagcaccccagagaccctgctggaggagattgaggccaagaaccgggagctgattgccaagaagaccacccccctgctgtccttcctgaagaacaagcagaggatgagggaggagaagcgggaggagaggagaagaagagaaattgaaaggaagaggcagcgggaggaggagaggaggaagtggaaggaggaggagaagaggaagaggaaggacatcgagaagctgaagaagattgaccgcatccctgagcgggacaagctgaaggatgagcccaagatcaaggtgcaccgcttcctgctgcaggccgtgaaccagaagaacctgctgaagaagccagagaagggagatgagaaggagctggacaagcgggagaaggccaagaagctggacaaggagaacctgagtgatgagcgggccagcggccagagctgcaccctgcccaagagaagtgacagcgagctgaaggatgagaagcccaagaggccagaagatgaaagtggccgggactaccgggagcgggagcgggagtatgaaagagaccaggagcgcatcctgcgggagcgggagcggctgaagaggcaggaggaggagcggcggcggcagaaggagagatatgagaaggagaagaccttcaagaggaaggaggaggagatgaagaaggagaaggacaccctgcgggacaagggcaagaaggccgagagcacagagagcatcggcagcagcgagaagacagagaagaaggaggaggtggtgaagagggaccgcatccggaacaaggacaggcctgccatgcagctgtaccagcccggggcccggagcaggaaccggctgtgccccccagatgacagcaccaagagcggggacagcgctgctgagaggaagcaggagagcggcatcagccacaggaaggagggcggggaggagtag

SEQ ID NO: 232284 - DNA, 1452 bp, Artificial Sequence
  derived and/or modified sequence
atgaaggaggagaaggagcaccggcccaaggagaagcgggtgaccctcctgacccccgctggggccacaggaagcggtggaggaactagtggagactcatcgaagggcgaagataaacaggataggaacaaagagaagaaggaggcgctatcgaaggtcgtaattcggcgattgccaccgacactgactaaagagcagctccaggagcatctgcagcctatgccggagcatgactacttcgaattttttagtaacgacacatccttatatcctcatatgtacgcaagagcttacatcaatttcaaaaaccaggaggacattatactgtttagagaccggtttgacggttatgtttttttggataataagggccaggagtacccagctattgttgaatttgcgccctttcagaaggcagcaaaaaagaaaacaaaaaagcgagatactaaggtgggcaccatagacgacgaccccgaatatcgaaaatttctggaatcatacgccaccgataacgaaaagatgaccagtactcctgagacactgctggaagagatagaggctaagaacagagagcttatcgcaaaaaaaactacccctttgctctcctttctcaagaataaacagcgcatgagagaggagaagagggaggagagaaggagacgagaaatcgaacggaaacggcagagggaagaagagcgaaggaaatggaaagaggaagaaaaacgcaaaagaaaagacattgaaaaactgaaaaagatcgatcgcattccagagcgagacaagctgaaggacgagccaaagataaaggtccaccggttcctgctgcaggctgtgaaccagaagaacctgctcaagaagcctgaaaagggagatgagaaggagctggataagcgcgaaaaggcgaaaaaactggacaaggaaaatttatcagacgaacgtgcgtcaggccagagctgtacacttccaaaacggtccgattcagagctgaaggacgaaaagccaaagagaccagaggacgaatccgggagggactatcgcgaacgtgaaagagaatacgagagggatcaggagagaatactaagagaaagagagcgactgaagagacaggaagaagaacgcaggagacagaaggagagatatgagaaagaaaagactttcaagcgcaaggaagaagaaatgaagaaagaaaaggatactctccgcgataagggcaagaaggcggaaagcacggaatctatcggcagcagcgaaaagactgaaaagaaggaggaggtagtcaaacgggaccggatcaggaacaaagaccggccagctatgcagttgtatcagcctggagctaggagtcggaaccggctgtgtccaccagacgactctaccaaaagcggagattctgctgcagaacgcaaacaggaaagcggaataagccatcggaaagaaggcggggaggagtag

SEQ ID NO: 232285 - DNA, 1452 bp, Artificial Sequence
  derived and/or modified sequence
atgaaggaagaaaaagagcatcgccctaaggaaaagagagttactctcctgacgccagctggggctaccggatcaggtggcggaacatcaggggattcatccaaaggcgaggacaagcaagatcgaaacaaagagaaaaaagaggcgctgtccaaagtagtcattcggagattaccgccaacgcttaccaaagaacagttgcaagaacacttgcagccaatgccagagcacgactattttgagttcttcagcaacgacacatcactctaccctcacatgtatgcgcgtgcatacataaatttcaaaaatcaggaggacattatcctcttcagagaccggtttgacggatatgtattccttgataataaaggccaagaatacccagcaatcgttgaattcgctcccttccagaaagctgccaagaaaaaaaccaagaaacgagacactaaagtcggtaccatagatgatgacccagaatacaggaaattcctagagtcttacgctaccgataatgaaaaaatgacttcaactccagaaaccctgctggaagaaattgaagcgaagaaccgagaattaatcgcaaagaagacaactcctctgcttagcttcctgaaaaacaaacaacgcatgcgcgaggaaaaacgtgaggaacgtagaagacgggaaatcgaacgcaagcggcaacgggaggaggaaaggcgaaagtggaaagaggaggaaaagcgaaaacgaaaagatattgagaagctcaaaaaaatcgaccggatcccagagcgggacaagctgaaagatgagcctaagattaaggtacaccgcttcttgttacaagcagtgaatcagaagaacttactgaaaaagccggagaaaggcgatgagaaagagctcgacaagcgggagaaagcgaagaaattggacaaagaaaacttgagcgatgaaagggcctctggtcagtcctgtacactgcccaagagatctgattcagaactcaaagatgaaaaacctaagcgcccagaggacgagtccggcagagactacagagagagggagcgtgagtatgagcgtgatcaagagcgcatcctgcgggagcgagagcgactgaagcgtcaagaggaggaacggaggcgtcaaaaggaacgttacgagaaagagaagacctttaagcggaaagaggaagaaatgaaaaaggagaaggacaccctgcgagacaaaggaaagaaagcagagtccaccgagagtatcggcagttccgagaagacagagaaaaaagaggaggtggttaagagagataggatcaggaataaagaccgccctgcaatgcagctctatcagcctggcgcaaggagccgcaatcgcctgtgcccccctgacgattccacaaaatcaggcgacagcgccgctgagcgtaagcaagaaagtggaatatcccacagaaaagagggcggagaggagtag

SEQ ID NO: 232286 - DNA, 2378 bp, Artificial Sequence
  derived and/or modified sequence
gcttcccgggagccgtttgtgcccggggtaaccccgttccggccaagccgcttcagcgggggacgtagccatgaaggaagagaaggagcacaggcctaaggagaagcgagtaaccctgttaacccccgccggggccacaggcagcggtggtgggacctcgggggacagctccaagggggaagataagcaggatcgcaacaaggagaagaaagaagcgctgagcaaggtggtaattcgaagattacctcccactttgaccaaggagcagcttcaggaacatcttcaacctatgcctgagcatgattattttgagtttttttctaatgatacgagtttgtatcctcatatgtatgccagagcatacatcaactttaaaaaccaagaggacattattttgttcagggatcgctttgatggttatgtattccttgacaataaaggtcaggaatatcccgctatagtagaatttgcaccttttcaaaaagctgcaaaaaagaagactaagaaaagagataccaaagtcgggactatcgatgatgatccagaatatagaaagtttttggaaagttatgccacagataatgagaaaatgacatctactccagagacactgctagaggaaatagaagcaaaaaatagagaattaatagctaaaaagacaaccccacttttgagcttcctgaaaaacaagcagagaatgagagaagaaaagagagaagaaaggaggaggagagaaatagaaagaaaaagacaaagagaagaagagaggaggaaatggaaagaagaagagaaacgaaaaaggaaagatatagaaaagctaaagaagatagacagaattccagaaagggacaaattaaaggatgaaccaaagattaaggtacacaggtttctgttacaagctgtgaatcagaaaaatctgctcaagaagccagaaaaaggagatgaaaaagaattggacaaaagagaaaaagccaagaaattggacaaagagaatctcagtgatgaaagagccagtgggcaaagttgtacattgcccaagcgttctgatagcgaacttaaagatgaaaaaccaaagagacctgaagatgagagcggcagagactatagggagagggaacgggaatatgaacgagatcaggagcgcatacttcgagaaagagagaggctgaagcggcaagaagaagagcgccgtaggcagaaggagcgctatgagaaagagaagacttttaagagaaaagaagaagaaatgaaaaaagagaaagacacacttcgggataaaggaaagaaggctgaaagtacagaatcaataggcagctcagaaaaaactgaaaagaaagaagaagtggtcaagagagatcgaataagaaacaaggatcgtccagcgatgcagctttaccaaccaggagctcgaagccgaaatcgactctgtccccctgatgacagcaccaagtctggagattcagcagcagaaaggaagcaggaaagtggtattagccatagaaaagaaggaggagaggagtgataagtccagatggccttaggtgtcctgactgtctaggcagccaaagagcacacgttaagcaatccagaggtgccttcagggcaaagaatagagagaaagggagccgctgtgctggtggggtacactgcagaggagtaagtcttgtgtcaaagcaggaatctgatcagaggttcagaattggaagtacaatttcattgcttttgcaatttctacaaattaattttaaagtgtcagaaaaaggtgacggcaaggacatgcattgcaatttgcagggggaattgtcaagtgaggacttcatcacatatgacacgagagaaaagtaagagctggttctaaaatcaaaagctgttgttcatcctgaattgaattttctgaatttgggtggagcagagtcgctttgaagccttgttccgatctaattctattgtattgttgatgataagtgttgacattgggtagtgtagaagcaacaagcatgtccttgtagtacaggtacagtgaaggatagaacacactttcgttgatacaaaaatttaaatagttatgttacttctgtatccagtgtcctaaagttttaggattagttttagttttttgtttgcttatatgagcttagcgtaaagaatatttttaaacttcgtgttttgtcatcagcatcttttctattaagaggtaaaatgtagtccttgtttgactcttgacaatccagtgtgtttgatcttaggtctcatgatctgagtgcataccctctccaggaaggaaactgcaccagtgtctattcctgttaaatagcaacttttagtctcagcttgtttcgttttgatgtcaataaatagtaacagcattcaagtgtgaa

SEQ ID NO: 232287 - protein, 1899 aa, Artificial Sequence
  derived and/or modified sequence
MRSRLPPALAALGAALLLSSIEAEGMECLTRAEADIVLLVDGSWSIGRANFRTVRSFISRIVEVFDIGPKRVQIALAQYSGDPRTEWQLNAHRDKKSLLQAVANLPYKGGNTLTGMALNFIRQQNFRTQAGMRPRARKIGVLITDGKSQDDVEAPSKKLKDEGVELFAIGIKNADEVELKMIATDPDDTHAYNVADFESLSRIVDDLTINLCNSVKGPGDLEAPSNLVISERTHRSFRVSWTPPSDSVDRYKVEYYPVSGGKRQEFYVSRMETSTVLKDLKPETEYVVNVYSVVEDEYSEPLKGTEKTLPVPVVSLNIYDVGPTTMHVQWQPVGGATGYILSYKPVKDTEPTRPKEVRLGPTVNDMQLTDLVPNTEYAVTVQAVLHDLTSEPVTVREVTLPLPRPQDLKLRDVTHSTMNVFWEPVPGKVRKYIVRYKTPEEDVKEVEVDRSETSTSLKDLFSQTLYTVSVSAVHDEGESPPVTAQETTRPVPAPTNLKITEVTSEGFRGTWDHGASDVSLYRITWAPFGSSDKMETILNGDENTLVFENLNPNTIYEVSITAIYPDESESDDLIGSERTLPILTTQAPKSGPRNLQVYNATSNSLTVKWDPASGRVQKYRITYQPSTGEGNEQTTTIGGRQNSVVLQKLKPDTPYTITVSSLYPDGEGGRMTGRGKTKPLNTVRNLRVYDPSTSTLNVRWDHAEGNPRQYKLFYAPAAGGPEELVPIPGNTNYAILRNLQPDTSYTVTVVPVYTEGDGGRTSDTGRTLMRGLARNVQVYNPTPNSLDVRWDPAPGPVLQYRVVYSPVDGTRPSESIVVPGNTRMVHLERLIPDTLYSVNLVALYSDGEGNPSPAQGRTLPRSGPRNLRVFGETTNSLSVAWDHADGPVQQYRIIYSPTVGDPIDEYTTVPGRRNNVILQPLQPDTPYKITVIAVYEDGDGGHLTGNGRTVGLLPPQNIHISDEWYTRFRVSWDPSPSPVLGYKIVYKPVGSNEPMEAFVGEMTSYTLHNLNPSTTYDVNVYAQYDSGLSVPLTDQGTTLYLNVTDLKTYQIGWDTFCVKWSPHRAATSYRLKLSPADGTRGQEITVRGSETSHCFTGLSPDTDYGVTVFVQTPNLEGPGVSVKEHTTVKPTEAPTEPPTPPPPPTIPPARDVCKGAKADIVFLTDASWSIGDDNFNKVVKFIFNTVGGFDEISPAGIQVSFVQYSDEVKSEFKLNTYNDKALALGALQNIRYRGGNTRTGKALTFIKEKVLTWESGMRKNVPKVLVVVTDGRSQDEVKKAALVIQQSGFSVFVVGVADVDYNELANIASKPSERHVFIVDDFESFEKIEDNLITFVCETATSSCPLIYLDGYTSPGFKMLEAYNLTEKNFASVQGVSLESGSFPSYSAYRIQKNAFVNQPTADLHPNGLPPSYTIILLFRLLPETPSDPFAIWQITDRDYKPQVGVIADPSSKTLSFFNKDTRGEVQTVTFDTEEVKTLFYGSFHKVHIVVTSKSVKIYIDCYEIIEKDIKEAGNITTDGYEILGKLLKGERKSAAFQIQSFDIVCSPVWTSRDRCCDIPSRRDEGKCPAFPNSCTCTQDSVGPPGPPGPAGGPGAKGPRGERGISGAIGPPGPRGDIGPPGPQGPPGPQGPNGLSIPGEQGRQGMKGDAGEPGLPGRTGTPGLPGPPGPMGPPGDRGFTGKDGAMGPRGPPGPPGSPGSPGVTGPSGKPGKPGDHGRPGPSGLKGEKGDRGDIASQNMMRAVARQVCEQLISGQMNRFNQMLNQIPNDYQSSRNQPGPPGPPGPPGSAGARGEPGPGGRPGFPGTPGMQGPPGERGLPGEKGERGTGSSGPRGLPGPPGPQGESRTGPPGSTGSRGPPGPPGRPGNSGIRGPPGPPGYCDSSQCASIPYNGQGYPGSG

SEQ ID NO: 232288 - DNA, 5886 bp, Artificial Sequence
  derived and/or modified sequence
caccgagcaccagcttctccgacgccgggaagccgctgtcgccgccgctacctctccctgttgccgccgcctcagatctcttcatgccgctgtaagctcggaggccaaggatgcggagtaggcttcccccagcgcttgccgccctgggcgcggccctgctcctgtcttccattgaggcagaagggatggagtgtctcaccagagctgaggcagacattgtgttgctggtggatggatcatggagcatcggccgggcaaattttagaaccgtgaggagtttcatttctcgtattgtggaagtctttgacattggccccaaaagagtacaaattgctcttgctcagtatagtggggatcccagaacagagtggcagttaaatgcacacagagacaagaagagcttgttgcaagctgtggcaaacttgccgtacaaaggaggcaatactctcacaggcatggctttgaatttcattcgccaacagaacttcaggacccaagctggcatgagacctcgagctcgaaaaattggtgtgctcattactgatggaaaatcacaagacgatgttgaagcaccttcaaagaaactcaaggatgagggagtggagctgtttgctattggtattaaaaatgctgatgaagtcgaattaaagatgattgcaactgatcctgatgatacccatgcatacaatgtggcagattttgagtcactctccaggatagtggatgatctcaccattaatttgtgtaacagtgtcaaaggtccaggtgatttggaagcaccttctaacttagttatttctgagcgaacccatcgttcttttagagtgagctggacaccaccttctgacagtgtggatcgatataaggtggaatactatccagtttctggagggaaacgtcaagaattttatgtgagtcgaatggaaactagcacagtgctgaaagatctgaaacctgaaactgaatatgttgtcaatgtgtattctgtggtagaagatgaatatagtgagcctctgaaggggacagaaaaaaccttgccagtgcctgtagtcagcctgaatatttatgatgttggccctaccaccatgcatgtgcagtggcagcctgtgggaggagctactggctacatcttgtcatacaaacctgttaaggacacagagccaacaagacccaaagaggtgcgtttggggccaacagtgaatgacatgcagctgactgaccttgttcccaacacggagtatgcagtcacagtccaggctgtcctgcacgacctcactagtgaacctgtcactgttcgggaagtcaccttgcctttacccagacctcaggatctgaaactcagagatgtgactcacagcactatgaatgtcttttgggaacctgtgcctggaaaagtgcgtaaatatattgttcgatacaaaacaccagaagaggatgtcaaagaggtagaggtggacagatcagagaccagcacttccctcaaagacctcttctcacagaccttgtacacagtcagcgtttctgcagtacatgacgagggggagtctcctccagtgactgctcaagaaactacccgacccgtgccagccccaacaaacttaaagattactgaagtaacatcagagggtttcagagggacttgggatcatggagcttcagatgtgtctctctacagaataacttgggcaccttttggaagctcagataagatggagaccatcttaaatggagatgaaaacactttggtgttcgaaaacctgaaccccaacaccatctatgaagtttccattactgccatctatcctgatgagtcagaaagtgatgacctgattggcagtgagcgcacactgcctatcttaacaacacaagctcccaaaagtggcccacgaaaccttcaagtgtacaatgcaacatctaacagcctgactgttaagtgggatcctgctagtggtcgtgtgcagaaatataggatcacttatcagccttccacaggggaaggcaatgagcaaacgaccacaataggaggacggcagaacagtgtggtcctgcagaaactgaagccagacactccttacactatcaccgtatcctctctgtatcctgatggtgaaggaggtcggatgacgggaagaggcaagaccaaacctctaaacactgtaaggaacctgagagtgtatgacccttctaccagcaccttgaatgtccgctgggaccatgcagagggaaatcctcgtcagtacaagctcttctatgcaccagcagcaggtggtccagaggaactggtaccaatccccgggaataccaattatgccattcttaggaatctgcagccagatacctcatacactgtgactgtagttcccgtttatactgaaggtgatgggggacgcacatcagatactggaaggacattgatgagaggactggcaagaaatgtccaagtatacaatcctacacctaacagcctcgatgttcgctgggaccctgctccaggacctgtgctgcaatatcgcgttgtgtattctcctgtggatggcacaagaccctcagaatctatagtagtgccaggaaacacgcgcatggtgcatctggagcggctgattccggacacactctattccgtgaaccttgtggctctgtactcggatggagagggaaatcccagccctgcccagggccgaacgctaccacgcagtggaccaaggaacctgagagtctttggtgaaacaaccaatagcctctcggtagcctgggatcatgctgatgggccagttcagcagtacaggatcatctattctcccactgttggtgatccaattgatgaatataccacagtcccaggcagaagaaacaatgtaatactgcagcccctgcaacctgacactccatataaaattactgttattgctgtttatgaagatggagatggtggccatctaacaggaaatggaagaactgtgggactccttcctcctcagaacatacacatctctgacgaatggtatacaagattcagggtgtcctgggatccttcaccttctccagttcttggatataaaatagtatataagccagtgggttccaatgagcccatggaagcctttgttggagaaatgacatcatataccttacacaatctcaatcccagcaccacctacgatgtgaatgtttatgctcaatatgattctggactcagtgtccccttgacagatcaaggcactacattatatttaaatgtaacagatctgaaaacttaccagattgggtgggatacattctgtgtcaaatggtcacctcaccgggcagccacctcctacaggctaaaactaagccctgcagatggaacaaggggacaagaaattacagtgcgtggatcagaaaccagtcactgcttcactggcctttcaccagacactgattatggtgtcactgtttttgtgcagacaccaaatctcgagggaccaggagtctctgttaaagaacataccactgtgaaaccaacagaagcccctacagagccacccacacctcctccccctcccaccattccaccagcccgggatgtatgcaaaggggccaaggcagatattgtgttcttgactgatgcctcctggagcattggggacgataattttaacaaagttgtaaaattcatcttcaatactgtgggaggctttgatgaaatcagtcctgctgggattcaggtttcatttgtgcaatacagcgatgaggtcaagtctgagttcaagctgaacacgtacaatgacaaggccctagcccttggggccctccagaatattaggtacagaggaggaaacacaagaacaggcaaggccctcacgtttatcaaggagaaagtcttgacttgggagagcggcatgaggaagaatgtccctaaggtgttggttgtggtcacggacggtcggtcccaggatgaggtcaagaaggcggctttggtcatccagcagtcagggttcagtgtctttgtagttggtgtggctgatgtcgactacaatgagcttgccaacattgccagcaaaccaagtgaacggcacgtgttcattgtggacgactttgaatcttttgagaagatcgaagacaatcttattacatttgtttgtgaaactgccacttcaagttgtcctctcatttatttggatggctacacctcaccaggttttaaaatgcttgaagcatacaacctgacagaaaagaattttgcttctgtacaaggagtatctttggagtcagggtctttccccagctactcagcatacaggattcagaagaatgcgtttgtgaatcagcctacagcagacctacacccaaatggactccctccttcatacacgattatattattattcagacttctcccagaaactcccagtgacccttttgcaatttggcaaatcacagacagagactacaaaccacaagttggagtgattgcagatccttctagcaagacgttatcattctttaacaaggatacaagaggcgaggtgcaaactgttacatttgacacagaagaagtaaagacattattttatggaagttttcacaaggttcatattgtagtgacctcaaaaagtgttaagatttacattgactgctatgaaattatagaaaaagacatcaaggaagctggaaatataacaactgatggttatgaaattcttggaaaactccttaaaggggaaaggaaatcagccgcattccaaatccagagttttgacattgtctgcagtccagtgtggaccagtagagacagatgctgtgatattccctctaggagagatgagggaaaatgccctgcttttccaaattcttgcacatgtacacaggacagcgttggacctccaggacctccaggccctgcaggaggacctggtgctaaaggtcccagaggtgaaagaggtatcagtggggcaattgggccccctggtcctcgtggagacataggtcctccaggcccccagggtcctccaggccctcagggacccaatggactctctattccgggagagcaaggtcgccaagggatgaaaggtgatgctggagagccaggacttccaggccgaacaggaaccccaggattacctggcccaccaggaccaatgggacctccaggagacagaggcttcactggaaaagacggtgcaatgggacccaggggcccaccagggccgccgggaagcccaggctccccaggagtcacaggaccaagtgggaagccaggaaaacctggagatcatggcagaccaggtccatctgggttgaaaggagaaaaaggtgataggggagacattgcttcccagaacatgatgcgagcagttgcaagacaagtctgtgaacaattgataagtggtcagatgaacagattcaatcagatgctgaatcagattccaaatgattaccagtccagtcgcaaccagccaggcccgccgggtccaccgggacctcctggtagcgcaggagccagaggagaacctgggcctggggggcggccaggcttcccgggcacaccagggatgcagggaccccctggggaacgaggtttgccaggagagaaaggtgaaaggggtactggatcttcaggacctcgggggctgcctggccccccaggtccacaaggagaatccagaacaggtccaccagggtccacaggttcaagaggtccccctggcccccctggccgtcctggaaactcaggtatccgaggacccccaggtcctcctggatactgtgattcttctcagtgtgccagcatcccatacaacgggcaaggctatccaggttccggctaacacattttctaagtcgccagtgctgcttacagtttgaatacatgaaaatcctgtttctgagatgtttgcgcacgtg

SEQ ID NO: 232289 - protein, 398 aa, Artificial Sequence
  derived and/or modified sequence
MHFSTVTRDMEAFTASSLSSLGAAGGFPGAASPGADPYGPREPPPPPPRYDPCAAAAPGAPGPPPPPHAYPFAPAAGAATSAAAEPEGPGASCAAAAKAPVKKNAKVAGVSVQLEMKALWDEFNQLGTEMIVTKAGRRMFPTFQVKLFGMDPMADYMLLMDFVPVDDKRYRYAFHSSSWLVAGKADPATPGRVHYHPDSPAKGAQWMKQIVSFDKLKLTNNLLDDNGHIILNSMHRYQPRFHVVYVDPRKDSEKYAEENFKTFVFEETRFTAVTAYQNHRITQLKIASNPFAKGFRDCDPEDWPRNHRPGALPLMSAFARSRNPVASPTQPSGTEKGGHVLKDKEVKAETSRNTPEREVELLRDAGGCVNLGLPCPAECQPFNTQGLVAGRTAGDRLC

SEQ ID NO: 232290 - DNA, 1197 bp, Artificial Sequence
  derived and/or modified sequence
atgcacttcagcaccgtgaccagagacatggaggccttcaccgccagcagcctgagcagcctgggcgccgccggcggcttccccggcgccgccagccccggcgccgacccctacggccccagagagccccccccccccccccccagatacgacccctgcgccgccgccgcccccggcgcccccggcccccccccccccccccacgcctaccccttcgcccccgccgccggcgccgccaccagcgccgccgccgagcccgagggccccggcgccagctgcgccgccgccgccaaggcccccgtgaagaagaacgccaaggtggccggcgtgagcgtgcagctggagatgaaggccctgtgggacgagttcaaccagctgggcaccgagatgatcgtgaccaaggccggcagaagaatgttccccaccttccaggtgaagctgttcggcatggaccccatggccgactacatgctgctgatggacttcgtgcccgtggacgacaagagatacagatacgccttccacagcagcagctggctggtggccggcaaggccgaccccgccacccccggcagagtgcactaccaccccgacagccccgccaagggcgcccagtggatgaagcagatcgtgagcttcgacaagctgaagctgaccaacaacctgctggacgacaacggccacatcatcctgaacagcatgcacagataccagcccagattccacgtggtgtacgtggaccccagaaaggacagcgagaagtacgccgaggagaacttcaagaccttcgtgttcgaggagaccagattcaccgccgtgaccgcctaccagaaccacagaatcacccagctgaagatcgccagcaaccccttcgccaagggcttcagagactgcgaccccgaggactggcccagaaaccacagacccggcgccctgcccctgatgagcgccttcgccagaagcagaaaccccgtggccagccccacccagcccagcggcaccgagaagggcggccacgtgctgaaggacaaggaggtgaaggccgagaccagcagaaacacccccgagagagaggtggagctgctgagagacgccggcggctgcgtgaacctgggcctgccctgccccgccgagtgccagcccttcaacacccagggcctggtggccggcagaaccgccggcgacagactgtgctag

SEQ ID NO: 232291 - DNA, 1197 bp, Artificial Sequence
  derived and/or modified sequence
atgcatttcagcaccgtgactagagacatggaagcctttaccgcatcttcattgagcagcctcggtgcagctggaggctttccaggtgccgcctcccccggagccgacccctacggtccgagagaacctcccccaccaccacctagatatgacccctgcgcggccgcggccccaggtgcccccggaccgcctcccccccctcacgcatacccctttgcacccgctgccggagccgccacgtcagccgctgccgagcccgagggcccgggcgcttcatgtgcggcagccgctaaggcgccggtaaagaagaacgcaaaagtggcgggcgtgagtgtccaactggagatgaaggccctatgggacgagttcaatcagctggggactgagatgatcgtgactaaagctggaaggcgaatgtttcccacattccaagtcaagctgttcgggatggatccaatggctgactacatgttactgatggattttgtccccgtcgatgacaagcgctaccgctatgcctttcattcttcctcttggctggtggccggcaaagctgaccccgctaccccaggacgcgtgcattaccatccagactcacctgcaaaaggtgcccagtggatgaagcagatcgtgtcctttgacaagttgaagcttacaaataaccttttggatgataacggccacattatcctaaattccatgcacagatatcagccccggtttcatgtggtgtacgtcgaccctcggaaggacagtgagaaatacgctgaggagaacttcaagaccttcgtctttgaggaaaccagattcacggcagttaccgcataccagaaccatcgcataacccaactaaaaattgcttcaaatcctttcgcgaaaggttttcgtgattgcgaccctgaggattggccacgaaaccatcgacccggtgctctgccactgatgtctgcttttgctcgtagtcggaatccagtcgcctctccgacacagcctagcgggactgagaagggcggtcacgtcctcaaggataaagaggtgaaggccgagaccagcagaaataccccggagcgggaagtcgagcttttgcgcgacgccggcggttgtgttaaccttggacttccatgccccgccgaatgtcagccatttaacacacagggcctggttgccggacggaccgcaggcgataggctttgttag

SEQ ID NO: 232292 - DNA, 1197 bp, Artificial Sequence
  derived and/or modified sequence
atgcacttcagcacagtgacccgggacatggaggccttcaccgccagcagcctgagcagcctgggcgccgccggcggcttccctggggccgccagccctggagctgacccctacggcccccgggagcccccacctcctccacccaggtatgacccctgtgccgccgccgcccctggggcccctggccccccacctccaccccacgcctacccctttgccccagctgctggggccgccaccagcgctgctgctgagcctgagggccctggggccagctgtgccgccgccgccaaggcccctgtgaagaagaatgccaaggtggccggcgtgtctgtgcagctggagatgaaggccctgtgggatgagttcaaccagctgggcacagagatgattgtgaccaaggccggccgcaggatgttccccaccttccaggtgaagctgtttggcatggaccccatggctgactacatgctgctgatggactttgtgcctgtggatgacaagcgctaccgctatgccttccacagcagctcctggctggtggccggcaaggctgaccctgccaccccaggccgggtgcactaccacccagacagccctgccaagggggcccagtggatgaagcagatcgtgtcctttgacaagctgaagctgaccaacaacctgctggatgacaatggccacatcatcctgaacagcatgcaccgctaccagccccgcttccacgtggtgtatgtggaccccaggaaggacagcgagaagtatgcagaggagaacttcaagacctttgtgtttgaggagacccgcttcaccgctgtgacagcctaccagaaccaccgcatcacccagctgaagatcgccagcaacccctttgccaagggcttccgggactgtgaccctgaggactggcccaggaaccacaggcctggggccctgcccctgatgtctgcctttgcccggagcaggaaccctgtggccagccccacccagcccagcggcacagagaagggcggccacgtgctgaaggacaaggaggtgaaggccgagaccagcaggaacaccccagagcgggaggtggagctgctgagagatgctgggggctgtgtgaacctgggcctgccctgcccagctgagtgccagcccttcaacacccagggcctggtggccggccgcacagctggggaccggctgtgctag

SEQ ID NO: 232293 - DNA, 1197 bp, Artificial Sequence
  derived and/or modified sequence
atgcacttcagcaccgtgacccgggacatggaggccttcaccgcctccagcctatcctcccttggggctgccgggggctttcccggggcggccagccctggcgcggacccgtatggaccccgcgaaccgcctcctcctccgcctcggtacgacccttgtgcggccgcagctccaggcgccccaggtccccctcctcccccccatgcatatccattcgcaccagctgccggcgcagccacgtccgcggctgcagaacccgagggacctggggcaagttgcgcagccgctgccaaagccccagttaaaaagaatgctaaggtcgccggcgtgtcggtgcaactggagatgaaggctttatgggacgagtttaaccagctcgggacggaaatgattgttacaaaagcgggcagacgtatgtttcctacatttcaagttaagctctttggaatggacccgatggctgactatatgctactaatggattttgtccctgtagatgacaagcgataccggtatgccttccacagctcttcctggcttgtagccggaaaggcagatccagcaacccccggtcgcgttcattatcaccccgatagtccggcaaagggtgcgcagtggatgaagcaaatagtttcctttgataagcttaagttgacgaataacctgctggatgacaacggccacattatcctgaacagcatgcatcgctaccagccgcgcttccacgtggtctacgttgacccaagaaaggattcagagaaatacgcggaggagaactttaagactttcgtgttcgaggaaacaagatttaccgccgtaacggcgtaccagaatcaccggataacgcagctcaaaatcgctagcaatccgttcgccaaaggttttcgggattgtgacccggaagattggcctaggaatcacagacccggcgccctgccactcatgtctgctttcgcaagaagtcggaaccctgttgcttcacctacacagccctcgggtacagaaaagggcggccatgtgctgaaagataaagaagttaaagcagagacaagtcgaaacacacccgaacgagaggttgagctgctgcgggacgcaggcggctgcgtgaatctggggctgccgtgtccagccgaatgccaaccctttaacacacagggcctagtcgccgggaggaccgccggcgatcgtctgtgttag

SEQ ID NO: 232294 - DNA, 1197 bp, Artificial Sequence
  derived and/or modified sequence
atgcatttttccacggtgaccagggacatggaagcctttacggccagctcactttccagcttgggcgcagcagggggttttcctggtgccgcaagccctggagcagacccctacggacctcgcgagccaccaccaccaccccctcgatacgacccttgtgccgctgcggctccaggggcaccaggaccaccaccaccacctcatgcctacccatttgcacccgctgctggcgctgcgaccagcgccgcagccgagcctgagggacccggtgcctcttgtgctgctgcagcaaaggcccctgtgaagaaaaacgcaaaggtagctggagtatcagtccagctggagatgaaggcactgtgggatgagttcaatcagcttggcactgagatgatcgtgactaaagcaggacggaggatgtttccaaccttccaggtaaaactcttcggaatggacccaatggccgattacatgctactaatggacttcgtacccgtggacgataaacggtataggtatgcctttcattcatctagttggctggtggccggtaaagctgatccagctactcctgggcgtgtgcactaccaccctgactccccagctaaaggggcacagtggatgaagcagatcgtgtccttcgataagttgaaactgaccaacaacttacttgatgataacggccacattattcttaattcaatgcacaggtatcagccacgtttccacgtggtgtatgtggaccctaggaaggattctgaaaagtatgcggaagagaatttcaagacctttgtgtttgaagagacaagatttaccgccgtgactgcttatcaaaatcaccgtattactcagctgaagatcgcatcaaacccctttgccaaaggcttccgcgattgtgaccccgaggactggcctcggaatcaccggcctggggctctgccattgatgtctgccttcgcgcgttctcggaatcccgtggcttcaccaacccagccttccggcacagagaagggagggcacgtcctgaaagacaaagaggtcaaagcagagacctcgagaaacactcctgagcgagaagtggagctcctcagagacgccggaggctgcgtcaacttgggactcccctgccccgctgaatgtcagccatttaacactcagggcctagtcgccggtaggaccgccggagataggctgtgctag

SEQ ID NO: 232295 - DNA, 1465 bp, Artificial Sequence
  derived and/or modified sequence
ccggcagggggagcgaggaggaagggaaccgcggccgggccagcggaggcggcggagcgcaccgcccaccagggctcagggtcctccgaccgggtgaagcttcgctggctgccaggatccccggcagggatgcacttcagcaccgtcaccagggacatggaagccttcacggccagcagcctgagcagcctgggggccgcggggggcttcccgggcgccgcgtcgcccggcgccgacccgtacggcccgcgcgagcccccgccgccgccgccgcgctacgacccgtgcgccgccgccgcccccggcgccccgggcccgccgccgccgccgcacgcctacccgtttgcgccggccgccggggccgccaccagcgccgccgccgagcccgagggccccggggccagctgcgcggccgcagccaaggcgccggtgaagaagaacgcgaaggtggccggtgtgagcgtgcagctagagatgaaggcgctgtgggacgagttcaaccagctgggcaccgagatgatcgtcaccaaggccggcaggcggatgtttcccaccttccaagtgaagctcttcggcatggatcccatggccgactatatgctgctcatggacttcgtgccggtggacgataagcgctaccggtacgccttccacagctcctcctggctggtggcggggaaggccgaccctgccacgccaggccgcgtgcactaccacccggactcgcctgccaagggcgcgcagtggatgaagcaaatcgtgtccttcgacaagctcaagctgaccaacaacctactggacgacaacggccacattattctgaattccatgcacagataccagccccgcttccacgtggtctatgtggacccacgcaaagatagcgagaaatatgccgaggagaacttcaaaacctttgtgttcgaggagacacgattcaccgcggtcactgcctaccagaaccatcggatcacgcagctcaagattgccagcaatcccttcgcgaaaggcttccgggactgtgaccctgaggactggccccggaaccaccggcccggcgcactgccgctcatgagcgccttcgcgcgctcgcggaaccccgtggcttccccgacgcagcccagcggcacggagaaaggtggacatgtcctgaaggacaaggaagtgaaagctgagacgtctaggaacacaccagagagagaagtggagcttctgagggatgcaggtggctgtgtgaacctggggctcccctgccccgcagagtgccaacccttcaatacccagggcctggtggctgggaggaccgcaggtgaccgtctttgttgaatgctgaggccgggccatgggcacatggagttgtcgtgtttcccttcactttggttcatgtttgaaatttccaaaattaaaaaaacagtgacttgttcagtaaattccaatatgaataaagtgcatgttttgtaataaa

SEQ ID NO: 232296 - protein, 180 aa, Artificial Sequence
  derived and/or modified sequence
MGLGAVEQEAALAGEAPAAQVPTEGVGGSGMAGCRSRALPLGKAARAPGEIERSAGGSALLGDPVHPPQPLARVLSPSLPGAGRACRLLRVRAAKLTPTQNSSWPASVACSPGSCSHLSLHTSLQAEGAGSGLGKPRKGLPQCSGGLKGSSSAAKVGAQAEEAPRASEGSEDCQHAVTSH

SEQ ID NO: 232297 - protein, 495 aa, Artificial Sequence
  derived and/or modified sequence
MHFSTVTRDMEAFTASSLSSLGAAGGFPGAASPGADPYGPREPPPPPPRYDPCAAAAPGAPGPPPPPHAYPFAPAAGAATSAAAEPEGPGASCAAAAKAPVKKNAKVAGVSVQLEMKALWDEFNQLGTEMIVTKAGRRMFPTFQVKLFGMDPMADYMLLMDFVPVDDKRYRYAFHSSSWLVAGKADPATPGRVHYHPDSPAKGAQWMKQIVSFDKLKLTNNLLDDNGHIILNSMHRYQPRFHVVYVDPRKDSEKYAEENFKTFVFEETRFTAVTAYQNHRITQLKIASNPFAKGFRDCDPEDWPRNHRPGALPLMSAFARSRNPVASPTQPSGTEKDAAEARREFQRDAGGPAVLGDPAHPPQLLARVLSPSLPGAGGAGGLVPLPGAPGGRPSPPNPELRLEAPGASEPLHHHPYKYPAAAYDHYLGAKSRPAPYPLPGLRGHGYHPHAHPHHHHHPVSPAAAAAAAAAAAAAAANMYSSAGAAPPGSYDYCPR

SEQ ID NO: 232298 - DNA, 543 bp, Artificial Sequence
  derived and/or modified sequence
atgggcctgggcgccgtggagcaggaggccgccctggccggcgaggcccccgccgcccaggtgcccaccgagggcgtgggcggcagcggcatggccggctgcagaagcagagccctgcccctgggcaaggccgccagagcccccggcgagatcgagagaagcgccggcggcagcgccctgctgggcgaccccgtgcaccccccccagcccctggccagagtgctgagccccagcctgcccggcgccggcagagcctgcagactgctgagagtgagagccgccaagctgacccccacccagaacagcagctggcccgccagcgtggcctgcagccccggcagctgcagccacctgagcctgcacaccagcctgcaggccgagggcgccggcagcggcctgggcaagcccagaaagggcctgccccagtgcagcggcggcctgaagggcagcagcagcgccgccaaggtgggcgcccaggccgaggaggcccccagagccagcgagggcagcgaggactgccagcacgccgtgaccagccactag

SEQ ID NO: 232299 - DNA, 543 bp, Artificial Sequence
  derived and/or modified sequence
atgggccttggggctgtggagcaggaagctgctctggctggggaggcacccgcggcccaggtgcctacagagggggtcggaggttcgggcatggcaggatgtaggagtcgggcactgcccttgggaaaggccgcacgggctcccggcgagatagaacggtcagctggcgggagcgcattgttgggcgatcctgtccatcccccgcagcctctggcccgtgtgctcagcccatcgcttccgggcgcaggacgcgcctgtcggctcctgcgagtgagggccgccaaactaaccccgactcagaattccagttggcccgctagcgtggcctgctcccctggctcatgtagtcatcttagcctccatacgagcctgcaggctgagggtgcaggatctggactgggcaagcctagaaaaggacttcctcagtgtagtgggggcctaaaaggttcctcctcagcggcaaaagtcggggcccaggcagaagaggctcccagagcttccgaggggagcgaggattgtcagcatgccgtcacctcacactag

SEQ ID NO: 232300 - DNA, 543 bp, Artificial Sequence
  derived and/or modified sequence
atgggcctgggcgctgtggagcaggaggccgccctggccggggaggccccagctgcccaggtgcccacagaaggagtgggcggcagcggcatggccggctgccgcagccgggccctgcccctgggcaaggccgcccgggcccctggagaaattgaaagatctgctgggggcagcgccctgctgggggaccctgtgcaccccccccagcccctggcccgggtgctgagccccagcctgcccggggccggccgggcctgccgcctgctgcgggtgcgggccgccaagctgacccccacccagaacagctcctggccagcctctgtggcctgcagccctggcagctgcagccacctgagcctgcacaccagcctgcaggccgagggcgccggcagcggcctgggcaagcccaggaagggcctgccccagtgcagcggcggcctgaagggcagcagcagcgctgccaaggtgggcgcccaggccgaggaggccccccgggccagcgagggcagcgaggactgccagcacgctgtgaccagccactag

SEQ ID NO: 232301 - DNA, 543 bp, Artificial Sequence
  derived and/or modified sequence
atgggcctgggcgccgtggagcaggaggccgccctggccggcgaggcccccgccgcacaagtgccaacagagggtgtgggaggttccgggatggcaggctgtcgttcccgagctctgccacttggcaaggctgctcgggcccccggagagattgaaagatctgctggaggcagtgccctgctgggggacccagtgcatcccccccaacctctggcccgagtgctttccccgtctcttcctggagccggccgggcctgccgactcctgagggttcgggcggcaaagctcacaccaactcagaatagctcttggccagcatccgtggcctgctcaccaggatcttgtagccatctgagcctgcatacctctctgcaggccgagggcgctggatccggtttgggcaaaccgagaaagggattaccgcagtgctccgggggcctaaaaggatcatctagtgccgctaaggtgggcgcccaggcggaggaggctccgagggcttctgagggctcagaagattgccagcatgcagtaacttcccactag

SEQ ID NO: 232302 - DNA, 543 bp, Artificial Sequence
  derived and/or modified sequence
atggggttgggcgcagtggaacaggaagcggctttggcaggcgaggccccagctgctcaagtgcctacagagggcgtgggaggcagcggcatggccggatgcagatcccgagccttgccccttggtaaagccgctcgggcaccgggagaaatagaaagaagcgccggtggatccgctctgttgggagatcctgtgcatccaccacagcccctagcacgcgtgctctcaccatccctgcctggcgctgggagggcgtgtcgactcctacgcgtgcgcgctgccaagcttactccgacccagaattcatcatggcctgccagtgtcgcctgcagcccaggatcttgtagccatctttctctgcacacttctcttcaggcagagggcgctggtagcggcctgggaaagcctcggaaaggcttaccccagtgtagcggcggactgaagggcagttcatctgccgcaaaggtcggagcccaggccgaggaggcccctcgggcatcagaggggtctgaggattgccagcacgccgtgacaagccattag

SEQ ID NO: 232303 - DNA, 1488 bp, Artificial Sequence
  derived and/or modified sequence
atgcacttcagcaccgtgaccagagacatggaggccttcaccgccagcagcctgagcagcctgggcgccgccggcggcttccccggcgccgccagccccggcgccgacccctacggccccagagagccccccccccccccccccagatacgacccctgcgccgccgccgcccccggcgcccccggcccccccccccccccccacgcctaccccttcgcccccgccgccggcgccgccaccagcgccgccgccgagcccgagggccccggcgccagctgcgccgccgccgccaaggcccccgtgaagaagaacgccaaggtggccggcgtgagcgtgcagctggagatgaaggccctgtgggacgagttcaaccagctgggcaccgagatgatcgtgaccaaggccggcagaagaatgttccccaccttccaggtgaagctgttcggcatggaccccatggccgactacatgctgctgatggacttcgtgcccgtggacgacaagagatacagatacgccttccacagcagcagctggctggtggccggcaaggccgaccccgccacccccggcagagtgcactaccaccccgacagccccgccaagggcgcccagtggatgaagcagatcgtgagcttcgacaagctgaagctgaccaacaacctgctggacgacaacggccacatcatcctgaacagcatgcacagataccagcccagattccacgtggtgtacgtggaccccagaaaggacagcgagaagtacgccgaggagaacttcaagaccttcgtgttcgaggagaccagattcaccgccgtgaccgcctaccagaaccacagaatcacccagctgaagatcgccagcaaccccttcgccaagggcttcagagactgcgaccccgaggactggcccagaaaccacagacccggcgccctgcccctgatgagcgccttcgccagaagcagaaaccccgtggccagccccacccagcccagcggcaccgagaaggacgccgccgaggccagaagagagttccagagagacgccggcggccccgccgtgctgggcgaccccgcccaccccccccagctgctggccagagtgctgagccccagcctgcccggcgccggcggcgccggcggcctggtgcccctgcccggcgcccccggcggcagacccagcccccccaaccccgagctgagactggaggcccccggcgccagcgagcccctgcaccaccacccctacaagtaccccgccgccgcctacgaccactacctgggcgccaagagcagacccgccccctaccccctgcccggcctgagaggccacggctaccacccccacgcccacccccaccaccaccaccaccccgtgagccccgccgccgccgccgccgccgccgccgccgccgccgccgccgccgccaacatgtacagcagcgccggcgccgccccccccggcagctacgactactgccccagatag

SEQ ID NO: 232304 - DNA, 1488 bp, Artificial Sequence
  derived and/or modified sequence
atgcacttttccaccgtgacaagggatatggaggcattcacggcctcatccctatcctccctgggagccgccgggggattccccggcgccgcctcccccggagccgatccgtacggtccacgggagcctccccctcctcctcctcgctatgacccatgcgccgctgcagcccctggggctcccggaccacccccgcccccgcatgcttatcctttcgccccagcagcgggggcagctacgagcgctgcggctgagcctgaagggcccggcgccagctgcgccgccgccgcgaaagcgccggtgaaaaagaatgccaaggtcgctggcgtgtccgtgcagctggagatgaaggcgctatgggatgagtttaaccagttggggacagagatgattgttacaaaagccgggaggcgcatgtttcccactttccaggtcaagctcttcggcatggacccgatggctgactacatgttgctgatggacttcgtaccggtggacgacaaacgctatagatatgcttttcattcctcctcttggctggtagcgggaaaagcggacccagcaacaccaggccgtgtccattatcatcccgactctccagcaaaaggtgcacagtggatgaagcagatcgtcagcttcgacaaactcaaacttaccaataacctcctcgacgataacggtcacatcattcttaacagcatgcaccgctaccagccccggtttcatgtggtctatgtggacccccggaaagactccgaaaagtatgctgaagagaacttcaagacattcgtctttgaagaaacccggttcacagcagtaaccgcttatcaaaatcatcgtatcacacagctgaagattgcatccaacccgttcgccaaggggtttcgcgactgcgatccagaggactggccgagaaaccaccgccctggggcgctgcctttaatgagcgctttcgcgcgctctcggaatccggtggccagcccaacacagccctcagggacggagaaggacgccgctgaggcgagacgggagttccagcgtgacgctggaggccctgcagtccttggggatccggctcaccctccacagctgttggcgcgggtgcttagcccttccttaccgggagccggcggagctggtggtctcgtgcctctacccggagcccctggcgggaggccctcaccgccgaacccagagctcaggctagaggcccctggcgcctctgaacctctccaccaccacccctacaaatacccagccgctgcatacgatcattaccttggggccaaaagtagacccgccccctatccactccctggtctcagaggacacggttaccacccacacgcacatcctcatcatcatcaccacccagtctcacctgccgccgcagctgcagcagcagctgcagctgctgccgcagctgccaatatgtacagtagcgcgggggcagcccctccagggtcatacgattactgtcctaggtag

SEQ ID NO: 232305 - DNA, 1488 bp, Artificial Sequence
  derived and/or modified sequence
atgcacttcagcacagtgacccgggacatggaggccttcaccgccagcagcctgagcagcctgggcgccgccggcggcttccctggggccgccagccctggagctgacccctacggcccccgggagcccccacctcctccacccaggtatgacccctgtgccgccgccgcccctggggcccctggccccccacctccaccccacgcctacccctttgccccagctgctggggccgccaccagcgctgctgctgagcctgagggccctggggccagctgtgccgccgccgccaaggcccctgtgaagaagaatgccaaggtggccggcgtgtctgtgcagctggagatgaaggccctgtgggatgagttcaaccagctgggcacagagatgattgtgaccaaggccggccgcaggatgttccccaccttccaggtgaagctgtttggcatggaccccatggctgactacatgctgctgatggactttgtgcctgtggatgacaagcgctaccgctatgccttccacagcagctcctggctggtggccggcaaggctgaccctgccaccccaggccgggtgcactaccacccagacagccctgccaagggggcccagtggatgaagcagatcgtgtcctttgacaagctgaagctgaccaacaacctgctggatgacaatggccacatcatcctgaacagcatgcaccgctaccagccccgcttccacgtggtgtatgtggaccccaggaaggacagcgagaagtatgcagaggagaacttcaagacctttgtgtttgaggagacccgcttcaccgctgtgacagcctaccagaaccaccgcatcacccagctgaagatcgccagcaacccctttgccaagggcttccgggactgtgaccctgaggactggcccaggaaccacaggcctggggccctgcccctgatgtctgcctttgcccggagcaggaaccctgtggccagccccacccagcccagcggcacagagaaggatgctgctgaggcccggcgggagttccagagagatgctgggggccctgctgtgctgggggaccctgcccaccccccccagctgctggcccgggtgctgagccccagcctgcccggggccggcggggccggcggcctggtgcccctgcccggggcccctgggggccggcccagcccccccaaccctgagctgcggctggaggcccctggggccagcgagcccctgcaccaccacccctacaagtacccagctgctgcctatgaccactacctgggcgccaagagcaggcctgccccctaccccctgcccggcctgcggggccacggctaccacccccacgcccacccccaccaccaccaccaccctgtgtccccagctgctgctgctgctgctgctgctgctgctgctgctgctgctgccaacatgtacagcagcgctggggccgcccctcctggcagctatgactactgccccaggtag

SEQ ID NO: 232306 - DNA, 1488 bp, Artificial Sequence
  derived and/or modified sequence
atgcacttcagcaccgtgacccgggacatggaggccttcaccgcctcaagcctgagctctctgggcgccgcaggtggatttccaggcgcggcctctccaggcgcagacccctacgggccaagagagccgcctccgcctccgcccagatatgatccatgcgccgcagccgctcccggagcccctggaccaccaccgcccccccatgcgtacccctttgccccagccgccggagctgccacttctgcagccgccgagcctgagggccctggggcatcatgtgccgccgctgcaaaagctcccgttaaaaaaaatgctaaggtggcaggagtttccgtgcaattggagatgaaggccctttgggatgagttcaaccagctgggaaccgagatgatcgtgacgaaagcgggacggcgtatgttcccgacattccaggtgaagctgtttggaatggaccccatggcagattacatgttattaatggatttcgtgccagtcgatgacaagagatatcggtatgcattccactcatcaagctggctggttgctggtaaagcggaccccgccacaccaggtcgggttcattaccacccagactccccagctaagggggcacagtggatgaagcagattgtatcttttgataagctgaagctcacgaataacctcctggacgacaatggccacatcatcctcaactccatgcataggtaccaacctcgttttcacgtcgtctatgtagaccccagaaaggactctgagaaatatgctgaggaaaacttcaaaacatttgtgttcgaggagacaaggtttacagctgtcactgcgtatcagaaccatcgcatcacacagttgaagattgcgtcgaaccctttcgctaaagggttccgagactgcgaccctgaagactggccccgaaatcaccgccccggagcgctccccctgatgagcgcatttgcacgctcccgcaatccggttgcgtctcctactcagccatctggcactgagaaagacgctgcagaggccaggcgggagtttcagcgtgatgctggcggtccagctgtcttaggagacccagctcatccgccccagctgctggcacgcgtgctgtcgcctagtttgccaggagcaggcggcgccggcgggttagtgcccctccctggagcccctggaggccggcccagccctccaaaccccgagctaagacttgaggctccaggcgcctcagaaccactacaccaccatccgtacaagtatccagcagccgcttacgatcactacttaggagccaaatcgaggcccgccccttaccctctccctgggctgcgggggcacggttatcacccgcatgcccacccccaccatcatcaccaccctgttagtcctgccgcagccgctgcagctgccgctgccgccgctgcagcagcagcaaacatgtatagtagcgctggagctgccccgcccggatcctatgactactgtccacgctag

SEQ ID NO: 232307 - DNA, 1488 bp, Artificial Sequence
  derived and/or modified sequence
atgcacttttccaccgtaacccgcgatatggaggctttcactgccagtagcttatcaagccttggagctgccggtggctttcccggtgcagcttcccccggtgcagacccctacggacctcgcgaaccgcctccccctccccctagatatgacccttgcgcagctgccgcaccgggtgctcctggcccaccccctcctccacacgcctatcctttcgctccagctgcaggcgctgcgaccagcgcggctgcagagccagaaggccctggggcatcctgcgctgcggcagcaaaggcacccgtaaagaaaaacgcaaaggttgccggtgtttcggtgcagttagagatgaaggctctgtgggacgagttcaatcagctgggcacagaaatgatcgtgaccaaagctgggaggagaatgttcccgacttttcaggttaaactttttggcatggatccaatggcggattacatgctgctgatggatttcgtccccgtcgacgataagaggtatagatacgcattccattcaagcagttggctcgtggcgggaaaggccgacccagccactcctggacgagtccactatcatccagactcccccgctaagggtgcacagtggatgaagcaaatcgtgagcttcgacaagcttaaactgacaaacaacctcctggacgacaacggacacatcattctgaacagcatgcatagatatcagccccgattccatgtcgtttatgtggatcctaggaaggattcagaaaaatacgctgaggagaatttcaaaacatttgtgttcgaggagacgaggttcaccgccgtgacagcctaccagaatcaccgcatcactcagctcaaaatcgcgtctaacccatttgccaagggatttagggactgtgaccctgaggactggcctagaaaccatagaccaggcgctttacccctaatgtctgcattcgctagaagccgcaatccagtcgccagtccgacccaaccaagtgggacagagaaggatgccgctgaggcacgacgcgaattccaacgtgatgcgggtggtcctgctgtcctgggggaccccgcacatccgccacagctgctggccagagtcttatccccctcactccctggggctggcggagctggtggcctggtgccgctccctggggctcctgggggacgaccttcaccccctaacccagagctgcgcttggaggccccaggtgctagcgagcccttgcaccatcatccatataaataccccgcagcggcttatgaccattatctgggtgctaaatccagacctgcaccctatccattacccggtcttaggggacatggctatcatccacatgctcacccccatcaccaccaccaccccgtctctcctgcggctgccgctgctgccgcagccgctgctgccgctgccgcagccaatatgtactcttcagcaggggctgctccacctggttcttacgactactgcccacggtag

SEQ ID NO: 232308 - DNA, 2082 bp, Artificial Sequence
  derived and/or modified sequence
ccggcagggggagcgaggaggaagggaaccgcggccgggccagcggaggcggcggagcgcaccgcccaccagggctcagggtcctccgaccgggtgaagcttcgctggctgccaggatccccggcagggatgcacttcagcaccgtcaccagggacatggaagccttcacggccagcagcctgagcagcctgggggccgcggggggcttcccgggcgccgcgtcgcccggcgccgacccgtacggcccgcgcgagcccccgccgccgccgccgcgctacgacccgtgcgccgccgccgcccccggcgccccgggcccgccgccgccgccgcacgcctacccgtttgcgccggccgccggggccgccaccagcgccgccgccgagcccgagggccccggggccagctgcgcggccgcagccaaggcgccggtgaagaagaacgcgaaggtggccggtgtgagcgtgcagctagagatgaaggcgctgtgggacgagttcaaccagctgggcaccgagatgatcgtcaccaaggccggcaggcggatgtttcccaccttccaagtgaagctcttcggcatggatcccatggccgactatatgctgctcatggacttcgtgccggtggacgataagcgctaccggtacgccttccacagctcctcctggctggtggcggggaaggccgaccctgccacgccaggccgcgtgcactaccacccggactcgcctgccaagggcgcgcagtggatgaagcaaatcgtgtccttcgacaagctcaagctgaccaacaacctactggacgacaacggccacattattctgaattccatgcacagataccagccccgcttccacgtggtctatgtggacccacgcaaagatagcgagaaatatgccgaggagaacttcaaaacctttgtgttcgaggagacacgattcaccgcggtcactgcctaccagaaccatcggatcacgcagctcaagattgccagcaatcccttcgcgaaaggcttccgggactgtgaccctgaggactggccccggaaccaccggcccggcgcactgccgctcatgagcgccttcgcgcgctcgcggaaccccgtggcttccccgacgcagcccagcggcacggagaaagacgcggctgaggcccggcgagaattccagcgcgacgcgggcgggccagcagtgctcggggacccggcgcatcctccgcagctgctggcccgggtgctaagcccctcgctgcccggggccggcggcgccggcggcttagtcccgctgcccggcgcgcccggaggccggcccagtcccccgaaccccgagctgcgcctggaggcgcccggcgcatcggagccgctgcaccaccacccctacaaatatccggccgccgcctacgaccactatctcggggccaagagccggccggcgccctacccgctgcccggcctgcgtggccacggctaccacccgcacgcgcatccgcaccaccaccaccaccccgtgagtccagccgccgcggccgccgccgccgctgccgcagctgccgcggccgccaacatgtactcgtcggccggagccgcgccgcccggctcctacgactattgccccagataacacgggccctgtcgcgctcccgccccggtcctgcacagccccgaagttcgccgggcccggccaccctgccccaagggcaagcaaggaatacgttcccccagccccaggggccaccgcggctctccccttccccagcctcgaagccatgggggccccctcgccacccccagccccttgggctatcgaagtatccggttccccagtccctggagccaccgcgggtccttccccggccccgagggccaagggggtccccgcccgccagtgccaaagcgcccggtcggaggcggaaggaagtgatatttattgttctccccgagaccgcgtcgcccgcggcccggccggcagttgcagtgtagacagcccgagagccccgcctgcaggcggtgtagatacatgtagatactgtagatactgtagataccgccccggcgccgacttgataaacggtttcgcctcttttgg

SEQ ID NO: 232309 - protein, 267 aa, Artificial Sequence
  derived and/or modified sequence
MRVAALISGGKDSCYNMMQCIAAGHQIVALANLRPAENQVGSDELDSYMYQTVGHHAIDLYAEAMALPLYRRTIRGRSLDTRQVYTKCEGDEVEDLYELLKLVKEKEEVEGISVGAILSDYQRIRVENVCKRLNLQPLAYLWQRNQEDLLREMISSNIQAMIIKVAALGLDPDKHLGKTLDQMEPYLIELSKKYGVHVCGEGGEYETFTLDCPLFKKKIIVDSSEVVIHSADAFAPVAYLRFLELHLEDKVSSVPDNYRTSNYIYNF

SEQ ID NO: 232310 - DNA, 804 bp, Artificial Sequence
  derived and/or modified sequence
atgagagtggccgccctgatcagcggcggcaaggacagctgctacaacatgatgcagtgcatcgccgccggccaccagatcgtggccctggccaacctgagacccgccgagaaccaggtgggcagcgacgagctggacagctacatgtaccagaccgtgggccaccacgccatcgacctgtacgccgaggccatggccctgcccctgtacagaagaaccatcagaggcagaagcctggacaccagacaggtgtacaccaagtgcgagggcgacgaggtggaggacctgtacgagctgctgaagctggtgaaggagaaggaggaggtggagggcatcagcgtgggcgccatcctgagcgactaccagagaatcagagtggagaacgtgtgcaagagactgaacctgcagcccctggcctacctgtggcagagaaaccaggaggacctgctgagagagatgatcagcagcaacatccaggccatgatcatcaaggtggccgccctgggcctggaccccgacaagcacctgggcaagaccctggaccagatggagccctacctgatcgagctgagcaagaagtacggcgtgcacgtgtgcggcgagggcggcgagtacgagaccttcaccctggactgccccctgttcaagaagaagatcatcgtggacagcagcgaggtggtgatccacagcgccgacgccttcgcccccgtggcctacctgagattcctggagctgcacctggaggacaaggtgagcagcgtgcccgacaactacagaaccagcaactacatctacaacttctag

SEQ ID NO: 232311 - DNA, 804 bp, Artificial Sequence
  derived and/or modified sequence
atgcgggtggccgcgctgatctcaggcgggaaagacagctgctataacatgatgcagtgcatcgctgctggacaccagatagtcgctctggcaaacttgcgacctgcagaaaatcaggtcggtagcgatgagctcgacagttacatgtaccaaacggtggggcatcatgcaatcgacctgtatgcagaagccatggccttacctctctacaggagaacaatccgaggccgctcattagacacacggcaggtctatacgaagtgtgaaggcgacgaggtcgaagacctgtatgagctgttaaagctcgtcaaagaaaaagaggaagtggaaggaatttccgtgggtgctatcctgagcgactatcagagaattcgcgttgagaatgtgtgcaagaggctgaatttgcagccacttgcttatctctggcagcggaatcaggaggacctgctccgggaaatgatatccagcaacatccaagctatgatcataaaagtggcagcgctggggctggatcccgacaagcatctgggtaagaccctggatcagatggagccttacctgatcgagttgtctaagaaatacggcgttcacgtgtgtggcgaggggggagaatacgaaacttttactctcgactgccctttgttcaagaagaagatcatcgtcgactcgtcggaggtggttatccacagtgcggatgcctttgctccagtggcttatcttcgcttcttagagctgcatctcgaagacaaggtgtcttccgtgcccgacaactaccggacttcaaactatatttacaacttctag

SEQ ID NO: 232312 - DNA, 804 bp, Artificial Sequence
  derived and/or modified sequence
atgagggtggccgccctgatcagcggcggcaaggacagctgctacaacatgatgcagtgcatcgctgctggccaccagatcgtggccctggccaacctgcggcctgctgagaaccaggtgggcagtgatgagctggacagctacatgtaccagacagtgggccaccacgccatcgacctgtatgcagaggccatggccctgcccctgtacagaaggaccatccggggccgcagcctggacacccggcaggtgtacaccaagtgtgaaggagatgaggtggaggacctgtatgagctgctgaagctggtgaaggagaaggaggaggtggagggcatctctgtgggcgccatcctgagtgactaccagaggatccgggtggagaatgtgtgcaagaggctgaacctgcagcccctggcctacctgtggcagaggaaccaggaggacctgctgcgggagatgatcagcagcaacatccaggccatgatcatcaaggtggccgccctgggcctggaccctgacaagcacctgggcaagaccctggaccagatggagccctacctgattgagctgagcaagaagtatggagtgcacgtgtgtggggagggcggggagtatgagaccttcaccctggactgccccctcttcaagaagaagatcatcgtggacagcagcgaggtggtgatccacagcgcagatgcctttgcccctgtggcctacctgcgcttcctggagctgcacctggaggacaaggtgtcctctgtgcctgacaactaccgcaccagcaactacatctacaacttctag

SEQ ID NO: 232313 - DNA, 804 bp, Artificial Sequence
  derived and/or modified sequence
atgcgggtggccgccctgatcagcggcggcaaggacagctgctacaatatgatgcagtgcattgcagccggccaccaaattgtggccttagctaacctgcggccagcggagaaccaggtagggagtgacgagctggattcttatatgtatcaaacagttgggcaccatgcaatcgacctatacgccgaggctatggctctgcctctgtaccgacgcaccatccgcggcagatctttggacacccggcaggtctacacgaaatgtgaaggagacgaagtcgaggacctttacgaacttctaaagctagtaaaggaaaaagaagaagtggaaggcattagcgtgggtgccatcctgtctgactatcagcgcattcgggtcgagaacgtgtgtaaaagattgaaccttcagcctcttgcctacctctggcagaggaaccaggaagacctccttagggagatgatctcctctaacattcaggccatgatcattaaagttgccgcactcggactggacccggataagcatctgggaaaaacactggatcagatggaaccgtatcttatcgaactatccaagaagtatggtgtccacgtctgcggcgagggaggcgaatacgaaacttttacactggattgcccattatttaaaaagaagatcatcgtggatagctcagaggtggttattcactcagccgatgccttcgctccagtggcgtaccttcggtttctggagctgcacctcgaagacaaagtctcgagcgtacctgataattacagaacgtcgaactatatctataacttttag

SEQ ID NO: 232314 - DNA, 804 bp, Artificial Sequence
  derived and/or modified sequence
atgagggttgcagcccttatttcaggagggaaagactcttgctataatatgatgcagtgtatcgcggcaggacaccagatcgtggccctggctaacctgcgaccagctgagaatcaggtggggtccgatgagctcgatagttacatgtatcagaccgttggacatcatgctatcgacctgtacgctgaagccatggcgcttccgctttatagaagaacgatccgcggacgcagtctggacacccggcaggtgtacacaaagtgcgaaggcgacgaggtcgaagacctgtatgagctgctcaagctggtcaaggagaaggaagaggtggaaggaatctcagtcggagccattctctcagactatcagcggattcgggtcgagaatgtatgcaaacgactcaatttgcaaccgttagcttacctttggcagcggaatcaggaagatctgctgcgcgaaatgatctcctctaacatacaggccatgatcatcaaagtcgctgcgttaggactggacccggataagcacctgggtaaaaccctggatcagatggaaccctacctgattgaattgtctaagaagtacggcgtgcatgtgtgtggtgaggggggagaatatgagacattcacgctggactgccccctcttcaagaagaaaatcatcgtggattcttccgaggtcgtaatacatagcgccgatgccttcgcacccgtagcgtacctcaggttcctggaactccacctcgaggacaaggtgtccagcgttccagataattatagaacgtctaattatatctataacttctag

SEQ ID NO: 232315 - DNA, 2099 bp, Artificial Sequence
  derived and/or modified sequence
gccgcacgcacgcgcactgcgcccagcatgagggtcgcggctctgatcagtggtgggaaggacagctgctataatatgatgcagtgcattgctgctgggcatcagatcgttgctttagcaaatctaagaccagctgaaaaccaagtggggtctgatgaactggatagctacatgtatcagacagtggggcaccatgccattgacttgtatgcagaagcaatggctcttcccctctatcgccgaaccataagaggaaggagcttggatacaagacaagtgtacaccaaatgtgaaggtgatgaggttgaagatctctatgagcttttgaaacttgttaaggaaaaagaagaagtagaggggatatcagtaggtgctatactttctgactatcagcgtattcgagtggaaaatgtgtgtaaaaggcttaatctccagcctttagcttatctttggcagagaaaccaggaagatttgctcagagagatgatatcatctaacattcaagcaatgatcatcaaagtagcagctttgggtttagatcctgataagcatcttgggaaaaccctggatcaaatggagccttatctcatagagctttctaagaagtatggagtacatgtttgtggagaaggtggagagtatgaaactttcactttggattgccctctatttaagaagaaaataattgtggattcatcagaagtagtcatacattcagctgatgcatttgcacctgtggcttatctacgctttttagaattgcacttggaggacaaggtgtcctcagtgcctgacaactacagaacatctaattatatatataatttttgaaaagtgttttggaacattgttcattaaaccaccatttctatacaaaaaaattgcatagtattttctcagttactatgactagtttatttttttctcatgactcttatttttttagagaaacatactttcactagaagaggttagtggaaccatttattaattgggaaaatgtcgacggcatgttcattaatagtgccaactttcttggaattcactctttctctttcgttaacacatcttccctatgaccttttttttcttttatttcatctataaaccccatttctgtagcatttctttttttatcacactagtttcttttcctccttctctctttcttgctccaatccctaccaataatgtcatgatgcagaggcatttgaaaatgaagatgaaaagatggtcactttatttagccagtcaagcttattctactgggtgtcgccaaagcgatttatcatttttattttaaatatattcatggttgaagtgtttcaacgttattggacaattaggaagaatgtccttaactcttacaagttattttataactgatttttaaaatgctgtttttcagtattaactatgttgaccttagaaaacttttacaaaaaatagactttatgttttagaacagttttaggttcacagcaaaaatggagcagaaaatgcagagatttcccatataccctctacctccacacattcacagcctcccctaccgtcaatgtcttataatagagtggtacatttgttacaactgatgaacctacattgacacattattatcacccaaagtccatagtttacgtgagggttcactcttggtgttgtacataatatgggttttgacaaatgtgtaatgacatttgtcaaccgttatagtattatacagaataatttcactgccttaaaaaatcctctgtgttttacttattcatccctccctctcctttaacccttagcaactgatcttttcactgtgtacatagttttgcttttaccagaatgtaatgtagttgaaatcatacagtatatagcttttcatgcagtatatagcttttcagattggcttctttcatgtattaatatgcatttaggtttctctgtatcttgtcatgtatatgtagctcattttttttttagtgtagaataaaattttattgtctggttctaccacatttcatttgtccatgcacctattgaagaacatctcagttgcttccatgttttggcgattatgaataaagcgactataaacatccatg

SEQ ID NO: 232316 - protein, 178 aa, Artificial Sequence
  derived and/or modified sequence
MSTPPLAASGMAPGPFAGPQAQQAAREVNTASLCRIGQETVQDIVYRTMEIFQLLRNMQLPNGVTYHTGTYQDRLTKLQDNLRQLSVLFRKLRLVYDKCNENCGGMDPIPVEQLIPYVEEDGSKNDDRAGPPRFASEERREIAEVNKKLKQKNQQLKQIMDQLRNLIWDINAMLAMRN

SEQ ID NO: 232317 - DNA, 537 bp, Artificial Sequence
  derived and/or modified sequence
atgagtacgcctcccttagcagccagcggcatggcacccggacctttcgcagggccccaggctcagcaggccgcaagggaggtgaatactgcatccctgtgtagaatcggacaggagaccgtgcaggatatcgtctatcgtaccatggagatcttccaattgttgcggaatatgcagcttcctaacggggttacctaccataccggcacctatcaggatagactgacgaagttacaggacaatttgcgccagctgagtgtgctattccgcaaactccgtctggtttacgacaagtgcaacgagaattgcggaggtatggatcccatccctgtagaacagctaatcccatatgtggaggaggatggaagcaaaaatgacgatagggcgggtcctcctagattcgctagtgaggagaggcgggaaatcgcagaggtgaacaagaagctgaagcagaaaaaccagcaactaaagcagatcatggaccagctgagaaacctaatctgggacattaatgccatgcttgccatgcggaattag

SEQ ID NO: 232318 - DNA, 537 bp, Artificial Sequence
  derived and/or modified sequence
atgagcaccccacccctggccgccagcggcatggcccctggcccctttgctggcccccaggcccagcaggccgcccgggaggtgaacacagccagcctgtgccgcatcggccaggagaccgtgcaggacatcgtgtaccgcaccatggagatcttccagctgctgaggaacatgcagctgcccaacggggtgacctaccacacaggcacctaccaggaccggctgaccaagctgcaggacaacctgcggcagctgtctgtgctcttcaggaagctgcggctggtgtatgacaagtgcaatgaaaactgtggcggcatggaccccatccctgtggagcagctgatcccctacgtggaggaggatggcagcaagaatgatgacagagctggccccccaagatttgccagcgaggagcggcgggagattgctgaggtgaacaagaagctgaagcagaagaaccagcagctgaagcagatcatggaccagctgaggaacctgatctgggacatcaatgccatgctggccatgagaaattag

SEQ ID NO: 232319 - DNA, 985 bp, Artificial Sequence
  derived and/or modified sequence
gtgttacgtcacagtgggcggaagtcgcggccgctgttttgaaatcgggccgcggggggtctctcaagctggttccaacgctgaggccccacagcctcccaattccgggcagacccctgacacctgctgtctggccccttccggcctgaagctgcagccgcgccatgtccacccctccgttggccgcgtcggggatggcgcccgggcccttcgccgggccccaggctcagcaggccgcccgggaagtcaacacggcgtcgctgtgccgcatcgggcaggagacagtgcaggacatcgtgtaccgcaccatggagatcttccagctcctgaggaacatgcagctgccaaatggtgtcacttaccacactggaacatatcaagaccggttaacaaagctacaggataatcttcgccaactttcagttctcttcaggaagctgagattggtatatgacaaatgcaatgaaaactgtggtgggatggatcccattccagtcgagcaacttattccatatgtggaagaagatggctcaaagaatgatgatcgggctggcccacctcgttttgctagtgaagagaggcgagaaattgctgaagtaaataaaaaactcaaacagaagaatcaacagctgaaacaaattatggatcaattacgaaatctcatctgggatataaatgccatgttggcaatgaggaactaagctgatatttaaatttcctgctttacacatgttataccattgttttttccctcaagtattttttccctgtgaagaagattatttatctgcttttattttagtcactaaaactaaagtttttatttttacattgtgatttttacattaaaatattaactttttttaatgctattttatgaaagattattgtaataaactttgatggggtttgtattttggttaatcttcatgaattgaataattgtttttttaaagcaaaataaagttttttaaataaatgttaa

SEQ ID NO: 232320 - DNA, 537 bp, Artificial Sequence
  derived and/or modified sequence
atgagcaccccccccctggccgccagcggcatggcccccggccccttcgctggaccacaagcgcagcaagccgctcgggaggttaacaccgcctcactctgcaggattggtcaagagaccgtacaggacattgtttatcggaccatggagattttccagctcctacgaaatatgcagctgcctaatggagtgacctatcacactggcacttaccaagaccgactcaccaaactccaagataacctaagacaactgagcgtactgttcaggaagttacggctagtttacgataagtgtaacgaaaattgcggaggcatggacccaatccctgtcgagcagctgattccatacgtagaagaggatgggagtaagaatgacgaccgtgcaggacctccccggtttgcctccgaagaaaggcgcgagatcgctgaagttaacaaaaaactcaagcaaaagaatcagcagctgaagcaaattatggaccagctgcggaacttgatatgggacatcaacgctatgctggccatgcggaattag

SEQ ID NO: 232321 - DNA, 537 bp, Artificial Sequence
  derived and/or modified sequence
atgagcacaccgcctttggccgcatcggggatggctccaggccctttcgctggaccacaggcccagcaggcagcacgtgaggtgaataccgcgtcactgtgtaggatcggccaggagacagtgcaggacatagtgtacaggaccatggaaatatttcagctcctacggaatatgcagctgcccaatggggtgacctaccacacaggcacttatcaggatcggctcaccaaactccaagacaatttgcgtcaactcagcgttctttttaggaaactgcggctcgtgtacgacaagtgcaatgaaaactgcggcggtatggacccaattcccgtcgagcagttgataccctacgtcgaggaggatggaagcaaaaacgacgatcgagctgggcctccacggttcgcctctgaagaacgcagagagatcgctgaggtgaataaaaaactgaagcagaagaatcagcagctgaagcagataatggaccagctgcgaaacctgatctgggacattaacgccatgttagctatgagaaattag

SEQ ID NO: 232322 - DNA, 537 bp, Artificial Sequence
  derived and/or modified sequence
atgagcaccccccccctggccgccagcggcatggcccccggccccttcgccggcccccaggcccagcaggccgccagagaggtgaacaccgccagcctgtgcagaatcggccaggagaccgtgcaggacatcgtgtacagaaccatggagatcttccagctgctgagaaacatgcagctgcccaacggcgtgacctaccacaccggcacctaccaggacagactgaccaagctgcaggacaacctgagacagctgagcgtgctgttcagaaagctgagactggtgtacgacaagtgcaacgagaactgcggcggcatggaccccatccccgtggagcagctgatcccctacgtggaggaggacggcagcaagaacgacgacagagccggcccccccagattcgccagcgaggagagaagagagatcgccgaggtgaacaagaagctgaagcagaagaaccagcagctgaagcagatcatggaccagctgagaaacctgatctgggacatcaacgccatgctggccatgagaaactag

SEQ ID NO: 232323 - protein, 319 aa, Artificial Sequence
  derived and/or modified sequence
MCSLPVPREPLRRVAVTGGTHGNEMSGVYLARHWLHAPAELQRASFSAVPVLANPAATSGCRRYVDHDLNRTFTSSFLNSRPTPDDPYEVTRARELNQLLGPKASGQAFDFVLDLHNTTANMGTCLIAKSSHEVFAMHLCRHLQLQYPELSCQVFLYQRSGEESYNLDSVAKNGLGLELGPQPQGVLRADIFSRMRTLVATVLDFIELFNQGTAFPAFEMEAYRPVGVVDFPRTEAGHLAGTVHPQLQDRDFQPLQPGAPIFQMFSGEDLLYEGESTVYPVFINEAAYYEKGVAFVQTEKFTFTVPAMPALTPAPSPAS

SEQ ID NO: 232324 - DNA, 960 bp, Artificial Sequence
  derived and/or modified sequence
atgtgttctcttcccgttccccgtgaaccgttgaggcgtgtggctgtcacgggcgggacacacgggaacgagatgtctggggtgtatctcgcacgccactggctgcacgcaccagccgagctacagcgggcctccttcagtgctgtccctgtcttggcgaatccggcggctacctccggatgtaggcgatatgtggatcatgacctgaacaggacatttaccagcagctttcttaattccaggcccactccagatgacccctacgaagtgacacgtgcacgcgagctcaatcagctcctcggcccaaaggcttctgggcaggctttcgatttcgttcttgaccttcataacactacagccaacatgggtacatgtttaatcgccaagagtagccacgaggtcttcgccatgcacctgtgcagacacttgcagcttcagtaccctgagttaagttgtcaagttttcctgtaccagagaagcggagaagaatcttataacttggattcagtggctaaaaacggcctggggctcgaactgggcccccagccccagggcgtgctccgggcagacatattctcaagaatgaggaccttggttgctaccgttttggattttatcgagctgtttaatcagggtactgcattccccgccttcgagatggaggcctacaggcctgtgggtgtagtggattttccacgcaccgaggcgggacatcttgctggtacagtacacccacagttacaagacagagacttccaacctctgcagcccggtgcccctatcttccaaatgttctcaggagaggatctcctgtatgaaggagaaagcacagtatacccggtgtttattaacgaggctgcctattacgagaagggggttgccttcgtccagaccgaaaaatttacattcaccgtccccgccatgcctgccctgactcccgcacccagtccagcttcatag

SEQ ID NO: 232325 - DNA, 960 bp, Artificial Sequence
  derived and/or modified sequence
atgtgcagcctgcctgtgccccgggagcccctgcggcgggtggccgtgactggaggcacccatggaaatgagatgtctggagtgtacctggcccggcactggctgcacgccccagctgagctgcagagggccagcttctctgctgtgcctgtgctggccaacccagctgccaccagcggctgccgccgctacgtggaccatgacctgaacagaaccttcaccagcagcttcctgaacagccggcccaccccagatgacccctatgaggtgacccgggcccgggagctgaaccagctgctgggccccaaggccagcggccaggcctttgattttgtgctggacctgcacaacaccacagccaacatgggcacctgcctgattgccaagagcagccatgaggtgtttgccatgcacctgtgccgccacctgcagctgcagtacccagagctgagctgccaggtgttcctgtaccagaggtctggagaggagagctacaacctggacagcgtggccaagaatggcctgggcctggagctgggcccccagccccagggcgtgctgcgggctgacatcttcagcaggatgaggaccctggtggccaccgtgctggacttcatcgagctgttcaaccagggcacagccttccctgcctttgagatggaggcctacagacctgtgggcgtggtggacttccccaggacagaggccggccacctggccggcaccgtgcacccccagctgcaggaccgggacttccagcccctgcagcccggggcccccatcttccagatgttcagcggggaggacctgctgtatgaaggagagagcacagtgtaccctgtgttcatcaatgaggccgcctactatgaaaaaggagtggcctttgtgcagacagagaagttcaccttcaccgtgcctgccatgcctgccctgaccccagcccccagccctgccagctag

SEQ ID NO: 232326 - DNA, 960 bp, Artificial Sequence
  derived and/or modified sequence
atgtgcagcctgcccgtgccccgggagcccctgcggcgggtggccgtgacagggggtacacacggtaacgagatgtccggagtgtaccttgctaggcactggctgcacgctcctgcagaactgcagcgggctagcttcagcgcagtgccagtcttggccaacccagccgctacttccggatgcagacgctatgttgaccacgatctgaacaggacattcacgagctcctttcttaacagtcggcccacgcccgacgatccctacgaggtcaccagagctagagaattgaaccagctgctgggtcctaaggcttccggtcaggcatttgacttcgtattagacctacacaacaccactgccaatatgggcacatgtttaatagccaagagctctcatgaagtctttgccatgcacttgtgtcgacatctccagctgcagtacccagaactaagctgtcaagtgttcctctaccagagaagtggcgaagagagttataatctagattccgtggcaaaaaatggtctcgggctggaacttggacctcagccgcagggcgtgctcagagcagacatcttctctcgtatgcgtaccctggtggcaactgtgcttgacttcatcgagctgtttaaccaggggaccgccttccccgccttcgagatggaagcttaccgaccagtcggtgtcgtggactttccacgcaccgaagccggacacctggccggtactgttcatccgcaactccaggaccgcgatttccagccactgcagcctggagctccgatcttccaaatgttctcgggtgaggaccttctctacgagggagaatccacagtgtatcctgtttttatcaacgaggccgcttactacgaaaaaggggtggcatttgtccaaacagaaaagtttacctttaccgttccggctatgccagcgctgactccagctcccagccccgcctcctag

SEQ ID NO: 232327 - DNA, 960 bp, Artificial Sequence
  derived and/or modified sequence
atgtgcagcttgcctgtgcccagagaaccactccggagagtggctgtgactgggggaactcatggcaatgagatgagtggggtctacctggcacgccattggcttcacgcccctgccgagttacaaagagcttctttctcggccgtacctgtgcttgccaatcccgctgctaccagtggctgtcgaaggtacgtcgatcatgatctcaatcgtacgttcacgagcagttttttgaatagccggcctactcccgacgacccctacgaagtgacaagagccagggagttaaaccaactgcttggccctaaggcctctggtcaggcttttgactttgttctggatcttcataacacgacggcgaatatgggcacgtgcctcatagctaagtcctcccatgaggttttcgccatgcatctgtgtagacaccttcagttgcagtacccagagctcagttgccaggtcttcctgtaccaaagaagtggtgaagaaagttacaatctcgacagcgttgcgaaaaacggcctaggactggaactaggaccccagccccagggcgttctccgcgcagatattttttcacgtatgcgcacacttgtcgcaacggtactggacttcatcgagctcttcaaccagggcaccgccttccctgcttttgagatggaggcatataggcctgtcggcgtggttgatttccctagaacagaagcgggacacctggcaggtaccgtccacccccagctgcaggatcgagacttccagcctctgcagcccggtgctccaatttttcagatgttctccggcgaggacttgttgtacgagggagagtcaacagtgtaccctgtcttcatcaatgaagccgcatattacgaaaagggggttgcctttgttcaaactgagaagtttacatttaccgtgcctgcgatgcccgcactcacgccagccccaagcccagcctcatag

SEQ ID NO: 232328 - DNA, 1300 bp, Artificial Sequence
  derived and/or modified sequence
cggagtgacagccccacgggccacgcagcaagcagaagatccccgggagtcaccctcaaccctctggggccacgtgggcccatgaataccagcctgtctgcgagttagacgccagtcctggtggcccgggaagcccagatccgcatcagcggttctgcaccccacaccagcatgtgctcactgcctgtgccccgggagcccctgcgtcgcgtggctgtgactgggggcacgcatggcaacgagatgtcgggcgtctacctggcccggcactggctgcatgcccccgcagagctgcagagagccagcttctccgctgtgcctgtgctggccaacccggcagccacatccggctgccgccgctacgtggaccatgacctcaaccgcaccttcaccagcagcttcctcaattccaggcccaccccggacgacccatatgaggtgacaagagcccgagagctgaaccagctgctggggcccaaggcctcgggccaggcctttgactttgtccttgacctgcacaacaccacggccaacatgggcacctgcttaatcgcgaagtcctcccacgaagtctttgccatgcacctgtgccgccatctgcagctgcagtaccccgagctgtcctgccaggtcttcctgtaccagcggtctggggaggagagctacaacctggactctgtggccaaaaatggactgggtctggagctgggcccccagccacagggtgtgctgcgggctgacattttctcaaggatgaggaccctggtggccacagttctggacttcatcgaactcttcaaccagggtacggcctttcctgcctttgagatggaagcctatagacccgtgggcgtcgtggacttcccccgcaccgaggccgggcacctggcaggcactgtgcatcctcagctgcaggaccgagacttccagccactgcagcctggtgctcccatcttccagatgttcagtggggaggacctgctctatgagggagagtccacggtgtaccccgtgttcattaacgaggctgcctactatgagaagggcgttgcctttgtccagactgagaagttcacattcaccgtgcctgccatgcccgcgctgacccctgccccgagcccagcttcctaacccaagacacacctccccaacctcagtcttcccatctgaacgatgggtcctgaggcacagctctgagcacagaggtcccttctgccacctaccatgcaccatgttccttgccaggcctccccaacccctggcctcaatttccctttctataaaatggaagatgtccaga

SEQ ID NO: 232329 - DNA, 960 bp, Artificial Sequence
  derived and/or modified sequence
atgtgcagcctgcccgtgcccagagagcccctgagaagagtggccgtgaccggcggcacccacggcaacgagatgagcggcgtgtacctggccagacactggctgcacgcccccgccgagctgcagagagccagcttcagcgccgtgcccgtgctggccaaccccgccgccaccagcggctgcagaagatacgtggaccacgacctgaacagaaccttcaccagcagcttcctgaacagcagacccacccccgacgacccctacgaggtgaccagagccagagagctgaaccagctgctgggccccaaggccagcggccaggccttcgacttcgtgctggacctgcacaacaccaccgccaacatgggcacctgcctgatcgccaagagcagccacgaggtgttcgccatgcacctgtgcagacacctgcagctgcagtaccccgagctgagctgccaggtgttcctgtaccagagaagcggcgaggagagctacaacctggacagcgtggccaagaacggcctgggcctggagctgggcccccagccccagggcgtgctgagagccgacatcttcagcagaatgagaaccctggtggccaccgtgctggacttcatcgagctgttcaaccagggcaccgccttccccgccttcgagatggaggcctacagacccgtgggcgtggtggacttccccagaaccgaggccggccacctggccggcaccgtgcacccccagctgcaggacagagacttccagcccctgcagcccggcgcccccatcttccagatgttcagcggcgaggacctgctgtacgagggcgagagcaccgtgtaccccgtgttcatcaacgaggccgcctactacgagaagggcgtggccttcgtgcagaccgagaagttcaccttcaccgtgcccgccatgcccgccctgacccccgcccccagccccgccagctag

SEQ ID NO: 232330 - protein, 342 aa, Artificial Sequence
  derived and/or modified sequence
MAAEEEDEVEWVVESIAGFLRGPDWSIPILDFVEQKCEVFDDEEESKLTYTEIHQEYKELVEKLLEGYLKEIGINEDQFQEACTSPLAKTHTSQAILQPVLAAEDFTIFKAMMVQKNIEMQLQAIRIIQERNGVLPDCLTDGSDVVSDLEHEEMKILREVLRKSKEEYDQEEERKRKKQLSEAKTEEPTVHSSEAAIMNNSQGDGEHFAHPPSEVKMHFANQSIEPLGRKVERSETSSLPQKDLKIPGLEHASIEGPIANLSVLGTEELRQREHYLKQKRDKLMSMRKDMRTKQIQNMEQKGKPTGEVEEMTEKPEMTAEEKQTLLKRRLLAEKLKEEVINK

SEQ ID NO: 232331 - DNA, 1029 bp, Artificial Sequence
  derived and/or modified sequence
atggccgccgaggaggaggacgaggtggagtgggtggtggagagcatcgccggcttcctgagaggccccgactggagcatccccatcctggacttcgtggagcagaagtgcgaggtgttcgacgacgaggaggagagcaagctgacctacaccgagatccaccaggagtacaaggagctggtggagaagctgctggagggctacctgaaggagatcggcatcaacgaggaccagttccaggaggcctgcaccagccccctggccaagacccacaccagccaggccatcctgcagcccgtgctggccgccgaggacttcaccatcttcaaggccatgatggtgcagaagaacatcgagatgcagctgcaggccatcagaatcatccaggagagaaacggcgtgctgcccgactgcctgaccgacggcagcgacgtggtgagcgacctggagcacgaggagatgaagatcctgagagaggtgctgagaaagagcaaggaggagtacgaccaggaggaggagagaaagagaaagaagcagctgagcgaggccaagaccgaggagcccaccgtgcacagcagcgaggccgccatcatgaacaacagccagggcgacggcgagcacttcgcccacccccccagcgaggtgaagatgcacttcgccaaccagagcatcgagcccctgggcagaaaggtggagagaagcgagaccagcagcctgccccagaaggacctgaagatccccggcctggagcacgccagcatcgagggccccatcgccaacctgagcgtgctgggcaccgaggagctgagacagagagagcactacctgaagcagaagagagacaagctgatgagcatgagaaaggacatgagaaccaagcagatccagaacatggagcagaagggcaagcccaccggcgaggtggaggagatgaccgagaagcccgagatgaccgccgaggagaagcagaccctgctgaagagaagactgctggccgagaagctgaaggaggaggtgatcaacaagtag

SEQ ID NO: 232332 - DNA, 2048 bp, Artificial Sequence
  derived and/or modified sequence
ttaactggttggtagcttctatcctgggggctgagcgactgcgggccagctcttcccctactccctctcggctccttgtggcccaaaggcctaaccggggtccggcggtctggcctagggatcttccccgttgcccctttggggcgggatggctgcggaagaagaagacgaggtggagtgggtagtggagagcatcgcggggttcctgcgaggcccagactggtccatccccatcttggactttgtggaacagaaatgtgaagtttttgatgatgaagaagaaagcaaattgacctatacagagattcatcaggaatacaaagaactagttgaaaagctgttagaaggttacctcaaagaaattggaattaatgaagatcaatttcaagaagcatgcacttctcctcttgcaaagacccatacatcacaggccattttgcaacctgtgttggcagcagaagattttactatctttaaagcaatgatggtccagaaaaacattgaaatgcagctgcaagccattcgaataattcaagagagaaatggtgtattacctgactgcttaaccgatggctctgatgtggtcagtgaccttgaacacgaagagatgaaaatcctgagggaagttcttagaaaatcaaaagaggaatatgaccaggaagaagaaaggaagaggaaaaaacagttatcagaggctaaaacagaagagcccacagtgcattccagtgaagctgcaataatgaataattcccaaggggatggtgaacattttgcacacccaccctcagaagttaaaatgcattttgctaatcagtcaatagaacctttgggaagaaaagtggaaaggtctgaaacttcctccctcccacaaaaagacctgaagattcctggcttagagcatgcgagcattgaaggaccaatagcaaacttatcagtacttggaacagaagaacttcggcaacgagaacactatctcaagcagaagagagataagttgatgtccatgagaaaggatatgaggactaaacagatacaaaatatggagcagaaaggaaaacccactggggaggtagaggaaatgacagagaaaccagaaatgacagcagaggagaagcaaacattactaaagaggagattgcttgcagagaaactcaaagaagaagttattaataagtaataattaagaacaatttaacaaaatggaagttcaaattgtcttaaaaataaattatttagtccttacactgagccttttagtttcgaacacttttgtaaatccaaatatcttaaacactttaggtaaaggacagtagggaaggcagctactcatactgattagtttaatacaaattcctggatgttttcccttggaaagagggtatagaaggaaactagttgatagtatgttcattcattcaaactcggttacctactgtttgtgccaggcattgtgctaagcactaaggatacaggagtcaactagattgacagggtcactgccttcatggggctagtggagagggcccaaagacgaaactgttagaaaggcaaagtgtagtgtcctatgagcagggctggctaagcctctttaagctgaatggaaggttaattacacaaagaataggtaaggaacagttcaggttctgcagcaggaaataaagcatatactgaaaaactggagtatatatatgagtggagacggttagcatatgaaattggagacaggtgggggactgacagtgcagagtcttacagggaatgtgaggatttaatttttttaaaaattattttagagacaggatcttgctctgctgcccaggctggcgtgcagttgcacaatcccagctctggattttaaattttgtaataccagcagtgtcaagtcattgaaaaattttaatgcaggggccaggcacggtggctgacactgtaatcccagcactttgggaggccgaggtggacagattgcttgagcccaggagtttgagatcagcctgggcaacatggcaaaaccctgtatctactaaaaatacaaaaaattagctagg

SEQ ID NO: 232333 - DNA, 1029 bp, Artificial Sequence
  derived and/or modified sequence
atggctgctgaggaggaagacgaggtggaatgggtagtcgagagtattgccgggttcctccgcggccccgattggagtatcccaatccttgattttgtagagcagaagtgcgaagttttcgacgacgaagaagaaagtaagctcacttatacagaaatccaccaggagtacaaagagctggtcgaaaaacttctcgaggggtacctgaaggaaattgggattaacgaggatcagtttcaggaggcgtgcacatcccctttagcaaagactcacacctctcaagctattctccaaccggtgctggccgccgaagatttcacaatcttcaaagcgatgatggtgcagaaaaatatagagatgcagctgcaggcaattcgcatcatacaggagaggaacggagtgcttcccgactgtttaacggatggctccgatgttgtgagtgacttagaacacgaggagatgaagattttaagagaggtcctcaggaaatcgaaggaagaatatgaccaggaagaagaacggaaaagaaagaaacagcttagtgaggccaagaccgaggagccaaccgttcacagttccgaggctgcaattatgaataacagtcagggtgatggggaacatttcgctcacccgccatctgaagtcaaaatgcacttcgcgaatcaaagtatcgagcctttaggccgtaaagtggaacgatcagaaaccagctccctcccacagaaagaccttaaaataccagggctcgagcatgcctcaatcgaaggccccattgccaacctgtccgtgctggggacagaagagttacgacagcgtgagcactacctgaaacaaaagagggataagctgatgagtatgaggaaggatatgcggacaaagcaaattcagaatatggaacaaaagggcaagccaacaggcgaggttgaggaaatgactgaaaagccggaaatgaccgcagaggagaaacagaccttacttaagaggagactgctcgccgagaagctcaaggaggaagttataaacaagtag

SEQ ID NO: 232334 - DNA, 1029 bp, Artificial Sequence
  derived and/or modified sequence
atggctgctgaggaggaggatgaggtggagtgggtggtggagagcattgctggcttcctgcggggccctgactggagcatccccatcctggactttgtggagcagaagtgtgaggtgtttgatgatgaggaggagagcaagctgacctacacagagatccaccaggagtacaaggagctggtggagaagctgctggagggctacctgaaggagatcggcatcaatgaagaccagttccaggaggcctgcaccagccccctggccaagacccacaccagccaggccatcctgcagcctgtgctggccgctgaggacttcaccatcttcaaggccatgatggtgcagaagaacatcgagatgcagctgcaggccatccgcatcatccaggagagaaatggagtgctgcctgactgcctgacagatggcagtgatgtggtgtctgacctggagcacgaggagatgaagatcctgcgggaggtgctgaggaagagcaaggaggagtatgaccaggaggaggagaggaagaggaagaagcagctgtctgaggccaagacagaggagcccaccgtgcacagcagcgaggccgccatcatgaacaacagccagggagatggagagcactttgcccaccccccatctgaggtgaagatgcactttgccaaccagagcattgagcccctgggcaggaaggtggagaggtctgagaccagcagcctgccccagaaggacctgaagatccctggcctggagcacgccagcattgagggccccatcgccaacctgtctgtgctgggcacagaggagctgcggcagcgggagcactacctgaagcagaagagggacaagctgatgtccatgaggaaggacatgaggaccaagcagatccagaacatggagcagaagggcaagcccactggagaggtggaggagatgacagagaagccagagatgacagctgaggagaagcagaccctgctgaagaggcggctgctggccgagaagctgaaggaggaggtgatcaacaagtag

SEQ ID NO: 232335 - DNA, 1029 bp, Artificial Sequence
  derived and/or modified sequence
atggccgccgaggaggaggacgaggtggagtgggtggtggagagcatcgctgggtttctccggggacccgactggagcattcccattcttgatttcgttgaacagaaatgcgaagtgtttgacgacgaggaagaaagcaaacttacatatacagagatccatcaggagtacaaggagctggtggaaaagctgttggagggctatctgaaggagattggtatcaacgaagatcagtttcaagaggcatgcacctctcccctcgccaaaacccacacctctcaggctatcctacagccagtactggctgccgaagacttcacgatattcaaagcgatgatggtgcagaaaaatatcgagatgcagctccaggcgattaggatcattcaggagaggaacggggttctgcctgattgcctgacggatgggtcggacgtagtgtcagacctggagcacgaggaaatgaagatactccgcgaggtgttgcggaaaagcaaagaggagtacgatcaggaggaggaacggaagcggaaaaagcagctgagcgaggctaaaaccgaggaaccaaccgtacactcttctgaggcggctatcatgaataactcacagggggacggagaacactttgcccatccaccaagcgaggtaaagatgcattttgctaaccagtctatcgaacccttaggtcggaaagttgagcggtcagagacctcatccctgccacagaaggacctgaaaatcccaggacttgagcatgcatccatcgaggggcccattgccaacctgagcgtgctggggaccgaggagctgaggcagagggaacattatttgaaacagaaacgggataaactaatgagtatgagaaaagacatgcgcaccaaacaaatccagaacatggaacagaagggcaagcctacaggggaggtggaggaaatgaccgagaaaccggaaatgaccgccgaagagaagcagacccttctgaagagaaggctgctggcagagaagctgaaggaagaagtgattaacaaatag

SEQ ID NO: 232336 - DNA, 1029 bp, Artificial Sequence
  derived and/or modified sequence
atggcagcggaggaggaggacgaagtggagtgggtggtcgagtcaatcgctggtttccttagaggaccagactggtctatcccaatcttggattttgtggaacagaagtgcgaggtgtttgatgatgaggaagagagtaagctgacctacacagagatccatcaggaatataaggaactggtcgagaaattgctggagggttatttgaaagagattggaattaacgaggatcaattccaggaggcatgcacatctccactggctaaaacccacacttcacaggcaatcctccaacccgtgctggcggctgaagactttactatctttaaagccatgatggtccagaagaacatcgagatgcagctgcaggctatccgaatcattcaagagagaaatggagtcctgccagattgccttacagatggctcagacgttgtgagtgatctcgaacacgaggagatgaaaatattgcgggaagtgctgaggaaatcaaaggaagagtacgaccaagaggaggaaagaaaacgcaaaaagcaactgtccgaggccaaaactgaggagccgaccgtgcattcttctgaggcggctatcatgaacaactcgcagggagacggagaacactttgctcatcctccaagcgaggtgaaaatgcactttgccaatcagagcatagaaccgctgggaagaaaggtggagcgttcggagacctcctcccttcctcagaaagacctcaagatccctggtctggagcatgcttccatagaaggacccatcgcaaacctgtctgtcctgggcacagaggagctgaggcagagagagcattacctcaagcagaaacgagacaaattaatgagcatgcgtaaggatatgaggactaaacaaattcaaaatatggaacagaagggcaaacccacaggggaggtggaagagatgactgagaagccagaaatgaccgccgaggaaaagcaaacattgctgaagagaagattgctcgcagagaaacttaaagaggaagtgattaacaaatag

SEQ ID NO: 232337 - protein, 252 aa, Artificial Sequence
  derived and/or modified sequence
MSGRRTRSGGAAQRSGPRAPSPTKPLRRSQRKSGSELPSILPEIWPKTPSAAAVRKPIVLKRIVAHAVEVPAVQSPRRSPRISFFLEKENEPPGRELTKEDLFKTHSVPATPTSTPVPNPEAESSSKEGELDARDLEMSKKVRRSYSRLETLGSASTSTPGRRSCFGFEGLLGAEDLSGVSPVVCSKLTEVPRVCAKPWAPDMTLPGISPPPEKQKRKKKKMPEILKTELDEWAAAMNAEFEAAEQFDLLVE

SEQ ID NO: 232338 - DNA, 759 bp, Artificial Sequence
  derived and/or modified sequence
atgtcaggtagacgaacgcgaagcggcggcgccgcccaacgcagtggacccagggctccttcacccactaagcccctccgtaggtctcagagaaagtccggttctgaactaccatctatcctgcccgaaatctggcctaagacaccatctgctgcggctgtgcggaaaccaattgtcctaaagaggattgttgcgcatgccgtggaggttccagcagtacaaagccctaggcgcagccccaggatctccttcttcctcgagaaggagaatgagccacctgggcgagaacttactaaagaagacctgttcaagactcattcagtgcctgcaacaccaacaagcactcctgtccctaatcctgaggccgagagttcgtccaaggaaggagagctcgacgccagagacctcgaaatgtccaagaaggtgcgaagatcttacagccgactcgaaactctggggagtgcaagcacctcaacccccggcaggcgcagctgctttggcttcgagggcctgctgggcgcagaggacttgtccggagtctcaccagtggtgtgtagtaagctcactgaggtaccgagagtctgtgccaagccatgggctccagacatgacgttgcctgggatctcacctcctcccgagaaacaaaagcgtaaaaagaaaaaaatgccagagatcctcaagaccgaattagatgagtgggccgctgccatgaacgcagaattcgaggcggccgagcaatttgatctgctggtggagtag

SEQ ID NO: 232339 - DNA, 759 bp, Artificial Sequence
  derived and/or modified sequence
atgagcggccgccgcaccaggtctgggggcgccgcccagaggagcggcccccgggcccccagccccaccaagcccctgcggcgcagccagaggaagagcggcagcgagctgcccagcatcctgcctgagatctggcccaagacccccagcgctgctgctgtgaggaagcccatcgtgctgaagagaattgtggcccatgctgtggaggtgcctgctgtgcagagccccaggaggagcccccgcatctccttcttcctggagaaggaaaatgagcccccaggccgggagctgaccaaggaggacctcttcaagacccacagcgtgcctgccacccccaccagcacccctgtgcccaaccctgaggccgagagcagcagcaaggagggggagctggatgcccgggacctggagatgagcaagaaggtgagaagaagctacagccggctggagaccctgggcagcgccagcaccagcaccccaggccgccgcagctgcttcggctttgagggcctgctgggcgctgaggacctgagcggcgtgtcccctgtggtgtgcagcaagctgacagaggtgccccgggtgtgtgccaagccctgggccccagacatgaccctgcccggcatcagccccccacctgagaagcagaagaggaagaagaagaagatgcctgagatcctgaagacagagctggatgagtgggccgccgccatgaatgctgagtttgaagctgctgagcagtttgacctgctggtggagtag

SEQ ID NO: 232340 - DNA, 759 bp, Artificial Sequence
  derived and/or modified sequence
atgagcggccggcggacccggagcggcggcgccgcccagcggagcggaccaagagctccgagccctaccaaaccattgcgaagaagccaaaggaagtccggttccgagttaccatccattctacctgaaatttggcctaaaaccccgagcgcagctgccgtgcgaaaaccaattgtgctcaagcggattgttgcacacgctgtcgaggtgcccgcagtgcagagcccacggagatcaccgaggatatcattcttcctagaaaaggaaaacgagcccccaggcagggagttaacaaaggaagatctgttcaaaacccatagtgtgcccgctacacccactagcacccctgtcccaaaccctgaagctgaatcaagcagtaaagagggggagcttgatgctagggacctggagatgagtaagaaggtcagaaggtcttacagccggctggagacactggggtccgcttcaacttctaccccggggcggcggtcatgcttcgggtttgagggactccttggcgctgaggatctgtcaggggtgtctccagtagtctgttccaagttgacagaagtaccgcgtgtttgtgccaagccttgggctcctgacatgaccctgcctggcatttcccccccgcccgaaaagcagaagaggaagaagaagaagatgccagaaattcttaagacagagctggacgaatgggccgcagcaatgaatgccgaatttgaggcggccgagcagtttgatttgctggttgaatag

SEQ ID NO: 232341 - DNA, 759 bp, Artificial Sequence
  derived and/or modified sequence
atgtcaggaagacgaactcgctcaggcggagccgcacagcggagcgggcctcgcgcaccgtcccctactaagccattaagaagatcccagaggaagtctgggtctgaactgccgtctatactgccagagatttggcctaaaactcctagcgccgctgctgtgaggaaaccgatcgtccttaagagaattgtggctcacgccgtggaggtccccgcagtgcagtcacccagacgctcaccacgcatttcctttttccttgagaaagagaatgaacctcccggaagggaattaaccaaggaagatttattcaagacgcattccgttccagccacaccaacatcgactcccgtgcctaaccctgaagccgaaagttcttctaaagagggagagctcgacgcccgtgatctggaaatgagtaagaaggtcagaaggtcttattcacgactcgagactttaggctcggcttctacctctacacccggaagacgctcctgttttggatttgagggattgctgggcgctgaagatttgtctggcgtgtccccagttgtctgcagtaaactgacagaggtgccaagggtctgcgccaagccctgggcccctgacatgactttgccgggtattagtcctcctccggaaaagcaaaaaaggaagaagaaaaagatgcccgagatactcaagacagaactggacgaatgggccgctgcgatgaacgctgagttcgaggccgcagaacaattcgacttgttggttgagtag

SEQ ID NO: 232342 - DNA, 2587 bp, Artificial Sequence
  derived and/or modified sequence
gacgggtggaaaagactcggggttccgagggccgcagaccgctagccctacgtcacttccgcttcctttcccgcagggcgggtaattcgaacgttttttgcagcgagtggccttcccggttggcgcgcgcccggggcggcggcgctggaggagctcgagacggagcctaagttatgtctgggaggcgaacgcggtccggaggagccgctcagcgctccgggccaagggccccatctcctactaagcctctgcggaggtcccagcggaaatcaggctctgaactcccgagcatcctccctgaaatctggccgaagacacccagtgcggctgcagtcagaaagcccatcgtcttaaagaggatcgtggcccatgctgtagaggtcccagctgtccaatcacctcgcaggagccctaggatttcctttttcttggagaaagaaaacgagccccctggcagggagcttactaaggaggaccttttcaagacacacagcgtccctgccacccccaccagcactcctgtgccgaaccctgaggccgagtccagctccaaggaaggagagctggacgccagagacttggaaatgtctaagaaagtcaggcgttcctacagccggctggagaccctgggctctgcctctacctccaccccaggccgccggtcctgctttggcttcgaggggctgctgggggcagaagacttgtccggagtctcgccagtggtgtgctccaaactcaccgaggtccccagggtttgtgcaaagccctgggccccagacatgactctccctggaatctccccaccacccgagaaacagaaacgtaagaagaagaaaatgccagagatcttgaaaacggagctggatgagtgggctgcggccatgaatgccgagtttgaagctgctgagcagtttgatctcctggttgaatgagatgcagtggggggtgcacctggccagactctccctcctgtcctgtacatagccacctccctgtggagaggacacttagggtcccctcccctggtcttgttacctgtgtgtgtgctggtgctgcgcatgaggactgtctgcctttgagggcttgggcagcagcggcagccatcttggttttaggaaatggggccgcctggcccagccactcactggtgtcctgtctcttgtcgtcctgtccttcctatctccccaaagtaccatagccagtttccagatgggccacagactggggaggagaatcagtggcccagccagaagttaaagggctgagggttgaggtgagaggcacctctgctcttgttgggaggggtggctgcttggaaataggcccaggggctctgccagcctcggcctctccctcctgagttgccttctgttggtggctttcttcttgaacccacctgtgtaaagaggttttcagttccgtgggtttcccctttgattctgtaaatagtcccagagagaattcgtgggctgagggcaattctgtcttggaggaagaagctggacattcagcctgtggagtctgagttttgaaggatgtagggagccttagttgggtctcagaccataagtgtgtactacacagaagctgtgttttctagttctggtctgctgttgagatgtttggtaaatgccaggttgatagggcgctggctgcttggagcaaagggtgcatttcagggtgtggccaccaggtgctgtgagtttctgtggctcatggcctctgggctggtcccttgcacagggcccacgctggagtcttaccactctgctgcaggggtggaaggtggcccctcttgtcacccatacccatttcttacaaaataagttacaccgagtctacttggccctagaagagaaagttgaagagtcccagacctactagcattttgcaactatgcttgtaaagtcctcggaaagtttcctcgcgtaccagacagcggcgggggctgatagcaattttagtttttggcctccctatcctctcacatgagaacactgcctggatgcatctcatgatctctggagaatttccccatctttctcttctttccatcgtgtggattcaatagtgtggatttgaaggctgccctgcccccgactctcctgccgcacccctggccattgtaccttttgatgtttagaagttcgtggaagtagacgctgaggtgtgcagaggagctggtggataacagagaatgccagggaagatgagtgctgggtcagggtacttggatgaaacggtgcaggccaggcgggccctaataaaaccctctgccaggtctgggagtcccaggccatctgctcaacgctctgtggtttgtcagacctgcaagcaagccccctgctggggaagcctaggtgtccttgagctgaaccgcactgaagaactcttgtcctcactggctgatgcagcagaactcttgggaaatgtcttagtcctgcagaatcaggagtcaccagatgatgcagagttgagatcatcattgcaaagttctctgttcctgaggaactaaatttaaggaaaaaatgggattttgttttagagttggaaaaaaagcctgattaaagagtttctgcctgttcat

SEQ ID NO: 232343 - DNA, 759 bp, Artificial Sequence
  derived and/or modified sequence
atgagcggcagaagaaccagaagcggcggcgccgcccagagaagcggccccagagcccccagccccaccaagcccctgagaagaagccagagaaagagcggcagcgagctgcccagcatcctgcccgagatctggcccaagacccccagcgccgccgccgtgagaaagcccatcgtgctgaagagaatcgtggcccacgccgtggaggtgcccgccgtgcagagccccagaagaagccccagaatcagcttcttcctggagaaggagaacgagccccccggcagagagctgaccaaggaggacctgttcaagacccacagcgtgcccgccacccccaccagcacccccgtgcccaaccccgaggccgagagcagcagcaaggagggcgagctggacgccagagacctggagatgagcaagaaggtgagaagaagctacagcagactggagaccctgggcagcgccagcaccagcacccccggcagaagaagctgcttcggcttcgagggcctgctgggcgccgaggacctgagcggcgtgagccccgtggtgtgcagcaagctgaccgaggtgcccagagtgtgcgccaagccctgggcccccgacatgaccctgcccggcatcagccccccccccgagaagcagaagagaaagaagaagaagatgcccgagatcctgaagaccgagctggacgagtgggccgccgccatgaacgccgagttcgaggccgccgagcagttcgacctgctggtggagtag

SEQ ID NO: 232344 - protein, 459 aa, Artificial Sequence
  derived and/or modified sequence
MEGSASPPEKPRARPAAAVLCRGPVEPLVFLANFALVLQGPLTTQYLWHRFSADLGYNGTRQRGGCSNRSADPTMQEVETLTSHWTLYMNVGGFLVGLFSSTLLGAWSDSVGRRPLLVLASLGLLLQALVSVFVVQLQLHVGYFVLGRILCALLGDFGGLLAASFASVADVSSSRSRTFRMALLEASIGVAGMLASLLGGHWLRAQGYANPFWLALALLIAMTLYAAFCFGETLKEPKSTRLFTFRHHRSIVQLYVAPAPEKSRKHLALYSLAIFVVITVHFGAQDILTLYELSTPLCWDSKLIGYGSAAQHLPYLTSLLALKLLQYCLADAWVAEIGLAFNILGMVVFAFATITPLMFTGYGLLFLSLVITPVIRAKLSKLVRETEQGALFSAVACVNSLAMLTASGIFNSLYPATLNFMKGFPFLLGAGLLLIPAVLIGMLEKADPHLEFQQFPQSP

SEQ ID NO: 232345 - DNA, 1380 bp, Artificial Sequence
  derived and/or modified sequence
atggagggcagcgccagcccccccgagaagcccagagccagacccgccgccgccgtgctgtgcagaggccccgtggagcccctggtgttcctggccaacttcgccctggtgctgcagggccccctgaccacccagtacctgtggcacagattcagcgccgacctgggctacaacggcaccagacagagaggcggctgcagcaacagaagcgccgaccccaccatgcaggaggtggagaccctgaccagccactggaccctgtacatgaacgtgggcggcttcctggtgggcctgttcagcagcaccctgctgggcgcctggagcgacagcgtgggcagaagacccctgctggtgctggccagcctgggcctgctgctgcaggccctggtgagcgtgttcgtggtgcagctgcagctgcacgtgggctacttcgtgctgggcagaatcctgtgcgccctgctgggcgacttcggcggcctgctggccgccagcttcgccagcgtggccgacgtgagcagcagcagaagcagaaccttcagaatggccctgctggaggccagcatcggcgtggccggcatgctggccagcctgctgggcggccactggctgagagcccagggctacgccaaccccttctggctggccctggccctgctgatcgccatgaccctgtacgccgccttctgcttcggcgagaccctgaaggagcccaagagcaccagactgttcaccttcagacaccacagaagcatcgtgcagctgtacgtggcccccgcccccgagaagagcagaaagcacctggccctgtacagcctggccatcttcgtggtgatcaccgtgcacttcggcgcccaggacatcctgaccctgtacgagctgagcacccccctgtgctgggacagcaagctgatcggctacggcagcgccgcccagcacctgccctacctgaccagcctgctggccctgaagctgctgcagtactgcctggccgacgcctgggtggccgagatcggcctggccttcaacatcctgggcatggtggtgttcgccttcgccaccatcacccccctgatgttcaccggctacggcctgctgttcctgagcctggtgatcacccccgtgatcagagccaagctgagcaagctggtgagagagaccgagcagggcgccctgttcagcgccgtggcctgcgtgaacagcctggccatgctgaccgccagcggcatcttcaacagcctgtaccccgccaccctgaacttcatgaagggcttccccttcctgctgggcgccggcctgctgctgatccccgccgtgctgatcggcatgctggagaaggccgacccccacctggagttccagcagttcccccagagcccctag

SEQ ID NO: 232346 - DNA, 1380 bp, Artificial Sequence
  derived and/or modified sequence
atggagggttctgctagtcctcctgagaaaccacgggcaaggcctgccgccgctgtcctgtgtcggggacccgtcgagcccctggtattcttagcaaatttcgctttggtccttcagggtcctcttaccacacagtacttgtggcatagatttagcgctgatctggggtacaatggaacgaggcagcgaggtggctgctctaaccgctcagctgacccaaccatgcaggaggtcgaaactctgacatcacactggactttatacatgaatgtgggagggttccttgtgggattgttctccagtacactgctcggcgcttggagcgactcagttggtcgaagaccacttctggtgttagctagtctggggttgcttctccaagcactcgtcagcgtctttgttgtgcagctacagctccacgttggatatttcgtgttgggcaggattttgtgcgctctgcttggtgatttcgggggcttactcgcagcaagttttgcgtccgtcgccgatgtgagctcaagtcgttcaagaacatttagaatggccctcctggaagctagtatcggagtggcagggatgctggcaagcctcctgggcggtcactggctcagggctcaagggtacgctaatccgttttggcttgcactcgctctgctgatcgccatgacgctgtatgcagccttctgctttggggaaacgctaaaggaaccgaagtctacaaggctatttacatttcggcatcaccggagtatagttcagctctacgtcgccccagcgcccgagaagtctcggaaacaccttgcactctacagcctggcaatattcgtcgtgattaccgttcatttcggggctcaggacattctgactttatatgaacttagcacccccctctgttgggacagcaagttgatcgggtacggcagtgccgcacagcacttaccttatctgaccagcctcctggcacttaaattacttcagtattgtctggcagatgcatgggtggctgagataggcctcgcttttaatattctgggaatggtagtttttgctttcgctaccatcacgccattgatgttcaccggctacgggctcctctttctgtcactggtaattacccctgtgatccgggccaagctcagtaaactagtacgcgaaacagagcagggtgctctcttctctgctgtagcctgtgtgaactcattagctatgttgaccgcgagtgggatatttaattcactttaccctgccaccctgaactttatgaagggattccctttccttttgggagccggtctgttactgattcccgctgtcctcattggcatgttggagaaggctgacccacaccttgagttccagcaatttccacagtctccttag

SEQ ID NO: 232347 - DNA, 1380 bp, Artificial Sequence
  derived and/or modified sequence
atggagggcagcgccagccccccagagaagccccgggcccggcctgctgctgctgtgctgtgccggggccctgtggagcccctggtgttcctggccaactttgccctggtgctgcagggccccctgaccacccagtacctgtggcaccgcttctctgctgacctgggctacaacggcacccggcagaggggcggctgcagcaacagatctgctgaccccaccatgcaggaggtggagaccctgaccagccactggaccctgtacatgaatgtgggcggcttcctggtgggcctcttcagcagcaccctgctgggcgcctggagcgacagcgtgggcagaagacccctgctggtgctggccagcctgggcctgctgctgcaggccctggtgtctgtgtttgtggtgcagctgcagctgcacgtgggctactttgtgctgggccgcatcctgtgtgccctgctgggggactttggaggcctgctggccgccagctttgcctctgtggctgatgtgagcagcagccgcagcaggaccttcaggatggccctgctggaggccagcattggagtggccggcatgctggccagcctgctgggcggccactggctgcgggcccagggctacgccaaccccttctggctggccctggccctgctgattgccatgaccctgtatgctgccttctgcttcggggagaccctgaaggagcccaagagcaccaggctcttcaccttccgccaccacaggagcatcgtgcagctgtatgtggccccagcccctgagaagagcaggaagcacctggccctgtacagcctggccatctttgtggtgatcaccgtgcactttggagcccaggacatcctgaccctgtatgagctgagcacccccctgtgctgggacagcaagctgattggctacggcagcgctgcccagcacctgccctacctgaccagcctgctggccctgaagctgctgcagtactgcctggctgatgcctgggtggccgagatcggcctggccttcaacatcctgggcatggtggtgtttgcctttgccaccatcacccccctgatgttcaccggctacggcctgctcttcctgagcctggtgatcacccctgtgatccgggccaagctgagcaagctggtgcgggagacagagcagggcgccctcttctctgctgtggcctgtgtgaacagcctggccatgctgacagccagcggcatcttcaacagcctgtacccagccaccctgaacttcatgaagggcttccccttcctgctgggcgccggcctgctgctgatcccagctgtgctgattggcatgctggagaaggctgacccccacctggagttccagcagttcccccagagcccctag

SEQ ID NO: 232348 - DNA, 1380 bp, Artificial Sequence
  derived and/or modified sequence
atggagggcagcgccagcccccccgagaagccccgggcccggcccgccgcggccgtgctgtgcagagggccggtagagccacttgtctttctcgccaacttcgcgctggtgctacagggtccccttaccacccaatacctttggcacagattctctgctgacctcgggtacaacgggacccgacagagaggcggctgcagcaaccgctcagcagaccccacaatgcaggaagtagagaccctcacatctcactggaccttatacatgaacgtgggtggttttttagtcggtctgttctccagcacactgctgggcgcgtggtccgattctgtcggccgacggccgttactcgtcctggcttccttgggactgctgctgcaagccctggtgtctgtctttgtcgtacagctccagcttcacgtagggtactttgtgcttggacgaattttgtgcgccttattaggggatttcggaggcctactggccgctagtttcgcaagcgttgccgacgtgtcgtcatcaaggtcgagaacctttcgtatggcccttcttgaagctagcattggagtggcaggcatgttggctagcctgcttggcgggcattggctacgtgcccagggctacgctaatcctttttggttagcactggctctcctcatcgccatgacactatatgcggcattctgttttggtgagaccctgaaggaaccaaaatctactaggttattcacgtttaggcatcaccgctctattgtccagctatacgtggcccctgcaccggagaagagtaggaagcacttagcgctctattctctcgccatttttgtcgtcatcacagtgcatttcggcgctcaggacatcctgacactgtacgaactaagcacgccgctttgttgggatagcaaactcatagggtatgggtcagctgcacaacacctgccctacctgacctcgctgctggccttgaagctgttgcaatattgtctcgctgacgcttgggttgctgaaattggactcgcgttcaacattctaggaatggtggtgtttgcctttgctacgatcacccccctcatgttcactggttacggtctcctgtttctgagtttggttatcacaccggtgatacgggcaaagttgagtaagctcgtgagagaaacggaacaaggagcattgttcagtgcggtcgcttgcgtgaatagccttgccatgctgactgcatccggaatctttaatagtctgtatccagcaacactcaatttcatgaaggggttcccatttctccttggcgctgggctgcttctgattcccgcagtgctcattggcatgctggagaaagctgatccccatctcgagtttcagcagttcccacagtcaccttag

SEQ ID NO: 232349 - DNA, 1380 bp, Artificial Sequence
  derived and/or modified sequence
atggagggctctgcctcgccccctgagaagcccagagcccgtcccgctgcggcagtgctgtgtcggggacccgttgaacccctagtgtttttagccaacttcgcattggttcttcaggggcctttgacgacacaatatctttggcatcgctttagcgctgacctggggtacaatgggacaaggcagcgaggagggtgctccaataggtctgcagaccctaccatgcaggaggttgagactcttacatcccattggaccttatacatgaacgtcggtgggtttctggttgggctgtttagcagtaccttgctgggtgcctggtcagattccgtaggaaggcgcccactgctggtgctggcctccctgggactactccttcaggctctggtctccgttttcgtggtgcaactgcagctgcacgtggggtacttcgtactggggcgaattttgtgtgctctcttgggtgattttggagggctactggccgcttccttcgcgagtgtggctgatgtcagttcgtcgcggtctagaacttttcgtatggcgctgcttgaggcatctataggagtggcagggatgttagcctcgttacttggtggccactggctgagggcccagggctatgccaatcctttttggttagccctcgcactattgattgcaatgactctttacgccgctttctgctttggggagacacttaaggaacctaagtctacgagactgtttacgtttcgccatcataggagtattgtgcagctgtatgtcgctcccgcacccgagaaatctaggaagcacctcgccctctacagcctggccatttttgtggtcattactgtccatttcggggcacaagacattctgactctgtatgagcttagcacacccttgtgctgggactctaagcttatcggctacggatccgccgcacagcacttgccttacttaacatcgctgctggcattaaagttgttgcagtattgcctggctgacgcttgggtcgcagagatcgggctggcctttaacatactggggatggttgtgtttgccttcgcaactattactccgctgatgtttaccgggtatgggctcttatttctaagtttagtaataacccccgtgatcagggctaagctgagcaaactggtgcgggagactgagcagggcgcactgttctcagccgtcgcgtgcgtcaacagcctagctatgctgaccgcgtcaggcatcttcaattctctttaccccgctaccttgaacttcatgaagggcttccctttccttttgggcgcaggattgttgttgattcctgccgtacttatcggaatgctcgaaaaagcggatccccatctggagtttcagcagttcccacaatccccatag

SEQ ID NO: 232350 - DNA, 6487 bp, Artificial Sequence
  derived and/or modified sequence
acagcgcaagccccacgccacgcgtcgctggtcccaggcagcgagtcgctcgcgcgccccgccgcccgcctggcgacagctccgccgcgcacgcacatggaggggagcgcgagccccccggaaaagccccgcgcccgccctgcggctgccgtgctgtgccggggcccggtagagccgctggtcttcctggccaactttgccttggtcctgcagggcccgctcaccacgcagtatctgtggcaccgcttcagcgccgacctcggctacaatggcacccgccaaagggggggctgcagcaaccgcagcgcggaccccaccatgcaggaagtggagacccttacctcccactggaccctctacatgaacgtgggcggcttcctggtggggctcttctcgtccaccctgctgggagcttggagcgacagtgtgggccgccgcccgctgctagtgctggcctcgctgggcctgctgctccaggccctagtgtccgtttttgtggtgcagctgcagctccacgtcggctacttcgtgctgggtcgcatcctttgtgccctcctcggcgacttcggtggccttctggctgctagctttgcgtccgtggcagatgtcagctccagtcgcagccgcaccttccggatggccctgctggaagccagcatcggggtggctgggatgctggcaagcctcctcgggggccactggctccgggcccagggttatgccaaccccttctggctggccttggccttgctgatagccatgactctctatgcagctttctgctttggtgagaccttaaaggagccaaagtccacccggctcttcacgttccgtcaccaccgatccattgtccagctctatgtggctcccgccccagagaagtccaggaaacatttagccctctactcactggccatcttcgtggtgatcactgtgcactttggggcccaggacatcttaaccctttatgaactaagcacacccctctgctgggactccaaactaatcggctatggttctgcagctcagcatctcccctacctcaccagcctgctggccctgaagctcctgcagtactgcctggccgatgcctgggtagctgagatcggcctggccttcaacatcctggggatggtggtctttgcctttgccactatcacgcctctcatgttcacaggatatgggttgcttttcctgtcattagtcatcacacctgtcatccgggctaaactctccaagctggtgagagagacagagcagggtgctctcttttctgctgtggcctgtgtgaatagcctggccatgctgacggcctccggcattttcaactcactctacccagccactctgaactttatgaaggggttccccttcctcctgggagctggcctcctgctcatcccggctgttctgattgggatgctggaaaaggctgatcctcacctcgagttccagcagtttccccagagcccctgatctgcctggaccagaagacagagggcaagaggagcaaagtgaacaccaagcaactggaggtctgcagctggaagcccagcccacagcaggacaagcaactcttgtctaagggcagtgctctctttggacgaggtagtcaagagagaccaaggcaccaccccatccacagctgacccagcctctgtctaggatctagaatcataacccacacaggcccactgcaggacaggtggcagaggagctatttgggacaggagtcagttctccctttctgctatccatcacttataaccccacaggccagaggagaggtcctgagagaggtgacacttcagggaccagaggcagcacgagggctggcatctctccttccagcccaaactgcacagccccaaccaggttcccaacacgtgtagcagtcatcagccattccttaacaatgaatgtggtacctggttagtgccagccttgggaaggagggagggaggtaagaggggcttggtgatctctggaggaagagtgttgcctttgctgtggttggggaatcgatccttggctatggcctacccactcccctggctgaagagtgccaatcattacaaatcagcttcagcaaactgaaacaaaccttctggtgccttgggctttggggccctctgttttcctgctcccagtctgcctgccatacgttagacaacagaagctgctgggctgggcaggagccctgagctgcctggtggattggtaccaagtggggccagccagggcttctactgactcgctgtgcaaccttgagcaagccccactaggaacggctagatcagcaatgccccaaattgttgaatcgtggtgatcacatttggatggacaagttaggaaacttagctgattctctgagatacttcccacttcctcatacattctacaatgagatgcctctcttcatgggcctggggaaaggatgaatgagtgtggctggacttttgacctttaatgtccctgagcagttcttggcccttggggagaagtagggggaggatctggctgactcagccccaaccgaggggtagcagctgcagcccagccaagcagaacaccctggccctacagacctgtgtctgagcaggctttggaggaaaggccacttctgagtcctctgtctcaggagaagccaggcctaggtgcttgacctggtgatctgagctgtgtttgtcctagtatgggtggcagtcacctctgaacacactggccttggcttagaggaggcttgtgacttcagctgttccagctggggctggatgctggactctgattccctcagagagacagaagatcgggcagaggtcaaccagaaggccacacagggcagtggacaacagtggagggtataccaaatagaaataaaacgcaggaaacctctctgaatactgcccttggggacctcaggagggagtgggactgattggagacaaagagccagaaatcatcccctggagatactcagacactgtattgttattggcgctgtcctgtgagggcagtgtccaggctgccctgcttgtcatatccatgccctggctctggccccggtgagcacttgtgctgcatgaggaaaggaggatcaggtggggtcaaaaccaaagcatcgaggctggcactggccaagacagactctggcagggaggggagtggaaggaaggagccccaaacctggagtgagacctttgactttctgatgatgtggccaagaactaggagtcacctggccagcacagccaagagtggggctgggggcgccagctttaaggtgtcaacacctggcccttgcggggaaagagccttcagcagcccccacggcctggagcctgggtttattggagggtgctttcttaccctctgaacccagtggaggagggggcaatgggatattcctgctctgtatggcctctgggtcagctttttgttgcaaaatcctatcccccgctgctagattctttgaagcaagggagaagcaatagcccagcctcagaatgattctcaggaaagcaattccactgccagtggactgggtgccaggaggcctaggtctggatctggggctgccactaatgacaggaaagtgggcttatcctcaacctttctgagcctcagtgtcattatctgtaaaatggggatgataataccaggtagagttgctctgatgactggagaccatggagcggagtgtttgggaaatggcaaagatttgtgagggcttcgtgctttagagatttgctacccttaaccaccagcatcagctcacctgggaatctgtaagaaatgcagagtcctaggccccaccccagatctcctgattttaacaacattcccaggtgacttggatgcatgttaaagttggagaagctgccctaagtgacaaccctttgccttttcaggactttgcctctttccacagagctgcaggttctgtctaggctgcttttactgccatgggggctgcctggtccctgagtaagcagtgggtagccctggatggctgaggggctggggaagccagctgggccagaccaggaaggagcctgaggcacagcaccaaggcatggggtagggtgggctttgaggcacggcctccccatgcccagacccaggcccaaacaggaggctcctgtgcaccagcaagtgcagcaaagctggctgcagtgacaaggaagtcagagggagggctggtttgcctcaaccctcgccctggatgtggcaaaagataccacaccgaaggaagctgtaggggatctgggacttagtcaggctagctaagggcactgagtgattacagggcaaggccacagagcggcaggaagttgtaagtgcaggggccaggcacagtctgagtggagagccatgatggcactcatccctggctggctcctgggcccaggcctttgctcagaatacagtgcccaggcccgcctgggcattgccttaattcctgtctgaggctgccttccttcatcctcctcaagctgactgctatcagcaggagaagggaatgcagaaccacccccaccccaactccagtgtctccagaactgagcagggaccctccccatgacggagacagacaacccaatggcagggcctgggggagttctaacctcccgtgcccaagcctgacttcccttccctctccagatactgaggaaagtgggttggaggtgggccatgagggtgggggacagggggagggagagccatttcctaagaagagcccaggttgtctcagcccagggagactggtttcaggagctgttccttcagaaaggacgatggaaatggaagtcacagcagggctggggaactggggactggttaggttggacccatgggtgcagcaccctccaaactggtgtcagagcctgcagatgagtcccgggaggagcggccctgcaggaagcggatgatcttctcaatggtggcctcctggtattcgtgggaccacctgtgggcacaggagccaatgtggttcagacagctgggcagagggagctgctagtcagctgtttgcccacactctgcctgtcatggtgatttgtaccctacccccctggtcccagggccctggggctcacttgataccgttgaaagtaagcacagcctgcatgtcctcaggcaggacctggggctcaggccactcgaagccatcaatgatgggcacaatgttcttgccgcagcttaaagcagtcacaatctcctggagaaagaaaggaaaggaggaagatacccctgtacccatctagggacccttgtagccaggcaggtgctgggaggcccactggcccgaggctgggcccagggcaggacaccagtcctgatgtccaccttgatgtctaccttaacccttgtagtgtaataaaaaataaatatttttcctttgcccagagttcctggcacagagctgctaaaacccttggaatctcttgagtgatgagtgtctttgtatgctaaagagatgattccccactgggggcccggggggtgctatgggggtagcctagatagtttcaggaagagggctggtcaccagggagaccagggcatgactagaggattggaactttcagccccacctcccagcctccagagaggtgctggagattgagttcaatcaccaatggccaatgatttaatcaatcatgcctacataatggaacctccataaaaacccccaaacaaggggttttgaagagcctccaggttgataaacaggtgtaggtgctgggaaggtggtagaaggcatggcatccacacctccaccctccatacgtagagatcctatgtatctcttccatttggctattcttgagctgtgtcctttataactgtgaaattaaataattcagctgggcatggtgggtcacgcctgtaatcccaacactttgggaggctgaggcaggaggatcacttgagcccaggattttgagattaataatattatttattactattattcaagctttgttaaatcaaacctaaagctcttggaactttaagttattctgagccttgacaggaattggtctctgcagcctgagtcatggggcatgcagctgcaacttccacctattttttttttttctgtaattacttaggaagaccaaatggcaccagagataagactcccttagatccccacttagatcaccaccctttctcagggggtaataaagtcatcttccttggaatgtagcaatctataaccaatcaaagcactgtaacatacgcactggtcttgtatggaaaatgttgtaatcctgctaaaattcctctctctttgcctgtggaagtgaaaccttaacttctccagtttggaatgctcaccccatgcctttggagtcaatgcttactgggtggctattctcaaactttgcactcaaagaaactctatacttagtcttattttctgaatctcattatttaaggttgacataataaacaactaatagtaagtaaagtg

SEQ ID NO: 232351 - protein, 324 aa, Artificial Sequence
  derived and/or modified sequence
MSVEDGGMPGLGRPRQARWTLMLLLSTAMYGAHAPLLALCHVDGRVPFRPSSAVLLTELTKLLLCAFSLLVGWQAWPQGPPPWRQAAPFALSALLYGANNNLVIYLQRYMDPSTYQVLSNLKIGSTAVLYCLCLRHRLSVRQGLALLLLMAAGACYAAGGLQVPGNTLPSPPPAAAASPMPLHITPLGLLLLILYCLISGLSSVYTELLMKRQRLPLALQNLFLYTFGVLLNLGLHAGGGSGPGLLEGFSGWAALVVLSQALNGLLMSAVMKHGSSITRLFVVSCSLVVNAVLSAVLLRLQLTAAFFLATLLIGLAMRLYYGSR

SEQ ID NO: 232352 - DNA, 975 bp, Artificial Sequence
  derived and/or modified sequence
atgagcgtggaggacggcggcatgcccggcctgggcagacccagacaggccagatggaccctgatgctgctgctgagcaccgccatgtacggcgcccacgcccccctgctggccctgtgccacgtggacggcagagtgcccttcagacccagcagcgccgtgctgctgaccgagctgaccaagctgctgctgtgcgccttcagcctgctggtgggctggcaggcctggccccagggcccccccccctggagacaggccgcccccttcgccctgagcgccctgctgtacggcgccaacaacaacctggtgatctacctgcagagatacatggaccccagcacctaccaggtgctgagcaacctgaagatcggcagcaccgccgtgctgtactgcctgtgcctgagacacagactgagcgtgagacagggcctggccctgctgctgctgatggccgccggcgcctgctacgccgccggcggcctgcaggtgcccggcaacaccctgcccagccccccccccgccgccgccgccagccccatgcccctgcacatcacccccctgggcctgctgctgctgatcctgtactgcctgatcagcggcctgagcagcgtgtacaccgagctgctgatgaagagacagagactgcccctggccctgcagaacctgttcctgtacaccttcggcgtgctgctgaacctgggcctgcacgccggcggcggcagcggccccggcctgctggagggcttcagcggctgggccgccctggtggtgctgagccaggccctgaacggcctgctgatgagcgccgtgatgaagcacggcagcagcatcaccagactgttcgtggtgagctgcagcctggtggtgaacgccgtgctgagcgccgtgctgctgagactgcagctgaccgccgccttcttcctggccaccctgctgatcggcctggccatgagactgtactacggcagcagatag

SEQ ID NO: 232353 - DNA, 975 bp, Artificial Sequence
  derived and/or modified sequence
atgagcgttgaagacggaggaatgcctggtctggggcgtcctaggcaagctcgatggactctcatgctgctgctgtccacagcaatgtacggtgctcacgcaccactactagccctttgccacgtggacggcagggtcccatttcgccctagctctgccgtgcttcttaccgaattgactaaactactcttatgtgcattctcactcctggtaggctggcaggcatggcctcaagggccacctccttggcgtcaggctgccccgtttgccctttcagcgctgctctacggtgcaaataataacttagtgatatacttacagcgctatatggatccaagtacctaccaagtgctgtcaaatttaaaaatcgggtccacagccgtcctgtactgtctgtgcctgcgacacagattgtcagttcggcagggacttgccctactgttgcttatggcggccggggcttgttatgccgccggcggtctgcaggttccagggaataccctgccatcacctcctcctgctgcggctgcctctcctatgcctttacatatcactccactaggtttattgttactgatcctttactgcttgatttccggcctgtcctcggtgtatactgagctgttaatgaagagacagaggcttcccctggcactgcagaatctgttcctgtacactttcggggtactgcttaacttgggactgcacgccggtggggggagtggcccaggactcttggagggcttctcaggctgggccgccctggtagtgctcagccaagcccttaatggcctgctcatgagcgccgtcatgaagcacgggtctagtattactcgcctgtttgtggtttcgtgctcactggtcgtgaacgcagtgttgtcagcggtgctgctccgtctacagctaaccgctgccttctttctggccacccttcttatagggctggcaatgagactgtattatgggtcccgttag

SEQ ID NO: 232354 - DNA, 537 bp, Artificial Sequence
  derived and/or modified sequence
atgcccctcattctgtctatcctgtctggaaatgtgcctcgactccttctccccggaagctggctccacaatctgattttcccgaaaagagtggcaattcctgctgcccctggcacatccgagcccttgcccctgcacttctggtgcgcgtccgagagcagaagcgcctgctggcgacggctctggccccggccacctgggagattcctacgcatgggtagtacaaggggcgctgaacctggaactaagtggacagcgcatgtgtgttgccacgaggcttggcaacagcatcatactccattgtgtggcgttctgctggctggtggccagaggcgcgccctcagctcccctgccacagctgcagcccacagtaggcttttacccggccacattgcacattggcccggccacgcacctgtgttgtggcagccccttgttcccgacaattttcatccagattccggcccctgcagactcggtgctacgacccgtagcccctcgcaagccttcctaccattaccttcagcagcactgtag

SEQ ID NO: 232355 - DNA, 975 bp, Artificial Sequence
  derived and/or modified sequence
atgtctgtggaagatggcggcatgccaggcttagggcggcccaggcaggcccgctggacactgatgttgctgctcagcactgccatgtacggagctcatgcccctttgctggctctgtgtcatgttgatgggcgggtgccgtttcggccaagtagtgctgttctgctcacagaactgaccaaacttcttttgtgcgctttcagcctcctggttggctggcaggcctggccccaaggcccgcccccttggagacaagctgccccgttcgctctgtccgccctactatatggggcaaacaacaacttagtcatttatctgcagagatacatggacccaagtacgtatcaggttctaagtaatctaaagataggcagcacggcagtgctgtattgtttgtgtctcaggcatagactctctgtgaggcaagggctcgccctccttctcctgatggccgctggagcttgctacgctgcaggtggcttgcaagtgccgggaaatacactgcccagtcccccaccagccgctgccgccagcccaatgcctctgcacatcacccctctgggcctactgcttctcatattatactgcctgataagcgggctttcatcggtctatactgagctgctgatgaaaaggcaaagactacccctcgccctccagaatctatttctctacacttttggtgtgctcctgaacctgggcctgcacgccggcggtgggtctggccctggactgctggaaggtttctccgggtgggccgcacttgtggttctttcgcaggctttgaatggtctgttgatgtccgctgtgatgaagcacggctccagcattactaggctctttgtggtgagctgctcattggtggttaacgctgtcctgtccgcggtccttctgaggcttcagctcactgctgccttttttctggcaacactcttaattggcctcgcaatgcggctttactatggatcccggtag

SEQ ID NO: 232356 - DNA, 975 bp, Artificial Sequence
  derived and/or modified sequence
atgtctgtggaggatggcggcatgcctggcctgggccggccccggcaggcccgctggaccctgatgctgctgctgagcacagccatgtacggggcccacgcccccctgctggccctgtgccacgtggatggccgggtgcccttccggcccagcagcgctgtgctgctgacagagctgaccaagctgctgctgtgtgccttcagcctgctggtgggctggcaggcctggccccagggccccccaccctggaggcaggccgccccctttgccctgagcgccctgctgtatggagccaacaacaacctggtgatctacctgcagcgctacatggaccccagcacctaccaggtgctgagcaacctgaagattggcagcacagctgtgctgtactgcctgtgcctgcggcaccggctgtctgtgcggcagggcctggccctgctgctgctgatggccgccggggcctgctatgctgctgggggcctgcaggtgcccggcaacaccctgcccagccccccacctgctgctgctgccagccccatgcccctgcacatcacccccctgggcctgctgctgctgatcctgtactgcctgatcagcggcctgagctctgtgtacacagagctgctgatgaagaggcagaggctgcccctggccctgcagaacctcttcctgtacacctttggagtgctgctgaacctgggcctgcatgctgggggcggcagcggccctggcctgctggagggcttcagcggctgggccgccctggtggtgctgagccaggccctgaatggcctgctgatgtctgctgtgatgaagcacggcagcagcatcacccggctgtttgtggtgtcctgcagcctggtggtgaatgctgtgctgtctgctgtgctgctgcggctgcagctgacagctgccttcttcctggccaccctgctgattggcctggccatgaggctgtactacggcagcaggtag

SEQ ID NO: 232357 - DNA, 975 bp, Artificial Sequence
  derived and/or modified sequence
atgagcgtggaggacggcggcatgcccggcctgggccggccccggcaggcccgttggaccctaatgttgttactcagcacagcgatgtacggtgcccatgccccactactcgctctctgccacgtggacggccgtgtccctttccgtccaagtagtgccgtcctgctgactgaacttaccaaactccttctctgcgccttttccttgctggtggggtggcaggcttggcctcagggcccaccaccatggcgccaagctgccccatttgcactgtccgccctgctatatggtgccaataataaccttgtgatctatttgcagcgttatatggatccctccacatatcaagtcctctctaatctgaagattgggagtactgcggtactgtattgtttgtgtctgcggcaccggctctctgttaggcagggccttgcactacttcttctaatggcggccggagcgtgctatgccgcgggcgggctccaggtgccgggcaataccctgccctcccctccgcccgcagcggcagcctctcctatgccgctgcacatcacccctcttggcctgctgttactgatcttgtactgccttataagcggtctctcttcagtctatacagaacttctgatgaaacgccaacgcctccccctcgctctgcagaatctctttctgtatacattcggcgtcttgttgaaccttggtttgcacgcaggtggtggaagtggtccggggctcctagagggatttagcggctgggcagctctagtggtgctgtcgcaggcgctgaatgggctcctgatgagcgccgtcatgaaacacggcagctccatcacccgactgtttgtggtgtcttgtagcctcgtagtaaatgcagttctcagcgcggtgctcctgagactgcagttgaccgccgcattcttccttgccacattgctgatcggtctggcaatgaggctctattatggaagcagatag

SEQ ID NO: 232358 - DNA, 537 bp, Artificial Sequence
  derived and/or modified sequence
atgcccctgatcctgagcatcctgagcggcaacgtgccccggctgctattaccgggctcctggctccacaatttaatcttccccaagcgggtggccattccagccgcaccaggcaccagtgagcctctcccacttcacttctggtgtgcatccgaaagccgatctgcgtgttggaggcggctctggccacgaccgccaggaagatttttaagaatgggcagcacacgcggcgccgagccaggtacaaagtggacagcacacgtatgttgtcatgaggcatggcagcagcatcatacacccctttgtggcgtgctgctggccggaggacagcgccgagccctcagttcccctgctacagccgcagctcattccaggctacttcctggccacattgcgcactggccaggccacgctcccgtcttgtggcagcctctcgtgcccgataatttccaccctgactctggaccctgtcggcttggcgccacaactcgcagtcccagtcaggcttttctgccactgccgagtgctgctctctag

SEQ ID NO: 232359 - DNA, 975 bp, Artificial Sequence
  derived and/or modified sequence
atgagcgtggaggacggcggcatgcccggcctgggccggccccggcaggcaaggtggaccctcatgctcctgttgtcgaccgccatgtacggagctcacgcccctttgctggccctttgtcacgttgacggccgtgtgccgttcaggccatctagcgccgtgctgctcacggagctgacaaaacttctgctgtgcgcctttagtctcctcgtgggttggcaggcatggccgcagggtcctcctccgtggaggcaggccgccccgttcgctctctccgccttactctatggcgcgaataataacctcgtaatctatcttcagaggtacatggaccccagcacatatcaggtactgtccaacctgaaaatcggaagtaccgctgtcctctattgtctctgcctgagacatcgactgagtgtgcgccaagggctagctcttctcctgctgatggcagcaggcgcgtgctatgctgccggaggactccaggttccggggaacacactccctagcccacctccagctgccgctgcttctcctatgcccctacatatcactcctttgggcctgctcttactgatactatattgtctgatctctgggctcagcagcgtgtataccgaactgctcatgaaaagacaaagactccccctcgccctccagaatctgttcctttataccttcggcgtgctgctgaatctcggactccacgctggaggcggcagtggcccgggcctgctggagggcttttccggatgggccgcccttgtggtgctcagccaggccctcaatgggctgctgatgtcagccgtgatgaaacacggtagctccatcactcgactatttgtggtgtcctgtagtctcgttgtgaatgccgtcttgagcgctgtcctgcttcgcctccagctgaccgctgcgttttttcttgccactctcctgatcgggttggctatgagactctattatggaagtaggtag

SEQ ID NO: 232360 - DNA, 975 bp, Artificial Sequence
  derived and/or modified sequence
atgtccgtggaggatggtggcatgcccggactcgggaggccaaggcaggctcggtggacgttaatgctcctgctgtcaaccgccatgtacggcgcacatgcccctttgcttgccttatgtcatgtggacggcagggtgccgtttcggccttcgtcagctgttctgctgaccgagttgacaaaattgttactgtgcgcttttagcctgttagtgggatggcaggcttggcctcagggtccccctccatggcgccaggctgccccttttgccctcagcgctctcttgtacggtgctaacaataacctagtgatttatttacagcgctacatggaccctagcacttaccaagtgttaagcaacttgaagatcgggtctacagccgtgctgtattgcctgtgtcttagacaccgtttaagcgttcgccagggactggcactgctgttgctgatggccgctggcgcttgttatgctgctggcggtctacaagtgcccggtaataccctgcctagtcctcctcccgctgcagctgccagtccaatgccacttcacatcacccccctcggactgctgttactcattctatactgtctgatcagtgggctgagctcggtgtacaccgagttgctgatgaagagacagagactgcctctggcccttcagaatctttttctctacacatttggggtcctcctgaatctgggcttgcacgcaggaggcggaagtggaccagggctgctggaaggcttcagtggatgggctgcgctggtggttctgagtcaggccctaaacggactgctgatgtctgccgtgatgaaacatggcagttcaatcactaggctgttcgtggtgtcctgcagcctcgtcgtgaatgcggtgctctctgccgtccttctgagactccagcttaccgctgctttttttcttgcgacattgctcattggtctggctatgcgcctttactacggatccagatag

SEQ ID NO: 232361 - DNA, 537 bp, Artificial Sequence
  derived and/or modified sequence
atgccactgattctcagtattctgtcaggaaacgtccctagactgttgctccctggctcatggctgcacaaccttatcttccctaagcgggttgcaattcccgcagctccagggactagcgagcctctgccgcttcacttttggtgtgcttccgaatcccgctcggcctgctggcgcaggctgtggcccaggcctccgggacggtttctgcggatggggagcacacggggtgccgagccgggaacaaaatggactgcacacgtgtgctgtcacgaagcttggcagcaacaccatactcccctgtgcggagtgcttcttgctggaggacaacgccgtgctttatcctcccctgccaccgcagccgcacattctagattgcttcccggacacattgcacactggccaggtcatgcgccagtgctctggcagcccctcgtccctgataacttccaccctgatagtggaccttgccggttgggcgctacaacccggagcccctcccaggcatttttgccgctgccgtcagccgcattatag

SEQ ID NO: 232362 - DNA, 975 bp, Artificial Sequence
  derived and/or modified sequence
atgtctgtcgaagacggcggaatgcccggactcgggagacccagacaggcaaggtggacccttatgctgctgctttctactgcaatgtatggagcccatgccccattgttggccctgtgtcacgtggacggcagggtaccctttagaccaagtagcgcagtcctgctgaccgagttaaccaaattgctgctgtgcgccttcagtcttttagtgggatggcaggcatggcctcagggcccacctccttggcggcaggctgcaccttttgctctcagtgccctgctttatggcgcaaacaacaacttggtcatctacttgcaacgctatatggatcccagcacttaccaggtactctccaaccttaagataggtagtacggcggtgctctattgtctttgtctcagacatagactgagcgtgcgacagggcctggcactactgttactgatggcagcaggcgcttgttacgccgctggaggtttgcaagtgccgggtaacactctcccttctccaccgcctgcagcagccgcttcacctatgcctctgcatataacccctctgggcttactgctgctgatcttatattgcttaatatctggcctctcctcagtgtacaccgagttgctgatgaaacgacagagactccccctcgctctccagaatttgtttctgtacacattcggcgtgcttctcaacctcggcttgcacgccggaggagggtcgggccctgggctgcttgagggattcagtggttgggctgcattggtggtcttatctcaagctttaaacgggttgttgatgagtgccgtcatgaagcacggctcttcgatcacgcgtctgtttgtggtgtcatgttccctggtagtgaacgccgtgctgagcgcagtgctgctcagactccagctaactgccgcttttttcctggcaacattgctgattgggctcgctatgagattgtattatggttccaggtag

SEQ ID NO: 232363 - DNA, 3041 bp, Artificial Sequence
  derived and/or modified sequence
gtaaacgggcgtctggatccccgaatggttgcgtgtttccgtgtgtgggtccgggggaggcccacgaacgccagcgaaaccgctgacaccaccgcccaactatgaactcatcaggcgcctgaagaccgacacgccgaacatgcgccgcgcgcactcgcgcacgagtgagatcatcgcgccccggtcgtgagtgcgctcacacgcagcctgagactcgacgggagggggtcacgtggaagtatctgagagaggcgtacttggccactaggaaagcacctccccctttccaaaaatgctccggaagtgccttcgccctccgtaaagatggccggggcagtcggcacgagggaggcggggatgcgcctgcgcaacaagttcggcggggaagatggcggatgacaaggattctctgcctaagcttaaggacctggcatttctcaagaaccagctggaaagcctgcagcggcgtgtagaagacgaagtcaacagtggagtgggccaggatggctcgctgttgtcctccccgttcctcaagggattcctggctggctatgtggtggccaaactgagggcatcagcagtattgggctttgctgtgggcacctgcactggcatctatgcggctcaggcatatgctgtgcccaacgtggagaagacattaagggactatttgcagttgctacgcaaggggcccgactagctctaggtgccatggaagaggcaggatgagcagctcagccttcaggtggagacactttatctggattccccagctgtcatccatttgctatctccaactttcctgccaccttcatccttgcctcccttcctgcagattgtggacagtagttcctcagcctgcaccctggattccttcttccccttcctagctccatgggactcgccccaagactgtggcttcaaggaccaccagccccttactcttcaagccctgactgtggagttggtagatgcctctgatcctcagtattctctctggcaatgttccacggcttctccttcctgggagctggctccataacttgattttccccaaacgtgttgcaatccctgctgccccttagccacccagggtcttgtgtgggtatgagtgtagaggatgggggtatgccaggcctgggccgtcccaggcaggcccgctggaccctgatgctactcctatccactgccatgtacggtgcccatgccccattgctggcactgtgccatgtggacggccgagtgcccttccggccctcctcagccgtgctgctgactgagctgaccaagctactgttatgcgccttctcccttctggtaggctggcaagcatggccccaggggcccccaccctggcgccaggctgctcccttcgcactatcagccctgctctatggcgctaacaacaacctggtgatctatcttcagcgttacatggaccccagcacctaccaggtgctgagtaatctcaagattggaagcacagctgtgctctactgcctctgcctccggcaccgcctctctgtgcgtcaggggttagcgctgctgctgctgatggctgcgggagcctgctatgcagcagggggccttcaagttcccgggaacacccttcccagtccccctccagcagctgctgccagccccatgcccctgcatatcactccgctaggcctgctgctcctcattctgtactgcctcatctcaggcttgtcgtcagtgtacacagagctgctcatgaagcgacagcggctgcccctggcacttcagaacctcttcctctacacttttggtgtgcttctgaatctaggtctgcatgctggcggcggctctggcccaggcctcctggaaggtttctcaggatgggcagcactcgtggtgctgagccaggcactaaatggactgctcatgtctgctgtcatgaagcatggcagcagcatcacacgcctctttgtggtgtcctgctcgctggtggtcaacgccgtgctctcagcagtcctgctacggctgcagctcacagccgccttcttcctggccacattgctcattggcctggccatgcgcctgtactatggcagccgctagtccctgacaacttccaccctgattccggaccctgtagattgggcgccaccaccagatccccctcccaggccttcctccctctcccatcagcagccctgtaacaagtgccttgtgagaaaagctggagaagtgagggcagccaggttattctctggaggttggtggatgaaggggtacccctaggagatgtgaagtgtgggtttggttaaggaaatgcttaccatcccccacccccaaccaagttcttccagactaaagaattaaggtaacatcaatacctaggcctgagaaataaccccatccttgttgggcagctccctgctttgtcctgcatgaacagagttgatgaaagtggggtgtgggcaacaagtggctttccttgcctactttagtcacccagcagagccactggagctggctagtccagcccagccatggtgcatgactcttccataagggatcctcacccttccactttcatgcaagaaggcccagttgccacagattatacaaccattacccaaaccactctgacagtctcctccagttccagcaatgcctagagacatgctccctgccctctccacagtgctgctccccacacctagcctttgttctggaaaccccagagagggctgggcttgactcatctcagggaatgtagcccctgggccctggcttaagccgacactcctgacctctctgttcaccctgagggctgtcttgaagcccgctacccactctgaggctcctaggaggtaccatgcttcccactctggggcctgcccctgcctagcagtctcccagctcccaacagcctggggaagctctgcacagagtgacctgagaccaggtacaggaaacctgtagctcaatcagtgtctctttaactgcataagcaataagatcttaataaagtcttctaggctgtagggtggttcctacaaccacagccatga

SEQ ID NO: 232364 - DNA, 1986 bp, Artificial Sequence
  derived and/or modified sequence
aagttcggcggggaagatggcggatgacaaggattctctgcctaagcttaaggacctggcatttctcaagaaccagctggaaagcctgcagcggcgtgtagaagacgaagtcaacagtggagtgggccaggatggctcgctgttgtcctccccgttcctcaagggattcctggctggctatgtggtggccaaactgagggcatcagcagtattgggctttgctgtgggcacctgcactggcatctatgcggctcaggcatatgctgtgcccaacgtggagaagacattaagggactatttgcagttgctacgcaaggggcccgactagctctaggtgccatggaagaggcaggatgagcagctcagccttcaggtggagacactttatctggattccccagctgtcatccatttgctatctccaactttcctgccaccttcatccttgcctcccttcctgcagattgtggacagtagttcctcagcctgcaccctggattccttcttccccttcctagctccatgggactcgccccaagactgtggcttcaaggaccaccagccccttactcttcaagccctgactgtggagttggtagatgcctctgatcctcagtattctctctggcaatgttccacggcttctccttcctgggagctggctccataacttgattttccccaaacgtgttgcaatccctgctgcccctggcacttcagaacctcttcctctacacttttggtgtgcttctgaatctaggtctgcatgctggcggcggctctggcccaggcctcctggaaggtttctcaggatgggcagcactcgtggtgctgagccaggcactaaatggactgctcatgtctgctgtcatgaagcatggcagcagcatcacacgcctctttgtggtgtcctgctcgctggtggtcaacgccgtgctctcagcagtcctgctacggctgcagctcacagccgccttcttcctggccacattgctcattggcctggccatgcgcctgtactatggcagccgctagtccctgacaacttccaccctgattccggaccctgtagattgggcgccaccaccagatccccctcccaggccttcctccctctcccatcagcagccctgtaacaagtgccttgtgagaaaagctggagaagtgagggcagccaggttattctctggaggttggtggatgaaggggtacccctaggagatgtgaagtgtgggtttggttaaggaaatgcttaccatcccccacccccaaccaagttcttccagactaaagaattaaggtaacatcaatacctaggcctgagaaataaccccatccttgttgggcagctccctgctttgtcctgcatgaacagagttgatgaaagtggggtgtgggcaacaagtggctttccttgcctactttagtcacccagcagagccactggagctggctagtccagcccagccatggtgcatgactcttccataagggatcctcacccttccactttcatgcaagaaggcccagttgccacagattatacaaccattacccaaaccactctgacagtctcctccagttccagcaatgcctagagacatgctccctgccctctccacagtgctgctccccacacctagcctttgttctggaaaccccagagagggctgggcttgactcatctcagggaatgtagcccctgggccctggcttaagccgacactcctgacctctctgttcaccctgagggctgtcttgaagcccgctacccactctgaggctcctaggaggtaccatgcttcccactctggggcctgcccctgcctagcagtctcccagctcccaacagcctggggaagctctgcacagagtgacctgagaccaggtacaggaaacctgtagctcaatcagtgtctctttaactgcataagcaataagatcttaataaagtcttctaggctgtagggtggttcctacaaccac

SEQ ID NO: 232365 - DNA, 3617 bp, Artificial Sequence
  derived and/or modified sequence
cgtggtcttcactctccttgacctttttagttccggggagaagcgactctggagcggctcaggagtgaggatgtcccttgtttcttctgcggctcctgtcaactgcctcaacagtgtggagtggtgtggggagagcattcggcgaggcgggaggagccgtggatcccccagatgtcccctcctgggaaccatcacgaacccgttactagcacagactcaaaaacattcacccttaaacactcctcactttaccccattccctagctcccgaaattttcttcccagtgacacgatgtttccaatcacacggacactcacaccaccctcattcaaacactcctttgcatacattctgaatttcatacttatatgcgatcaaaatcactcagtccatttacttacacacttgccgacagtcttttttgtcattctcagtcacatccagtcactcacattcagtttgggatgtccttgggaagaaagaggtaaagcccatccaggaaccaagacaataaaattgtccaggaaactgcctcggtccattactcaccattggtctagaagctcagcattacccacacatttactaaatgtcaggcactagaacatagtagccaagacagactggtcacgactttcaaggagctcataatggagtcagtagtggtttcctgatggacctaattaaaggtccctagctgtccctcctgcctttcctacatactgcttgctatataaaattcttgtcaaggttgatgtaagttactggttcagatcccatctgtcagtcccttcctggccctcatttgaattctgtgcttttcaatgcttgtctttctttgccactgccatctcaggaagcttttataggaaaaggtctttctggctcaccccatcccctcccaattcccagcttctgatggaattgagcaaggggtggggcttagtcagactgctggagccagcctctcgcttgtcctaggattctctgcctaagcttaaggacctggcatttctcaagaaccagctggaaagcctgcagcggcgtgtagaagacgaagtcaacagtggagtgggccaggatggctcgctgttgtcctccccgttcctcaagggattcctggctggctatgtggtggccaaactgagggcatcagcagtattgggctttgctgtgggcacctgcactggcatctatgcggctcaggcatatgctgtgcccaacgtggagaagacattaagggactatttgcagttgctacgcaaggggcccgactagctctaggtgccatggaagaggcaggatgagcagctcagccttcaggtggagacactttatctggattccccagctgtcatccatttgctatctccaactttcctgccaccttcatccttgcctcccttcctgcagattgtggacagtagttcctcagcctgcaccctggattccttcttccccttcctagctccatgggactcgccccaagactgtggcttcaaggaccaccagccccttactcttcaagccctgactgtggagttggtagatgcctctgatcctcagtattctctctggcaatgttccacggcttctccttcctgggagctggctccataacttgattttccccaaacgtgttgcaatccctgctgccccttagccacccagggtcttgtgtgggtatgagtgtagaggatgggggtatgccaggcctgggccgtcccaggcaggcccgctggaccctgatgctactcctatccactgccatgtacggtgcccatgccccattgctggcactgtgccatgtggacggccgagtgcccttccggccctcctcagccgtgctgctgactgagctgaccaagctactgttatgcgccttctcccttctggtaggctggcaagcatggccccaggggcccccaccctggcgccaggctgctcccttcgcactatcagccctgctctatggcgctaacaacaacctggtgatctatcttcagcgttacatggaccccagcacctaccaggtgctgagtaatctcaagattggaagcacagctgtgctctactgcctctgcctccggcaccgcctctctgtgcgtcaggggttagcgctgctgctgctgatggctgcgggagcctgctatgcagcagggggccttcaagttcccgggaacacccttcccagtccccctccagcagctgctgccagccccatgcccctgcatatcactccgctaggcctgctgctcctcattctgtactgcctcatctcaggcttgtcgtcagtgtacacagagctgctcatgaagcgacagcggctgcccctggcacttcagaacctcttcctctacacttttggtgtgcttctgaatctaggtctgcatgctggcggcggctctggcccaggcctcctggaaggtttctcaggatgggcagcactcgtggtgctgagccaggcactaaatggactgctcatgtctgctgtcatgaagcatggcagcagcatcacacgcctctttgtggtgtcctgctcgctggtggtcaacgccgtgctctcagcagtcctgctacggctgcagctcacagccgccttcttcctggccacattgctcattggcctggccatgcgcctgtactatggcagccgctagtccctgacaacttccaccctgattccggaccctgtagattgggcgccaccaccagatccccctcccaggccttcctccctctcccatcagcagccctgtaacaagtgccttgtgagaaaagctggagaagtgagggcagccaggttattctctggaggttggtggatgaaggggtacccctaggagatgtgaagtgtgggtttggttaaggaaatgcttaccatcccccacccccaaccaagttcttccagactaaagaattaaggtaacatcaatacctaggcctgagaaataaccccatccttgttgggcagctccctgctttgtcctgcatgaacagagttgatgaaagtggggtgtgggcaacaagtggctttccttgcctactttagtcacccagcagagccactggagctggctagtccagcccagccatggtgcatgactcttccataagggatcctcacccttccactttcatgcaagaaggcccagttgccacagattatacaaccattacccaaaccactctgacagtctcctccagttccagcaatgcctagagacatgctccctgccctctccacagtgctgctccccacacctagcctttgttctggaaaccccagagagggctgggcttgactcatctcagggaatgtagcccctgggccctggcttaagccgacactcctgacctctctgttcaccctgagggctgtcttgaagcccgctacccactctgaggctcctaggaggtaccatgcttcccactctggggcctgcccctgcctagcagtctcccagctcccaacagcctggggaagctctgcacagagtgacctgagaccaggtacaggaaacctgtagctcaatcagtgtctctttaactgcataagcaataagatcttaataaagtcttctaggctgtagggtggttcctacaaccacagcca

SEQ ID NO: 232366 - protein, 170 aa, Artificial Sequence
  derived and/or modified sequence
MLKMEPLNSTHPGTAASSSPLESRAAGGGSGNGNEYFYILVVMSFYGIFLIGIMLGYMKSKRREKKSSLLLLYKDEERLWGEAMKPLPVVSGLRSVQVPLMLNMLQESVAPALSCTLCSMEGDSVSSESSSPDVHLTIQEEGADDELEETSETPLNESSEGSSENIHQNS

SEQ ID NO: 232367 - DNA, 513 bp, Artificial Sequence
  derived and/or modified sequence
atgctgaaaatggagcccctgaatagcacacacccagggaccgcagcaagcagctccccactggagtcaagggctgcagggggaggcagcgggaacggaaatgaatacttctatatcctggttgtgatgtccttttatgggatcttcctgatcggtatcatgttgggctatatgaagtcaaagcggagggaaaagaaatcatccctgctgctgctatacaaagatgaagagcgactgtggggtgaggctatgaagccacttccggttgttagtggactgaggtccgtgcaggtcccattgatgctgaatatgctacaggagagcgtggcccccgccctgagctgtacactctgcagtatggagggcgattctgttagctcagagtcgtcctctcctgatgtccacctcaccatacaggaggagggtgccgacgacgaactcgaagagaccagcgagaccccactgaacgaatcatcagagggctcaagtgagaacatccatcagaacagttag

SEQ ID NO: 232368 - DNA, 513 bp, Artificial Sequence
  derived and/or modified sequence
atgctgaagatggagcccctgaacagcacccaccctggaacagctgccagcagcagccccctggagagcagagctgctgggggcggcagcggaaatggaaatgagtacttctacatcctggtggtgatgtccttctacggcatcttcctgattggcatcatgctgggctacatgaagagcaagaggcgggagaagaagagcagcctgctgctgctgtacaaggatgaggagcggctgtggggcgaggccatgaagcccctgcctgtggtgtctggcctgcggtctgtgcaggtgcccctgatgctgaacatgctgcaggagagcgtggccccagccctgagctgcaccctgtgcagcatggagggggacagcgtgtcctctgagagcagcagcccagatgtgcacctgaccatccaggaggagggcgcagatgatgagctggaggagaccagcgagacccccctgaatgaatcttctgagggcagcagcgagaacatccaccagaacagctag

SEQ ID NO: 232369 - DNA, 513 bp, Artificial Sequence
  derived and/or modified sequence
atgctgaagatggagcccctgaacagcacccaccccggcaccgccgccagtagttcccccctggagtcacgcgctgcgggcggtggatccggcaacgggaatgagtacttttacattctggtggtgatgtccttttacgggatcttcttgatcggaatcatgctcgggtatatgaagtcaaaacggagggagaagaaatcctcactgctgctcctgtacaaggatgaggaacgcttatggggggaagcaatgaagcctcttccggtcgtttcaggcctccgctcagtgcaagtacctctgatgttaaacatgctgcaggagtcagtcgcccccgctctttcttgcactctgtgtagtatggagggcgattccgttagctcagagagttcaagccccgatgtccacctgactatccaggaagagggggccgatgacgagctggaggagactagtgagacccctctcaacgagtctagcgaaggcagtagcgaaaacatacatcagaattcctag

SEQ ID NO: 232370 - DNA, 3291 bp, Artificial Sequence
  derived and/or modified sequence
attatgggattcagctgcctctgaaaacctgtagcccaataatggttattccccaggagccgcgcgaagcatgagctaattttcagtgagcgcggactttggggtaacggttccagcacagcacatccctttctcctcttttcactcatcgtcaccgctacctgaaaaccctggccgggtgctggggcttgaggagcagttcccacttcccagtctttttcacttttcacagctgcaaagttcagggagttgaactgcagtgctttcagttcactgctcactctgccacgatcaatctctgttgtaaattttcctcccagagcacgtgacgatgcacttcttgactatatatcccaactgcagcagcggagttgtcagagcgcagagccggacagagcagaagaaccctcttggactggacgatttgggaattcaaaacttgggacaaactgtcagccttgcccctgctgtggaggcagcctcaatgctgaaaatggagcctctgaacagcacgcaccccggcaccgccgcctccagcagccccctggagtcccgtgcggccggcggcggcagcggcaatggcaacgagtacttctacattctggttgtcatgtccttctacggcattttcttgatcggaatcatgctgggctacatgaaatccaagaggcgggagaagaagtccagcctcctgctgctgtacaaagacgaggagcggctctggggggaggccatgaagccgctgcctgtggtgtcgggcctgaggtcggtgcaggtgcccctgatgctgaacatgctgcaggagagcgtggcgcccgcgctgtcctgcaccctctgttccatggaaggggacagcgtgagctccgagtcctcctccccggacgtgcacctcaccattcaggaggagggggcagacgatgagctggaggagacctcggagacgcccctcaacgagagcagcgaagggtcctcggagaacatccatcagaattcctagcacccccgggacccctgccggtggctccatcagccagcaaccttagagagaggaaagacagttttcaagtgtctggtttcactttcacagtgcggctgccactttgaagagacccttggtaaacccctgattcggggtggggtgggggactaggctcagccggaaccagcacctccaaggagtccgggaggtgcctgtggtttgcacccaccactgaaaaagccgcggagatgcgcagcgcgtacactgactttggggcctgggtgttggggttctgatcagaatttggcgggatgatatgtttgccattttctcactggatgccctgggtagctcctgcagggtctgcctgttcccagggctgccgaatgcttaggacacgctgagagactagttgtgatttgctattttgcctagagctttgtccttctagatctgattggctgtaagtatctctactgtgtacctgtggcattccttcacagtgggttacaagcttcttttggattagagggggatttttgatgggagaaagctggagatctgaacccagcccatttgcacactataagaaaaaaaagtaacttttaaacctgttaacattggccggggttataagagatgatcttctattttgaccttttgtctaacttatgaccttgaactctgacctgtgaccatgcagcatcacatgatggcatgacgttctttggatcagaagagcttccccagaatctaacctgcactcccgatggtggttcaggagactcttcctgatctttctagaaggggtaaagtggggttgaacaaggccaagccgttagctctgctgctgctcagtttcccagcctagttttctgagctgggagaggacataatgtggtatttcgtcacgtagctgagacctagaagggcatactcaggcggagattgcacaaagctgggctccaagttctgtgcttcctgatcccgagccctgacactcatttgctgtgtggtcccgggcatgtcatcaagaagctcgctgtctgcatgaggctcccgacgatctccatccccagggggttgggaggatgtctttagattttaggactctgtgataaatattccacagcctggtgtgaggaagcttggaccaaatgcttcccctttggccggttagtctgaacaaggatctgctgatttaaaggagcagttggagattcagaacacatataactggggaattcagggcaagctaccaacccagccctgctgtagttttcccaggactgaaggaaagaggcagacaccacattctcctctgcaaagttctctggagaatgtgtgatgttaacactcccagctaagggaaagcaaagtctaaaggaaaacacacaggaatgcttccaatgtctccaagtattcctgtggtcaacagtttcgcagatccgttaggcccttaaagacaaggaggaagtaaaaggtcaaatttaaatctatttaaaaaaacttttaaaaaaattatttatttattattattttttatttttaagacagaatctcgctctgttgcccaggctggagtgcagtggtgcaatcttggctcactgcaacctccacctcctgggtttcagcgattctcctgcctcagcctcctgagtagctgggattacaggcgcctgccaccacgcccagctaattttttgatttttagtagagatggggtttcgccattttggccaggctggtctcaaactcctggccttaaatgatcctcccacctcggcctcccaaagtgctgggattacaggcatgagccactgcacccggccactttttttttttttaaagaaaaatgctctgcatggattggagacacagcaataactactgttgccatggaagggttaacagtgtaggagctggtttatcagtccgctttgacatacagctaaaggaaatttatgtttgggggaaaaaggccctctgttcactttaaaattcagtgtggacttatgccaaagggggctgtttaagttgaaagaagccaagttaagtttggcctcttgcctggaatcacttgaattctgaaatttcactgcgacggacatgtgccttgtcacattttccattgcttaatcctgaagtttggtgcaagtctctctgcacctattaaaaagtgatgtatatacttccttcttattctgttgagttgtatagaattgtcttttgtatttaacactttgtaattttcacaatattttttaatttaaataaataaacacattttttccctcctgggaagtcatgaa

SEQ ID NO: 232371 - DNA, 513 bp, Artificial Sequence
  derived and/or modified sequence
atgctcaagatggaaccgttaaactccacccatcccggaacagcggctagcagttctcctttggaaagccgggctgcgggaggtggctcagggaatggaaatgaatacttctacatcctcgtggtgatgtccttttatggtattttcctgataggcatcatgctcggatacatgaagtccaagcggagggaaaaaaagtcaagtctgctcctcctgtacaaagacgaagaacgcctttggggagaggcaatgaaacccttaccagtcgtgtccggattgcggtcagtccaggtacccctcatgctgaacatgctgcaggaatccgtggccccagccctgtcctgcaccctatgtagcatggagggcgattctgtcagcagcgaatcgtcctcacccgatgtacatctgacaatccaagaagagggcgctgacgacgaactggaggagacctcagagactccactgaatgagagctccgaagggagttcggagaatatccatcagaatagctag

SEQ ID NO: 232372 - DNA, 513 bp, Artificial Sequence
  derived and/or modified sequence
atgctgaagatggagcccctgaacagcacccaccccggcaccgccgccagcagcagccccctggagagcagagccgccggcggcggcagcggcaacggcaacgagtacttctacatcctggtggtgatgagcttctacggcatcttcctgatcggcatcatgctgggctacatgaagagcaagagaagagagaagaagagcagcctgctgctgctgtacaaggacgaggagagactgtggggcgaggccatgaagcccctgcccgtggtgagcggcctgagaagcgtgcaggtgcccctgatgctgaacatgctgcaggagagcgtggcccccgccctgagctgcaccctgtgcagcatggagggcgacagcgtgagcagcgagagcagcagccccgacgtgcacctgaccatccaggaggagggcgccgacgacgagctggaggagaccagcgagacccccctgaacgagagcagcgagggcagcagcgagaacatccaccagaacagctag

SEQ ID NO: 232373 - protein, 518 aa, Artificial Sequence
  derived and/or modified sequence
MDQTPPARPEYLVSGIRTPPVRRNSKLATLGRIFKPWKWRKKKNEKLKQTTSALEKKMAGRQGREELIKKGLLEMMEQDAESKTCNPDGGPRSVQSEPPTPKSETLTSEDAQPGSPLATGTDQVSLDKPLSSAAHLDDAAKMPSASSGEEADAGSLLPTTNELSQALAGADSLDSPPRPLERSVGQLPSPPLLPTPPPKASSKTTKNVTGQATLFQASSMKSADPSLRGQLSTPTGSPHLTTVHRPLPPSRVIEELHRALATKHRQDSFQGRESKGSPKKRLDVRLSRTSSVERGKEREEAWSFDGALENKRTAAKESEENKENLIINSELKDDLLLYQDEEALNDSIISGTLPRKCKKELLAVKLRNRPSKQELEDRNIFPRRTDEERQEIRQQIEMKLSKRLSQRPAVEELERRNILKQRNDQTEQEERREIKQRLTRKLNQRPTVDELRDRKILIRFSDYVEVAKAQDYDRRADKPWTRLSAADKAAIRKELNEYKSNEMEVHASSKHLTRFHRP

SEQ ID NO: 232374 - protein, 559 aa, Artificial Sequence
  derived and/or modified sequence
MAASEDGSGCLVSRGRSQSDPSVLTDSSATSSADAGENPDEMDQTPPARPEYLVSGIRTPPVRRNSKLATLGRIFKPWKWRKKKNEKLKQTTSALEKKMAGRQGREELIKKGLLEMMEQDAESKTCNPDGGPRSVQSEPPTPKSETLTSEDAQPGSPLATGTDQVSLDKPLSSAAHLDDAAKMPSASSGEEADAGSLLPTTNELSQALAGADSLDSPPRPLERSVGQLPSPPLLPTPPPKASSKTTKNVTGQATLFQASSMKSADPSLRGQLSTPTGSPHLTTVHRPLPPSRVIEELHRALATKHRQDSFQGRESKGSPKKRLDVRLSRTSSVERGKEREEAWSFDGALENKRTAAKESEENKENLIINSELKDDLLLYQDEEALNDSIISGTLPRKCKKELLAVKLRNRPSKQELEDRNIFPRRTDEERQEIRQQIEMKLSKRLSQRPAVEELERRNILKQRNDQTEQEERREIKQRLTRKLNQRPTVDELRDRKILIRFSDYVEVAKAQDYDRRADKPWTRLSAADKAAIRKELNEYKSNEMEVHASSKHLTRFHRP

SEQ ID NO: 232375 - DNA, 1680 bp, Artificial Sequence
  derived and/or modified sequence
atggccgctagcgaggatggttcgggctgtctggtgtctcgcggccggtcccaatcagaccccagtgtgttgaccgactcctcagctaccagctccgcggacgctggcgagaaccccgacgagatggatcaaacccctccagccaggcccgaatatctagtgagcggcatcagaacgcctcctgtccgccgtaacagcaaacttgccactctgggccggatcttcaagccatggaagtggagaaaaaagaaaaacgagaagctcaaacagacaacatctgcactagagaagaagatggctggcagacaggggagagaagaactgattaagaaaggactactggaaatgatggaacaagatgccgagtcaaagacctgtaatcccgatggagggccaagaagtgtacagtctgagcccccgactcctaaatcagagaccttaacttcagaggatgctcagccagggtcacccctggctactggcactgaccaggtaagtttggacaagccactgtcttcagccgcccaccttgatgacgccgccaagatgccgtctgccagtagtggagaggaggctgacgccggctcattgctgcctacgacaaacgaactttcccaggctcttgctggggctgattcattggattcccccccaagacccctggaacggtccgtcggccagctacctagcccacctctactcccaacaccgccccctaaggctagttccaagacaactaagaatgtgacaggacaggcaactctctttcaggcaagtagcatgaaatcagcagacccctccctgagggggcaactgagcacacccacaggcagtcctcacctgaccacagtgcacagacctttacctccttccagagtcattgaagagctgcacagagccctggctacgaaacaccggcaagactcttttcaagggagggagtccaagggctcacccaagaagcggttagacgtgcgcttgtctcgtacctcaagtgttgagagggggaaggaaagagaagaggcttggtcttttgacggggctcttgaaaacaagcgcaccgcggccaaggaatccgaggagaacaaagagaacttaataattaattccgaactaaaagacgaccttttactctaccaggacgaagaggccctgaatgattccataataagcggaactttaccgcggaaatgtaagaaagaacttctcgccgttaaactgagaaacagaccttccaaacaagagctggaagaccgcaatatctttccccggaggaccgacgaagagcgccaggagatcaggcagcaaatcgagatgaaactgtctaaaaggctgagtcagcgcccagccgtggaagagctggagcgtcgcaatatcctaaagcagagaaacgaccagacagaacaagaggaacgtagagagataaagcagagactgactcgcaaactgaaccaaagacccactgtggacgagctgcgggatcgcaaaatcctcatccgcttctccgactacgtggaggtcgctaaagcgcaggattacgacaggagggcagacaagccatggacaagattatcagctgccgacaaggctgctatcaggaaggaactgaatgagtacaaatcgaatgagatggaagttcacgcgtccagcaagcatcttacgcgctttcacagaccatag

SEQ ID NO: 232376 - DNA, 126 bp, Artificial Sequence
  derived and/or modified sequence
atggctgcctccgaagatgggagcggatgccttgtgtctcgcggaagatcacagagtgatccatcggtgttgaccgactcttcagccacgtccagcgccgatgctggagaaaatccagatgagtag

SEQ ID NO: 232377 - DNA, 2728 bp, Artificial Sequence
  derived and/or modified sequence
gcaattgcaagagcaaagattcttccttttcccttttttcctgggggggtggggggtggggtggggggagggagcgcccccagacattccaggacatcaccccctgccccaagcacgcaataaacactgacaagaaaaagtttttatttcctggttcaacttttttttttttccctggaatatagactgaagaatgggaataaacacgaataaataacaaagcgaggccgcgcacgccgggatgcgcctggctgcagccggcgaggctattgtctccccgccctgaagccagccccggcgtctttctccagctcgtttcctttcccggccttttttttttttttttttttttaattttcttttttaaaaagacgccccctccagccccctcgccggtgaccttggccgcctcggatgctctgattccacgcggctcgctctaacttgcccccgcgccggccgggcccatggccgcgtcggaggacgggagcggctgcctcgtgtcgcggggccgctcgcagagtgaccccagcgtcctcaccgactcctcggccacctcctccgcggacgccggggagaacccagatgagatggaccaaacgcccccggcgcgtcctgaatatctggtctcagggattcgaactccccctgtgaggaggaacagcaaactggccaccctgggcaggatcttcaaaccctggaaatggaggaaaaagaaaaacgaaaaactgaagcagacaacgtcagcgctggagaagaagatggccggcaggcaaggccgagaggagctcatcaagaaggggctgctggagatgatggagcaggatgctgaaagcaaaacttgcaaccccgatggaggaccccgatctgtacagagtgaaccacccactcccaagtcggagacgctgacttcagaagatgcccagcccggaagccccttggccactgggacggaccaggtctccctggacaagccactgtcctcagctgcccacttggacgatgcagccaagatgccttctgcatccagtggtgaagaagcagacgctggcagcctcctgcccaccaccaatgagctctcccaagccttagctggggctgactccctggacagtcctcccagacctctggagagatccgtgggccagctccccagccccccactgctgcccactccgccacccaaggcaagctccaaaaccacaaaaaatgtcacaggccaagccacactcttccaagcctccagcatgaagagtgccgacccttccctccggggccagctctccacacccacggggtctccgcatctcaccacggtccaccggcctcttcccccaagccgcgtcattgaggagctgcacagggcgctggccacgaagcaccgccaggacagttttcaaggaagagaaagtaaagggtctccaaagaagcggctggatgtccgtctgtcgagaacgtccagcgtggagcggggcaaggagagggaggaggcttggagctttgacggggcattggagaacaagcgaactgccgctaaggaatctgaggagaacaaggagaacctgatcataaattctgaactcaaagacgacttgcttttgtatcaggacgaggaggcgctgaacgactccattatttctggaacactgccacggaaatgcaagaaggagctcctggccgtgaagctaaggaaccggccaagcaaacaggaactagaagaccggaacattttccccagaaggactgatgaagaaagacaggagatccggcagcagatcgagatgaagctttccaaacggctgagccaaagacctgccgtggaagagctggagagaagaaatatcttgaaacaaaggaatgatcagacagagcaggaagaaagaagagaaatcaagcaaagattgacaagaaagcttaatcagagacccactgttgatgaattaagagacagaaaaattctgatacgattcagtgattacgtggaagtagcaaaagcgcaggactatgacaggagggcagacaaaccctggacgagactgtcagcagcagataaggcagcaattcgtaaagaattaaatgagtacaaaagtaatgaaatggaggtacatgcatcaagcaagcacttgacaagattccacaggccatagagattttcttctgagaagaatttgtgtttaattttttgataccaacactgaacattcatcagggaactttcctgaagttcagctcaagactaccctacctgctgtgtttgtgagaagagtaggatcacacacacaggtgcaatcttgaccacacttacctgcaagaggagtaaccagaggacacacttccttccttctttggtgtctgaggagtgtgaactgttggggtcagttaagacccaacataactctatcagaagaaaactgttgtttgcctttcaaccttgttttacagttctgcagtgtaatggaggacgggcaacgtgcatgtgcaggctcaccactcccaggcctctgacatgagggacatgtgacagtgtcattcagtattatgttcaaaagacatttttatcctgatcataattaatttgaaaactctttaagttcatgttatacaagatgatttactgtattatacttttccttttttatataatgtctaacaaaaaatacagctgcaacattttgattcctgttaattttgttctttaattaaatgactacttattgcaggaaattaa

SEQ ID NO: 232378 - DNA, 1680 bp, Artificial Sequence
  derived and/or modified sequence
atggccgcctctgaagatggcagcggctgcctggtgtcccggggccgcagccagagcgaccccagcgtgctgacagacagcagcgccaccagcagcgcagatgctggagaaaatccagatgagatggaccagaccccaccagcccggcctgagtacctggtgtctggcatccgcaccccacctgtgagaagaaacagcaagctggccaccctgggccgcatcttcaagccctggaagtggaggaagaagaagaatgagaagctgaagcagaccaccagcgccctggagaagaagatggccggccggcagggccgggaggagctgatcaagaagggcctgctggagatgatggagcaggatgctgagagcaagacctgcaacccagatggcggccccaggtctgtgcagagcgagccccccacccccaagtctgagaccctgaccagtgaagatgcccagcccggcagccccctggccaccggcacagaccaggtgtccctggacaagcccctgagcagcgctgcccacctggatgatgctgccaagatgcccagcgccagcagcggggaggaggctgatgctggcagcctgctgcccaccaccaatgagctgagccaggccctggccggggctgacagcctggacagccccccccggcccctggagaggtctgtgggccagctgcccagcccccccctgctgcccaccccaccacccaaggccagcagcaagaccaccaagaatgtgacaggccaggccaccctcttccaggccagctccatgaagtctgctgaccccagcctgcggggccagctgagcacccccaccggcagcccccacctgaccaccgtgcaccggcccctgccccccagcagggtcatcgaggagctgcaccgggccctggccaccaagcaccggcaggacagcttccagggccgggagagcaagggcagccccaagaagaggctggatgtgcggctgagcaggaccagctctgtggagcggggcaaggagcgggaggaggcctggagctttgatggagccctggagaacaagaggacagctgccaaggagagcgaggagaacaaggagaacctgatcatcaacagcgagctgaaggatgacctgctgctgtaccaggatgaggaggccctgaatgacagcatcatcagcggcaccctgcccaggaagtgcaagaaggagctgctggccgtgaagctgaggaaccggcccagcaagcaggagctggaggacaggaacatcttccccaggagaacagatgaggagcggcaggagatccggcagcagatcgagatgaagctgagcaagaggctgagccagaggcctgctgtggaggagctggagaggaggaacatcctgaagcagagaaatgaccagacagagcaggaggagcggcgggagatcaagcagaggctgaccaggaagctgaaccagaggcccaccgtggatgagctgcgggacaggaagatcctgatccgcttcagtgactatgtggaggtggccaaggcccaggactatgacagaagagctgacaagccctggacccggctgtctgctgctgacaaggccgccatcaggaaggagctgaatgagtacaagagcaatgagatggaggtgcacgccagcagcaagcacctgacccgcttccaccggccctag

SEQ ID NO: 232379 - DNA, 126 bp, Artificial Sequence
  derived and/or modified sequence
atggccgcctctgaagatggcagcggctgcctggtgtcccggggccgcagccagagcgaccccagcgtgctgacagacagcagcgccaccagcagcgcagatgctggagaaaatccagatgaatag

SEQ ID NO: 232380 - DNA, 1680 bp, Artificial Sequence
  derived and/or modified sequence
atggccgccagcgaggacggcagcggctgcctggtgagccggggccggtctcagtccgacccgagcgtgttgacagatagctcagcaacttcctctgctgatgctggggagaaccccgatgagatggatcagactcctccggcaagacccgaatacctggtttccggcatccgtacccctccggtaagacggaattccaaactcgccaccttgggcaggatattcaagccatggaagtggagaaaaaaaaagaatgagaaactcaaacaaacaacgagcgccctcgagaaaaaaatggccgggaggcagggtcgcgaagaattgatcaagaaaggcctgctggagatgatggagcaagatgctgaatcgaaaacttgtaacccagacggcggtccacgctccgtgcagtcagagcctccgactccgaagtccgaaactctcacaagcgaggacgcccagcccgggtcacccttggctaccggtacggatcaggtcagtctggataaacctttgtcaagtgctgctcatctggatgatgctgcaaagatgcctagcgccagctcaggagaggaagccgatgctgggtcgctgctcccaacgaccaacgagttgagccaggcactggccggcgcagatagtctcgactccccaccgcggcccctggagcgatcagtgggccaacttcccagtccaccgttgctgcccactcccccaccaaaagcctcatcaaagactacaaagaatgtgaccggtcaggctacactgtttcaggcgtcctcaatgaagagcgctgatcctagtctgcggggacaactatctacacctacaggctcccctcatctgaccaccgttcaccgccccctgcccccttctcgcgtaatcgaggagctgcaccgcgccttggcgacaaagcaccggcaagattccttccaggggcgcgagagcaagggctctcccaagaagcgcttggatgtgcgcttatccaggaccagcagcgtggagcgtggcaaagaacgagaggaggcatggagcttcgacggtgccctggagaataagcgcacggcggctaaagagagcgaagaaaataaagagaatctgatcattaatagtgagttgaaagacgacttgctactgtaccaggatgaggaggcactgaacgacagcattatatctgggaccctgccccggaagtgtaaaaaggaattgttggctgtgaagctgcgtaataggcccagtaaacaggagctggaggatagaaacatctttcctagaaggactgacgaggaacgacaggagatcaggcagcagatcgaaatgaagctctccaagcgcttgtcacagcgccctgctgttgaggaactggaaaggcgaaacattcttaagcagagaaatgaccaaactgagcaggaggaacgccgggaaatcaaacagcggctcaccagaaaactgaaccaaaggccgacagtggacgagttgcgagaccgcaagatcctgatccgcttctccgactatgtggaagtggcaaaggctcaggactatgatcgaagagccgataagccctggacgaggctctccgccgccgacaaggccgccattcggaaagagcttaacgaatacaaatctaacgagatggaagtccatgcttcctccaaacacctcacacggttccatcgtccttag

SEQ ID NO: 232381 - DNA, 126 bp, Artificial Sequence
  derived and/or modified sequence
atggccgccagcgaggacggcagcggctgcctggtgagccggggcaggagccaatcagacccaagtgtcctgacggattcgtctgctacctcgagcgctgatgcaggcgagaatccggacgaatag

SEQ ID NO: 232382 - DNA, 1680 bp, Artificial Sequence
  derived and/or modified sequence
atggccgcatccgaggacggaagtggatgcctggtcagcagaggaaggagccagtcagaccctagcgtgttgactgactcaagcgctacctctagcgccgatgccggtgagaacccagacgagatggatcagacaccccctgccaggcccgaatatctcgtgagcggtattcgcacaccccctgtgcggaggaatagcaagctggcaacactgggaaggatctttaagccttggaagtggcgcaaaaaaaagaatgagaagctgaagcagacgacaagtgccttagaaaagaagatggctggcagacaggggagggaggaactgatcaagaaagggttactcgagatgatggaacaggacgctgagagcaaaacctgcaatcccgatggaggtccacgctcagtccagtcagagccacctaccccaaagagtgagacgttgacaagtgaggatgctcagcctggctctcccctggctacagggactgaccaggttagtttggacaagcccttgtcctcagccgcacatctggatgacgctgctaaaatgcccagcgcttcatcgggcgaagaggcagatgctggctccctgctgcccaccaccaacgagctctcacaggccctggccggagcagattccctggacagcccacctcgtcctctagaaagaagtgtaggccagctcccatccccccctctcctgcctactccccctccgaaggcctcctctaagaccactaaaaatgtgacaggccaggccactttgttccaagcgagcagcatgaagtctgccgacccgtcactgcgtggccagctaagcacgcccaccggctcaccacacctcaccaccgtccacaggccactcccaccttcacgagttatagaggagctacaccgagccctggccacaaaacatagacaagatagctttcagggtcgtgagagtaagggttccccaaagaaaaggcttgatgtgaggctctcccgaacctcctctgtggagcggggtaaagaacgggaagaagcctggtcatttgacggcgctttagagaataagcggaccgccgcaaaagaatccgaggaaaacaaggaaaacctgatcatcaactctgagttaaaggacgatttactgctttaccaagatgaagaagcgctgaatgattccatcatttccggaactctgcccagaaagtgcaagaaggagctgcttgctgtcaagcttcgaaacaggccttccaagcaggaacttgaggatcggaacatcttccctagaagaacggacgaagagcgtcaggagatcaggcagcagatagagatgaaactttctaaacggctgtctcagcgtcccgcagtggaagagttagagcggagaaacatcctaaaacagagaaatgaccagaccgagcaagaggaaaggagggagataaagcagaggctgactagaaagctgaaccagcgaccgactgtcgacgaactccgggaccgaaaaatcttgattaggttcagcgactacgtcgaggtcgccaaggcccaagattatgatcgcagggctgataagccttggacccgtctttcggccgcagacaaggcagctatacgtaaagagctcaacgaatacaagtcgaacgagatggaggttcatgcctcttccaagcacttaacacggtttcataggccgtag

SEQ ID NO: 232383 - DNA, 126 bp, Artificial Sequence
  derived and/or modified sequence
atggcggcttcagaggatggttctggctgtcttgtatcgagaggaaggtcccaaagcgatcccagtgtgttaaccgattcctccgcaacatcttccgcagacgctggagaaaatccggatgaatag

SEQ ID NO: 232384 - DNA, 1680 bp, Artificial Sequence
  derived and/or modified sequence
atggccgccagcgaggacggcagcggctgcctggtgagcagaggcagaagccagagcgaccccagcgtgctgaccgacagcagcgccaccagcagcgccgacgccggcgagaaccccgacgagatggaccagaccccccccgccagacccgagtacctggtgagcggcatcagaaccccccccgtgagaagaaacagcaagctggccaccctgggcagaatcttcaagccctggaagtggagaaagaagaagaacgagaagctgaagcagaccaccagcgccctggagaagaagatggccggcagacagggcagagaggagctgatcaagaagggcctgctggagatgatggagcaggacgccgagagcaagacctgcaaccccgacggcggccccagaagcgtgcagagcgagccccccacccccaagagcgagaccctgaccagcgaggacgcccagcccggcagccccctggccaccggcaccgaccaggtgagcctggacaagcccctgagcagcgccgcccacctggacgacgccgccaagatgcccagcgccagcagcggcgaggaggccgacgccggcagcctgctgcccaccaccaacgagctgagccaggccctggccggcgccgacagcctggacagcccccccagacccctggagagaagcgtgggccagctgcccagcccccccctgctgcccacccccccccccaaggccagcagcaagaccaccaagaacgtgaccggccaggccaccctgttccaggccagcagcatgaagagcgccgaccccagcctgagaggccagctgagcacccccaccggcagcccccacctgaccaccgtgcacagacccctgccccccagcagagtgatcgaggagctgcacagagccctggccaccaagcacagacaggacagcttccagggcagagagagcaagggcagccccaagaagagactggacgtgagactgagcagaaccagcagcgtggagagaggcaaggagagagaggaggcctggagcttcgacggcgccctggagaacaagagaaccgccgccaaggagagcgaggagaacaaggagaacctgatcatcaacagcgagctgaaggacgacctgctgctgtaccaggacgaggaggccctgaacgacagcatcatcagcggcaccctgcccagaaagtgcaagaaggagctgctggccgtgaagctgagaaacagacccagcaagcaggagctggaggacagaaacatcttccccagaagaaccgacgaggagagacaggagatcagacagcagatcgagatgaagctgagcaagagactgagccagagacccgccgtggaggagctggagagaagaaacatcctgaagcagagaaacgaccagaccgagcaggaggagagaagagagatcaagcagagactgaccagaaagctgaaccagagacccaccgtggacgagctgagagacagaaagatcctgatcagattcagcgactacgtggaggtggccaaggcccaggactacgacagaagagccgacaagccctggaccagactgagcgccgccgacaaggccgccatcagaaaggagctgaacgagtacaagagcaacgagatggaggtgcacgccagcagcaagcacctgaccagattccacagaccctag

SEQ ID NO: 232385 - DNA, 126 bp, Artificial Sequence
  derived and/or modified sequence
atggccgccagcgaggacggcagcggctgcctggtgagcagaggcagaagccagagcgaccccagcgtgctgaccgacagcagcgccaccagcagcgccgacgccggcgagaaccccgacgagtag

SEQ ID NO: 232386 - protein, 425 aa, Artificial Sequence
  derived and/or modified sequence
MYPSNKKKKVWREEKERLLKMTLEERRKEYLRDYIPLNSILSWKEEMKGKGQNDEENTQETSQVKKSLTEKVSLYRGDITLLEVDAIVNAANASLLGGGGVDGCIHRAAGPCLLAECRNLNGCDTGHAKITCGYDLPAKYVIHTVGPIARGHINGSHKEDLANCYKSSLKLVKENNIRSVAFPCISTGIYGFPNEPAAVIALNTIKEWLAKNHHEVDRIIFCVFLEVDFKIYKKKMNEFFSVDDNNEEEEDVEMKEDSDENGPEEKQSVEEMEEQSQDADGVNTVTVPGPASEEAVEDCKDEDFAKDENITKGGEVTDHSVRDQDHPDGQENDSTKNEIKIETESQSSYMETEELSSNQEDAVIVEQPEVIPLTEDQEEKEGEKAPGEDTPRMPGKSEGSSDLENTPGPDAGAQDEAKEQRNGTK

SEQ ID NO: 232387 - protein, 448 aa, Artificial Sequence
  derived and/or modified sequence
MYPSNKKKKVWREEKERLLKMTLEERRKEYLRDYIPLNSILSWKEEMKGKGQNDEENTQETSQVKKSLTEKVSLYRGDITLLEVDAIVNAANASLLGGGGVDGCIHRAAGPCLLAECRNLNGCDTGHAKITCGYDLPAKYVIHTVGPIARGHINGSHKEDLANCYKSSLKLVKENNIRSVAFPCISTGIYGFPNEPAAVIALNTIKEWLAKNHHEVDRIIFCVFLEVDFKIYKKKMNEFFSVDDNNEEEEDVEMKEDSDENGPEEKQSVEEMEEQSQDADGVNTVTVPGPASEEAVEDCKDEDFAKDENITKGGEVTDHSVRDQDHPDGQENDSTKNEIKIETESQSSYMETEELSSNQEDAVIVEQPEVIPLTEDQEEKEGEKAPGEDTPRMPGKSEGSSDLENTPGPDVEMNSQVDKVNDPTESQQEDQLIAGAQDEAKEQRNGTK

SEQ ID NO: 232388 - DNA, 1278 bp, Artificial Sequence
  derived and/or modified sequence
atgtatccctctaataaaaagaaaaaggtatggagggaggagaaggagaggctcctgaaaatgacgctcgaagaacgaagaaaagaatacctgcgagactacatcccactcaactctattctgtcctggaaagaggagatgaagggaaaagggcaaaatgacgaggaaaatacacaagagaccagccaggttaagaagagccttaccgagaaagtcagtctgtatagaggcgacatcactctcctggaagtggacgccatcgtgaatgcggctaacgcatcactgttaggtggaggcggagtggatgggtgcattcatcgggccgctggaccatgtttactcgccgaatgtcgcaacctcaatggatgcgatacagggcatgccaagattacctgtgggtatgaccttccagcaaagtatgtgatccatactgtgggtccaattgcgcggggccatatcaacgggagccacaaagaggacctggccaactgttataaatcctcccttaaactcgtgaaggagaataacattaggagcgttgctttcccctgcatctcaacaggaatttatgggttcccaaacgagccagccgctgtaatagctctcaacacaatcaaagagtggctggccaagaaccaccacgaagtggaccgcatcattttttgtgtatttctcgaagtcgacttcaagatttacaaaaaaaagatgaacgagttctttagcgtggatgataataatgaggaagaagaggacgtggagatgaaagaggacagcgatgaaaacggccccgaagaaaagcagtccgttgaggaaatggaggagcagagccaggatgccgacggagtcaatacagtcaccgtccctgggcccgcctctgaagaggctgtagaggactgtaaagatgaagacttcgcgaaagatgaaaacataactaagggtggtgaagtgacagatcactccgtccgcgatcaagaccaccccgacggacaggaaaatgactcaaccaaaaacgaaattaagatagagaccgagtcccagtcatcttatatggaaactgaggagctctccagcaaccaggaagatgcggtgatcgtagagcagcctgaggtgatccctctgaccgaagaccaggaagagaaggagggagagaaggcccccggggaggatacgccaaggatgcctggcaagagtgaggggtcgagcgatcttgaaaacacccccggacccgacgccggagctcaggacgaggctaaggagcagcgtaacggcactaaatag

SEQ ID NO: 232389 - DNA, 1347 bp, Artificial Sequence
  derived and/or modified sequence
atgtatccctccaacaaaaaaaaaaaggtctggagggaggagaaagagcgactgctcaagatgaccctggaagagcggagaaaggagtacctacgcgattacattcctctaaattcaatactcagttggaaggaggaaatgaagggaaagggccaaaatgatgaggagaacacccaagagaccagtcaggtcaagaagagtctcactgaaaaagtgtccctgtatcgaggagatataacattattggaggttgatgcgatcgtgaatgcggccaatgcatcactgctaggagggggcggcgtggacggttgtattcacagggccgcgggcccctgtctcctggccgagtgccggaatctcaatggatgtgatactggccacgccaagattacgtgtggctatgatctgccagcgaagtatgtaatccacacagttggcccaatcgcccgcggccacataaatggcagtcataaggaggatctggctaactgctataagagcagtctcaagctggtaaaagaaaataacatccgtagcgtggctttcccatgtatctctacaggtatctatggctttccaaacgagcccgcggcggtcatcgctcttaatactatcaaggaatggctggccaaaaatcatcacgaagtcgatcggatcattttttgtgtgttccttgaagttgacttcaaaatctacaagaagaaaatgaatgagttcttctctgtcgacgacaacaatgaggaagaagaggacgtggaaatgaaggaggatagtgatgaaaacggcccagaggaaaagcagtctgtcgaagagatggaggagcagagccaggatgcggatggcgtgaatacggtgacagtcccgggacccgcctctgaggaagccgttgaggattgcaaagacgaagactttgccaaggacgaaaatataacgaaagggggcgaggtgaccgaccactccgttagagaccaggaccaccctgacgggcaggaaaatgactcgacaaaaaacgagatcaagatcgagaccgaatcacagtcatcttatatggaaacagaggagctttcatctaatcaggaggacgcggttattgtcgaacaacccgaggtgattcctctcaccgaggaccaggaggagaaggagggagagaaagcgcctggagaagacacaccacgcatgcccggcaagagcgagggaagcagcgatctggaaaatactccaggacccgatgttgaaatgaacagccaggttgataaagtaaatgaccctacggagtctcagcaggaagaccaactcattgctggggcacaggacgaggccaaggaacagaggaacggtactaaatag

SEQ ID NO: 232390 - DNA, 1278 bp, Artificial Sequence
  derived and/or modified sequence
atgtaccccagcaacaagaagaagaaggtgtggagggaggagaaggagcggctgctgaagatgaccctggaggagaggaggaaggagtacctgcgggactacatccccctgaacagcatcctgtcctggaaggaggagatgaagggcaagggccagaatgatgaggagaacacccaggagaccagccaggtgaagaagagcctgacagagaaggtgtccctgtacagaggagacatcaccctgctggaggtggatgccatcgtgaatgctgccaatgccagcctgctgggcggcggcggcgtggatggctgcatccacagagctgctggcccctgcctgctggccgagtgcaggaacctgaatggctgtgacaccggccacgccaagatcacctgtggctatgacctgcctgccaagtatgtgatccacacagtgggccccatcgcccggggccacatcaatggcagccacaaggaggacctggccaactgctacaagagcagcctgaagctggtgaaggagaacaacatccgctctgtggccttcccctgcatcagcacaggcatctacggcttccccaatgaacctgctgctgtgattgccctgaacaccatcaaggagtggctggccaagaaccaccacgaggtggaccgcatcatcttctgtgtgttcctggaggtggacttcaagatctacaagaagaagatgaatgagttcttctctgtggatgacaacaatgaggaggaggaggatgtggagatgaaggaggacagtgatgaaaatggacctgaggagaagcagagcgtggaggagatggaggagcagagccaggatgctgatggagtgaacacagtgacagtgcccggccctgccagcgaggaggccgtggaggactgcaaggatgaggactttgccaaggatgagaacatcaccaagggcggggaggtgacagaccacagcgtgcgggaccaggaccacccagatggccaggagaatgacagcaccaagaatgagatcaagattgaaacagagagccagagcagctacatggagacagaggagctgagcagcaaccaggaggatgctgtgattgtggagcagcctgaggtgatccccctgacagaggaccaggaggagaaggagggggagaaggcccctggagaggacacccccaggatgcctgggaagtctgagggcagcagtgacctggagaacaccccaggcccagatgctggggcccaggatgaggccaaggagcagagaaatggcaccaagtag

SEQ ID NO: 232391 - DNA, 1347 bp, Artificial Sequence
  derived and/or modified sequence
atgtaccccagcaacaagaagaagaaggtgtggagggaggagaaggagcggctgctgaagatgaccctggaggagaggaggaaggagtacctgcgggactacatccccctgaacagcatcctgtcctggaaggaggagatgaagggcaagggccagaatgatgaggagaacacccaggagaccagccaggtgaagaagagcctgacagagaaggtgtccctgtacagaggagacatcaccctgctggaggtggatgccatcgtgaatgctgccaatgccagcctgctgggcggcggcggcgtggatggctgcatccacagagctgctggcccctgcctgctggccgagtgcaggaacctgaatggctgtgacaccggccacgccaagatcacctgtggctatgacctgcctgccaagtatgtgatccacacagtgggccccatcgcccggggccacatcaatggcagccacaaggaggacctggccaactgctacaagagcagcctgaagctggtgaaggagaacaacatccgctctgtggccttcccctgcatcagcacaggcatctacggcttccccaatgaacctgctgctgtgattgccctgaacaccatcaaggagtggctggccaagaaccaccacgaggtggaccgcatcatcttctgtgtgttcctggaggtggacttcaagatctacaagaagaagatgaatgagttcttctctgtggatgacaacaatgaggaggaggaggatgtggagatgaaggaggacagtgatgaaaatggacctgaggagaagcagagcgtggaggagatggaggagcagagccaggatgctgatggagtgaacacagtgacagtgcccggccctgccagcgaggaggccgtggaggactgcaaggatgaggactttgccaaggatgagaacatcaccaagggcggggaggtgacagaccacagcgtgcgggaccaggaccacccagatggccaggagaatgacagcaccaagaatgagatcaagattgaaacagagagccagagcagctacatggagacagaggagctgagcagcaaccaggaggatgctgtgattgtggagcagcctgaggtgatccccctgacagaggaccaggaggagaaggagggggagaaggcccctggagaggacacccccaggatgcctgggaagtctgagggcagcagtgacctggagaacaccccaggcccagatgtggagatgaacagccaggtggacaaggtgaatgaccccacagagagccagcaggaggaccagctgattgctggggcccaggatgaggccaaggagcagagaaatggcaccaagtag

SEQ ID NO: 232392 - DNA, 4994 bp, Artificial Sequence
  derived and/or modified sequence
gcgtgcgccctggggcccaagttggggcgcgccgtggctagaacacggagagcggcgggcagtgcagccaatgggaggcggcgctgcctagcggctggtaggcggtgcctgcgcgggtgttaggttagcgcgaggcgtgacctagttgacaggctctgaggtgctgctgtggcggcgtccgcggggctgaggcgggtgggagccggagccgagcgcgggctgagggaggagggcggcgactggagagcggcgagcggcgagcagcgcaggacgcagagcctctttcactttttccctgctgagtgccccctcccacccctcccactccacacacaccctgtttgcccgtgagcctggggaacttgcagcttaaagccagccacccccacggcaacatgtaccccagcaacaagaagaaaaaggtgtggagagaggagaaagaacgtttattgaagatgaccttagaagagagacgcaaagaatacctaagagactatattcccctgaacagcattctatcatggaaggaggagatgaagggcaagggccaaaatgatgaagaaaatactcaggaaacatcccaggtgaagaaaagtttgactgaaaaagtttctctctatagaggtgacatcacattgctagaggtagatgctatagtcaatgccgcaaatgccagtcttcttggaggaggaggtgtggatggctgtattcatagagcagccggcccctgtttgctagctgaatgtcgtaacctgaatggctgtgatactggacatgcaaaaatcacatgtggctatgaccttcctgcaaaatatgtcatccatactgtagggccaatagccaggggccatattaatggttcccacaaggaagaccttgcaaattgctataaatcatctctgaagctcgtgaaagaaaataacatccgatcagttgcatttccctgcatctcaacaggcatttatggctttcccaacgagcctgctgcagtcattgccctcaacaccattaaggaatggcttgccaagaatcaccatgaggtggatcggatcattttctgtgtcttcttagaagttgacttcaaaatctacaaaaagaaaatgaatgagtttttctccgtagacgataataatgaagaagaagaggatgttgaaatgaaagaagattcagatgagaacggtccagaggagaagcaaagtgtggaagaaatggaagagcagagccaagatgcagatggtgtcaacactgtcactgtgcccggccctgcttcagaagaggcagttgaagactgtaaagatgaagattttgcaaaggatgaaaatattacaaaaggcggtgaagtgacagatcattctgtgcgtgaccaagatcatcccgatggacaagagaatgattcaacgaagaatgaaataaaaattgaaacagaatcgcagagctcatatatggaaacagaagaactttcatcaaaccaagaagatgccgtgattgtggagcaaccagaagtgattccattaacagaggaccaagaagaaaaagaaggtgaaaaagctccaggcgaggacacacctaggatgcctgggaaaagtgaaggctccagtgacctagaaaatactccaggtcctgatgcaggggcacaagatgaagcgaaggaacaaagaaatggaactaaatgacaatcctcagcatcgcaaggcctctcctggctctgggggagctcgggaagatagcagcacacgctgtggaggagggtgggggtggggggaaggcaagtcccatggaaggacggggaatcctttactctaatttctccagctgcattttgttccgtttatctgcagaaaaagaaagaaaaaaaagaaaaaaaaagtttcctttaatttggtggagggacccatgttgacgcatctttcaggcattatccttgtaatttctgtcttttctcttacaactttgccccagggtcacagtggcttgattgaacactcacatgtgtatcctggcccctgtctgctttcttggttatttcacaaagctggtcacacagtggtttattcaaaggaaggggaggaagacagtggtttgataagctgcaggataaattttaggaatcaatgagcccagcagcagtataatccccagacagaggaggcaggatagaaaatgggcaaaagcctcggaaaccacttggaaaaggtctggacaatgaggtgaaaatattttcttcagggttcccaaggcacaatttgttccaagtggctaatgagaaatatggaagctgaattttttccagagcagagtgcagaggcataacagaagggtgggccctggcagccatctgggtctcttccttcctaaccatggtggcaggtgcatccttctttgacactgactttcagcagagcttacttggttcatgaggtcttcacatggagactaccagcaagaggtgactctctgctgcataactgtaaaggatggccctttgctaggtgttacagttaaaagctaagaaaaggggcagtgcatttaggacccaaacatatgcctatgaatatcaaaagctcctcctgaaattgctgtgagttttccataaaagaatatcctgtcttcacccaaggcttgacagcccacagagtggtctcatttgaaattacaggaaattagagcttttgcttgcagttctgccttcctggcctgtgtttaaatgctgtcacttgtttatgccaagttcaaggctgattcaatggttggtcccctcacccagaaaaccctgaaggggaggatacagctctgaaggggggcagcagtactaaaaacccaagatgccagtggtatagtgggcacaagggatggcgaccatgaggatgccaggcatcatcaccaatatctatcctagagccagtataaggccagatgcctacttcccacagcctccccgggttccaaagtcatgtcattgttttcagtggaaacatatcgtttgttgcatatcttcttaaatccatcttccttgtaagggctttagaactaaaacttacttatattgtttttccttaacagagggagaaaaatagtggattattatttctaaaataaaaggatgttctgctttctaaatatcccatcaaaatcttcagttttgcacttttttgatggaaaattcatcttatcttcctatgactttggttttagcctttctgaatttgttaccccttctggatggcttatttgatatactggaatagttaacaagctatacttcagcatatgcactatattctaacaaattttttttaataaaatcaagacatcagcaagaatgacatttacgtgacctcataatgtgggattatggccttctgttgctattccagtttgatatggaagcatctatatcctctattgccgttagatgttgttgcttttcagaaaagtaacgaaaaggctcattttaaagaatccaagaaacgatgtcatccaaatattgacagtttctacatttcatgccatctttataactcaattgaaagttgccgtcattcttgtgaagtatttgacaagtgcaatctgctagaagctcgtttttcttgtgactcccaaatgttagtgctacttagcctcagtaatgagttacagttgaaaaaaacatgagggaaacagagggacagagattttctaatgaacaatgatggaagagacctaatgtccttgctagaaacagccaggatggaaattatccagccctggcattctccttatcatcaatgacagtcattttattcatttatttcaaatgtgggtgggctagaagtggaaggagggaattctctctgcctaaaaattctagaagaatgaaagtaatctttgtatccaggaaactaagagaatgaggaataaatatcttcagcccgactcctgaatttgtttattcttccatctataattagattgtgttttcatttttgctttgtcatgctttttggttgttatttggctatacagttttatgctttaaaacaaatgataaagttaatttccaattcaatagtgaaatattaacaatctaactatagccagatcaaagacacctgaacacagaaaacctttatttgctggtgctgccattgcacaggctgtacaatgaaatagatttgaaaagctgattgattttcccgcacataaattctggatgtcaatttccaaccaaactccaatacagctatgtggcatgaagagttacaggagggagggaggaaaatagccctatgttagtcatgtttgcatacagaggatcaaagtaggccttcaccataatagttctaattaaaatggtcctcgctgtaggagagacaaaggggcttttcctctagctggtaactattcagatgatggacaagtcttctttcataaaagattacaaagaaggcatccgaatcactgtctgtgatactgggtcacatattaatcactgcagctaattgtaaatctttctatgaaacactgaaaagcctctttgtgaattaatacagttctgcttgatgcacttgatttgaaaagacatttctctgtatgtggcgcatgtcggctttgctttgaaaaataacaaagttagcagaatatgttcaatatattttcttggggaatagggtttttattacatgattcattaaggatttgccttaccctgacatttgtgatataaaggaaaatcagaaaaaaagtaattttcttgatcaagatatgtttttacttaatgcaaataaatgtagtctgttgcttgcaaggaaaaaaaaatggcttctgatatctggtataaactgctaaataggataatacgtgcctcttttgttaaaccggcatttaaatgctggactgcttctaaatctgtttgtttcttttcatctgtgccatacactaaaaaacaactgttgccttcatactatatttgttagagcagaatacaaataaaatttgtttgagaggataatgtgaaa

SEQ ID NO: 232393 - DNA, 1347 bp, Artificial Sequence
  derived and/or modified sequence
atgtaccccagcaacaagaagaaaaaggtgtggagagaggagaaagaacgtttattgaagatgaccttagaagagagacgcaaagaatacctaagagactatattcccctgaacagcattctatcatggaaggaggagatgaagggcaagggccaaaatgatgaagaaaatactcaggaaacatcccaggtgaagaaaagtttgactgaaaaagtttctctctatagaggtgacatcacattgctagaggtagatgctatagtcaatgccgcaaatgccagtcttcttggaggaggaggtgtggatggctgtattcatagagcagccggcccctgtttgctagctgaatgtcgtaacctgaatggctgtgatactggacatgcaaaaatcacatgtggctatgaccttcctgcaaaatatgtcatccatactgtagggccaatagccaggggccatattaatggttcccacaaggaagaccttgcaaattgctataaatcatctctgaagctcgtgaaagaaaataacatccgatcagttgcatttccctgcatctcaacaggcatttatggctttcccaacgagcctgctgcagtcattgccctcaacaccattaaggaatggcttgccaagaatcaccatgaggtggatcggatcattttctgtgtcttcttagaagttgacttcaaaatctacaaaaagaaaatgaatgagtttttctccgtagacgataataatgaagaagaagaggatgttgaaatgaaagaagattcagatgagaacggtccagaggagaagcaaagtgtggaagaaatggaagagcagagccaagatgcagatggtgtcaacactgtcactgtgcccggccctgcttcagaagaggcagttgaagactgtaaagatgaagattttgcaaaggatgaaaatattacaaaaggcggtgaagtgacagatcattctgtgcgtgaccaagatcatcccgatggacaagagaatgattcaacgaagaatgaaataaaaattgaaacagaatcgcagagctcatatatggaaacagaagaactttcatcaaaccaagaagatgccgtgattgtggagcaaccagaagtgattccattaacagaggaccaagaagaaaaagaaggtgaaaaagctccaggcgaggacacacctaggatgcctgggaaaagtgaaggctccagtgacctagaaaatactccaggtcctgatgttgaaatgaatagtcaggttgacaaggtaaatgacccaacagagagtcaacaagaagatcaactaatagcaggggcacaagatgaagcgaaggaacaaagaaatggaactaaatga

SEQ ID NO: 232394 - DNA, 4425 bp, Artificial Sequence
  derived and/or modified sequence
actatcgagaagcagatgacaggctcaggccttaccagggatgcacttgccacattttggaaagactacataaaaaacctttaaaaattggagccctttgggcctcaggtatccaaagagcacattttttggaaactcaacactcaggaaggtcgcatagagccagtttatgcagatgtcatccatactgtagggccaatagccaggggccatattaatggttcccacaaggaagaccttgcaaattgctataaatcatctctgaagctcgtgaaagaaaataacatccgatcagttgcatttccctgcatctcaacaggcatttatggctttcccaacgagcctgctgcagtcattgccctcaacaccattaaggaatggcttgccaagaatcaccatgaggtggatcggatcattttctgtgtcttcttagaagttgacttcaaaatctacaaaaagaaaatgaatgagtttttctccgtagacgataataatgaagaagaagaggatgttgaaatgaaagaagattcagatgagaacggtccagaggagaagcaaagtgtggaagaaatggaagagcagagccaagatgcagatggtgtcaacactgtcactgtgcccggccctgcttcagaagaggcagttgaagactgtaaagatgaagattttgcaaaggatgaaaatattacaaaaggcggtgaagtgacagatcattctgtgcgtgaccaagatcatcccgatggacaagagaatgattcaacgaagaatgaaataaaaattgaaacagaatcgcagagctcatatatggaaacagaagaactttcatcaaaccaagaagatgccgtgattgtggagcaaccagaagtgattccattaacagaggaccaagaagaaaaagaaggtgaaaaagctccaggcgaggacacacctaggatgcctgggaaaagtgaaggctccagtgacctagaaaatactccaggtcctgatgttgaaatgaatagtcaggttgacaaggtaaatgacccaacagagagtcaacaagaagatcaactaatagcaggggcacaagatgaagcgaaggaacaaagaaatggaactaaatgacaatcctcagcatcgcaaggcctctcctggctctgggggagctcgggaagatagcagcacacgctgtggaggagggtgggggtggggggaaggcaagtcccatggaaggacggggaatcctttactctaatttctccagctgcattttgttccgtttatctgcagaaaaagaaagaaaaaaaagaaaaaaaaagtttcctttaatttggtggagggacccatgttgacgcatctttcaggcattatccttgtaatttctgtcttttctcttacaactttgccccagggtcacagtggcttgattgaacactcacatgtgtatcctggcccctgtctgctttcttggttatttcacaaagctggtcacacagtggtttattcaaaggaaggggaggaagacagtggtttgataagctgcaggataaattttaggaatcaatgagcccagcagcagtataatccccagacagaggaggcaggatagaaaatgggcaaaagcctcggaaaccacttggaaaaggtctggacaatgaggtgaaaatattttcttcagggttcccaaggcacaatttgttccaagtggctaatgagaaatatggaagctgaattttttccagagcagagtgcagaggcataacagaagggtgggccctggcagccatctgggtctcttccttcctaaccatggtggcaggtgcatccttctttgacactgactttcagcagagcttacttggttcatgaggtcttcacatggagactaccagcaagaggtgactctctgctgcataactgtaaaggatggccctttgctaggtgttacagttaaaagctaagaaaaggggcagtgcatttaggacccaaacatatgcctatgaatatcaaaagctcctcctgaaattgctgtgagttttccataaaagaatatcctgtcttcacccaaggcttgacagcccacagagtggtctcatttgaaattacaggaaattagagcttttgcttgcagttctgccttcctggcctgtgtttaaatgctgtcacttgtttatgccaagttcaaggctgattcaatggttggtcccctcacccagaaaaccctgaaggggaggatacagctctgaaggggggcagcagtactaaaaacccaagatgccagtggtatagtgggcacaagggatggcgaccatgaggatgccaggcatcatcaccaatatctatcctagagccagtataaggccagatgcctacttcccacagcctccccgggttccaaagtcatgtcattgttttcagtggaaacatatcgtttgttgcatatcttcttaaatccatcttccttgtaagggctttagaactaaaacttacttatattgtttttccttaacagagggagaaaaatagtggattattatttctaaaataaaaggatgttctgctttctaaatatcccatcaaaatcttcagttttgcacttttttgatggaaaattcatcttatcttcctatgactttggttttagcctttctgaatttgttaccccttctggatggcttatttgatatactggaatagttaacaagctatacttcagcatatgcactatattctaacaaattttttttaataaaatcaagacatcagcaagaatgacatttacgtgacctcataatgtgggattatggccttctgttgctattccagtttgatatggaagcatctatatcctctattgccgttagatgttgttgcttttcagaaaagtaacgaaaaggctcattttaaagaatccaagaaacgatgtcatccaaatattgacagtttctacatttcatgccatctttataactcaattgaaagttgccgtcattcttgtgaagtatttgacaagtgcaatctgctagaagctcgtttttcttgtgactcccaaatgttagtgctacttagcctcagtaatgagttacagttgaaaaaaacatgagggaaacagagggacagagattttctaatgaacaatgatggaagagacctaatgtccttgctagaaacagccaggatggaaattatccagccctggcattctccttatcatcaatgacagtcattttattcatttatttcaaatgtgggtgggctagaagtggaaggagggaattctctctgcctaaaaattctagaagaatgaaagtaatctttgtatccaggaaactaagagaatgaggaataaatatcttcagcccgactcctgaatttgtttattcttccatctataattagattgtgttttcatttttgctttgtcatgctttttggttgttatttggctatacagttttatgctttaaaacaaatgataaagttaatttccaattcaatagtgaaatattaacaatctaactatagccagatcaaagacacctgaacacagaaaacctttatttgctggtgctgccattgcacaggctgtacaatgaaatagatttgaaaagctgattgattttcccgcacataaattctggatgtcaatttccaaccaaactccaatacagctatgtggcatgaagagttacaggagggagggaggaaaatagccctatgttagtcatgtttgcatacagaggatcaaagtaggccttcaccataatagttctaattaaaatggtcctcgctgtaggagagacaaaggggcttttcctctagctggtaactattcagatgatggacaagtcttctttcataaaagattacaaagaaggcatccgaatcactgtctgtgatactgggtcacatattaatcactgcagctaattgtaaatctttctatgaaacactgaaaagcctctttgtgaattaatacagttctgcttgatgcacttgatttgaaaagacatttctctgtatgtggcgcatgtcggctttgctttgaaaaataacaaagttagcagaatatgttcaatatattttcttggggaatagggtttttattacatgattcattaaggatttgccttaccctgacatttgtgatataaaggaaaatcagaaaaaaagtaattttcttgatcaagatatgtttttacttaatgcaaataaatgtagtctgttgcttgcaaggaaaaaaaaatggcttctgatatctggtataaactgctaaataggataatacgtgcctcttttgttaaaccggcatttaaatgctggactgcttctaaatctgtttgtttcttttcatctgtgccatacactaaaaaacaactgttgccttcatactatatttgttagagcagaatacaaataaaatttgtttgagaggataatgtgaaa

SEQ ID NO: 232395 - DNA, 1278 bp, Artificial Sequence
  derived and/or modified sequence
atgtaccccagcaacaagaagaagaaggtgtggcgggaggagaaggagcgcttgctgaagatgaccctagaggagcgccggaaagagtacttgcgggactatatacccctgaattctatactgagctggaaggaagaaatgaagggcaaaggacagaatgacgaggagaacacccaggaaacctcacaggtcaaaaaatccttgaccgagaaagtgtccctctacaggggtgacattactctgctggaggtggacgcgatcgtcaacgcggctaatgcgtctctactgggcggtgggggtgtggatgggtgcattcatagagccgctggcccttgccttctggctgagtgtcgcaacctgaacggctgtgatacaggccatgcaaagatcacttgcggatacgatctgcctgcgaagtacgtcatccataccgtgggccccattgctagagggcatatcaatggctcacataaagaagatctggccaactgctacaagtcctccctgaagttagtcaaggagaataatattcgtagcgtagcattcccatgtatctccacgggcatatacggcttccctaacgagccagccgctgttatcgccttaaatactattaaagaatggcttgccaaaaatcatcacgaggtcgacaggatcatattctgcgtgtttctcgaagttgatttcaaaatctacaaaaaaaaaatgaacgaattcttctccgtcgacgacaacaatgaggaggaagaggatgttgaaatgaaggaggattcagatgagaatggccccgaagagaaacagtcggtggaagaaatggaggagcagtctcaggacgctgacggcgtcaacactgtgacagtgcccggtccagcttcggaagaggcagtggaagattgtaaggacgaagattttgccaaggatgagaacataacaaaggggggcgaagtaacggaccattcagtgagagaccaggaccatccagacgggcaggaaaatgacagcaccaagaacgagatcaaaatcgagaccgaaagtcagtccagctacatggagaccgaggaattgtcctcaaaccaggaggatgccgtaatcgtcgagcaacctgaggtaatcccactcactgaggaccaggaggagaaagagggagaaaaagcacccggagaggacacccctaggatgcccggcaaaagcgagggatcctctgacctagaaaacacacccggcccagatgcaggagctcaagacgaggccaaagagcaaaggaacggcaccaaatag

SEQ ID NO: 232396 - DNA, 1347 bp, Artificial Sequence
  derived and/or modified sequence
atgtaccccagcaacaagaagaagaaggtgtggcgggaggagaaggaaagactcctaaaaatgactttagaggaaaggaggaaagagtacctccgcgactacattccgctcaacagcatcctcagctggaaggaagaaatgaaagggaagggacagaatgatgaagaaaacacacaggagacctcacaggtgaagaagtctttgactgaaaaagtttccttgtatcggggggatattaccctgcttgaagtagacgccattgtgaacgctgctaatgctagcttattgggcggagggggcgtggatggttgcatccaccgagcagcagggccatgtctgcttgccgagtgcagaaacctgaatgggtgcgacactggccacgctaaaataacatgtggctacgacctccccgccaagtacgttatccatacagtgggacccatcgcacgaggccacattaatggctcacataaggaagatcttgctaattgttacaagtcttcactgaagctcgtgaaagagaataacattcggtcggtagcctttccctgtataagtactggtatttatggattccccaacgagcccgcagccgtgatcgcgctgaacacgataaaagagtggcttgccaaaaaccaccacgaggtagacaggatcatattctgtgtgtttttagaggtcgattttaagatctacaagaagaaaatgaacgaattcttctccgtggatgataacaatgaagaggaggaagacgttgaaatgaaagaagactccgatgaaaatggcccggaggagaaacaatctgtggaagaaatggaggagcagagtcaggatgccgacggagtgaatactgtgaccgtgccaggcccagcaagtgaggaagctgtggaagactgcaaagacgaggatttcgccaaggacgaaaatatcactaaaggtggcgaagttaccgaccatagtgttagagaccaggaccacccagacggacaggagaatgactctaccaagaatgaaattaagatagagaccgaatcacagagctcttatatggaaactgaagagctttcctccaaccaggaagatgcagtgattgtggaacagcccgaagtcataccactcacggaagatcaggaagagaaggagggcgaaaaggctcccggggaagacacccccaggatgccggggaagtcagagggcagctccgaccttgagaacacacccggccccgacgtggaaatgaatagtcaggtggataaggtcaatgatcccacagaatctcagcaagaagaccagctgatagcaggtgcgcaagacgaggcgaaggaacaaaggaatggtactaaatag

SEQ ID NO: 232397 - DNA, 1278 bp, Artificial Sequence
  derived and/or modified sequence
atgtacccatctaataagaagaaaaaagtgtggcgcgaggagaaggaaagactgttgaagatgactctcgaggaacgacggaaggagtatctacgggactatattccacttaatagcatcctgtcttggaaagaggagatgaaaggaaaaggccagaacgatgaggagaacacccaggagaccagtcaggtgaagaaatcgcttacagagaaggtctccctctatcggggagacatcaccctgctggaagtagatgccattgtgaacgccgcaaatgcaagcctgttaggcggtggcggtgtggacgggtgcattcatcgagcggcaggaccctgcttgctggccgagtgccgaaacttgaacggttgtgacaccggccacgctaaaattacctgcggttacgacctgcccgcaaaatatgtgatacacaccgtgggccctattgccaggggacacattaacggatcccacaaggaggacctggccaactgttacaaatctagcctgaagctcgtaaaagaaaataacatccgatctgtagctttcccctgtatctccacggggatctacggcttcccaaatgagcccgcagccgtcatcgctctaaacacaatcaaggaatggctcgccaagaaccaccatgaggtcgaccgcatcatcttctgtgtctttctggaggtggacttcaaaatatataaaaaaaagatgaatgagtttttttcagtcgatgataacaacgaggaggaagaagatgtggagatgaaagaggactctgacgagaacggccctgaagaaaagcagagcgtcgaagaaatggaggagcagtcccaggacgctgacggcgttaacacagtaacagtccctgggcctgcctccgaggaggccgtggaggactgcaaggacgaagactttgcaaaggacgaaaacatcactaagggtggtgaggttaccgatcactcagtccgcgatcaggaccaccctgacggccaggagaatgatagcaccaagaatgaaataaagatcgaaaccgagtcacaatctagctatatggaaacagaggagctctccagcaaccaggaggatgccgtaatcgtggagcagccggaggtgatacccctgactgaggaccaggaagaaaaagaaggcgagaaagctcccggagaagacacaccacggatgcctggaaagtctgagggaagtagtgaccttgagaacactcctgggcctgacgccggagcacaggacgaggcaaaggagcagaggaatggtacaaaatag

SEQ ID NO: 232398 - DNA, 1347 bp, Artificial Sequence
  derived and/or modified sequence
atgtacccaagtaataagaagaagaaggtatggcgggaggagaaagaaaggctgctgaagatgactctggaagaaagacggaaagaataccttcgtgattacataccattgaactccatcctttcatggaaggaggaaatgaagggtaagggtcagaatgatgaagagaatactcaggagacatctcaggtgaaaaaatccttgacagaaaaggtgtccctgtatagaggggatatcactctactggaagtggacgccatcgttaatgctgccaatgcatctctgcttggaggcggtggagtggatgggtgcatacatcgagccgcaggaccttgtctgctggcggaatgtaggaaccttaatggttgcgacacaggccacgccaaaattacttgcggatatgatctgcccgctaagtacgttatacataccgtgggaccaatcgcgcgaggacacatcaacggatcacataaggaggatctcgctaattgttataaatcaagtctgaaactggttaaggagaacaatatccgcagcgtagcattcccgtgtatcagcacaggaatctacggcttcccaaatgaacccgctgccgtgattgcattaaacacaattaaagagtggctggctaaaaaccaccatgaagttgaccgcattattttttgcgtgtttcttgaggtggacttcaagatttataaaaagaagatgaatgaattcttttccgtggatgataataatgaggaagaggaggatgttgagatgaaggaagactccgatgagaacggtcccgaagagaagcagagtgtcgaggagatggaggagcagtcccaggacgccgatggagtgaacacggttactgttcctggacctgcctcagaagaggctgtcgaggattgtaaggacgaggatttcgccaaggatgaaaacataaccaagggcggtgaagtaactgaccactcagtgcgagaccaggaccaccctgatgggcaagagaacgatagcaccaaaaatgaaattaaaattgagactgagagtcagagctcctatatggaaactgaggaactgtcatcaaaccaggaagacgctgtgatcgtcgaacagcctgaggttatccctttgacagaagaccaggaggaaaaagaaggagagaaggcccctggggaggatacaccacgtatgccaggaaagtccgaagggtcttcggacttggaaaatactcccggacccgatgtggagatgaattctcaagtggacaaagtcaacgatccaacagagagccagcaggaggatcagttgatcgctggcgctcaagacgaagccaaggagcaacggaacggcactaagtag

SEQ ID NO: 232399 - DNA, 1278 bp, Artificial Sequence
  derived and/or modified sequence
atgtaccccagcaacaagaagaagaaggtgtggagagaggagaaggagagactgctgaagatgaccctggaggagagaagaaaggagtacctgagagactacatccccctgaacagcatcctgagctggaaggaggagatgaagggcaagggccagaacgacgaggagaacacccaggagaccagccaggtgaagaagagcctgaccgagaaggtgagcctgtacagaggcgacatcaccctgctggaggtggacgccatcgtgaacgccgccaacgccagcctgctgggcggcggcggcgtggacggctgcatccacagagccgccggcccctgcctgctggccgagtgcagaaacctgaacggctgcgacaccggccacgccaagatcacctgcggctacgacctgcccgccaagtacgtgatccacaccgtgggccccatcgccagaggccacatcaacggcagccacaaggaggacctggccaactgctacaagagcagcctgaagctggtgaaggagaacaacatcagaagcgtggccttcccctgcatcagcaccggcatctacggcttccccaacgagcccgccgccgtgatcgccctgaacaccatcaaggagtggctggccaagaaccaccacgaggtggacagaatcatcttctgcgtgttcctggaggtggacttcaagatctacaagaagaagatgaacgagttcttcagcgtggacgacaacaacgaggaggaggaggacgtggagatgaaggaggacagcgacgagaacggccccgaggagaagcagagcgtggaggagatggaggagcagagccaggacgccgacggcgtgaacaccgtgaccgtgcccggccccgccagcgaggaggccgtggaggactgcaaggacgaggacttcgccaaggacgagaacatcaccaagggcggcgaggtgaccgaccacagcgtgagagaccaggaccaccccgacggccaggagaacgacagcaccaagaacgagatcaagatcgagaccgagagccagagcagctacatggagaccgaggagctgagcagcaaccaggaggacgccgtgatcgtggagcagcccgaggtgatccccctgaccgaggaccaggaggagaaggagggcgagaaggcccccggcgaggacacccccagaatgcccggcaagagcgagggcagcagcgacctggagaacacccccggccccgacgccggcgcccaggacgaggccaaggagcagagaaacggcaccaagtag

SEQ ID NO: 232400 - DNA, 1347 bp, Artificial Sequence
  derived and/or modified sequence
atgtaccccagcaacaagaagaagaaggtgtggagagaggagaaggagagactgctgaagatgaccctggaggagagaagaaaggagtacctgagagactacatccccctgaacagcatcctgagctggaaggaggagatgaagggcaagggccagaacgacgaggagaacacccaggagaccagccaggtgaagaagagcctgaccgagaaggtgagcctgtacagaggcgacatcaccctgctggaggtggacgccatcgtgaacgccgccaacgccagcctgctgggcggcggcggcgtggacggctgcatccacagagccgccggcccctgcctgctggccgagtgcagaaacctgaacggctgcgacaccggccacgccaagatcacctgcggctacgacctgcccgccaagtacgtgatccacaccgtgggccccatcgccagaggccacatcaacggcagccacaaggaggacctggccaactgctacaagagcagcctgaagctggtgaaggagaacaacatcagaagcgtggccttcccctgcatcagcaccggcatctacggcttccccaacgagcccgccgccgtgatcgccctgaacaccatcaaggagtggctggccaagaaccaccacgaggtggacagaatcatcttctgcgtgttcctggaggtggacttcaagatctacaagaagaagatgaacgagttcttcagcgtggacgacaacaacgaggaggaggaggacgtggagatgaaggaggacagcgacgagaacggccccgaggagaagcagagcgtggaggagatggaggagcagagccaggacgccgacggcgtgaacaccgtgaccgtgcccggccccgccagcgaggaggccgtggaggactgcaaggacgaggacttcgccaaggacgagaacatcaccaagggcggcgaggtgaccgaccacagcgtgagagaccaggaccaccccgacggccaggagaacgacagcaccaagaacgagatcaagatcgagaccgagagccagagcagctacatggagaccgaggagctgagcagcaaccaggaggacgccgtgatcgtggagcagcccgaggtgatccccctgaccgaggaccaggaggagaaggagggcgagaaggcccccggcgaggacacccccagaatgcccggcaagagcgagggcagcagcgacctggagaacacccccggccccgacgtggagatgaacagccaggtggacaaggtgaacgaccccaccgagagccagcaggaggaccagctgatcgccggcgcccaggacgaggccaaggagcagagaaacggcaccaagtag

SEQ ID NO: 232401 - protein, 89 aa, Artificial Sequence
  derived and/or modified sequence
MSDRKAVIKNADMSEDMQQDAVDCATQAMEKYNIEKDIAAYIKKEFDKKYNPTWHCIVGRNFGSYVTHETKHFIYFYLGQVAILLFKSG

SEQ ID NO: 232402 - DNA, 270 bp, Artificial Sequence
  derived and/or modified sequence
atgtcagataggaaagccgtgataaaaaatgcggatatgtcagaggacatgcaacaggatgccgtagattgtgctacgcaggctatggagaagtacaacatcgagaaggatatagcagcttatatcaaaaaggaattcgacaaaaagtacaatcctacttggcactgcatcgttgggagaaacttcggtagttatgtaactcatgaaaccaaacattttatctatttctatctgggccaggttgcaatactacttttcaagagcgggtag

SEQ ID NO: 232403 - DNA, 270 bp, Artificial Sequence
  derived and/or modified sequence
atgtctgacaggaaggccgtcatcaagaatgctgacatgtctgaggacatgcagcaggatgctgtggactgtgccacccaggccatggagaagtacaacatcgagaaggacattgctgcctacatcaagaaggagtttgacaagaagtacaaccccacctggcactgcatcgtgggcaggaactttggcagctatgtgacccatgagaccaagcacttcatctacttctacctgggccaggtggccatcctgctcttcaagagcggctag

SEQ ID NO: 232404 - DNA, 270 bp, Artificial Sequence
  derived and/or modified sequence
atgagcgaccggaaggccgtgatcaagaacgccgacatgagcgaggacatgcaacaggacgcggtggattgtgcaacccaggccatggagaagtataatattgaaaaagatatcgctgcctatatcaagaaagagttcgacaagaaatataatcccacctggcactgtatcgtaggccgaaactttggtagctacgttacgcatgaaacgaagcactttatttacttttatttgggacaagtcgcaattctgttgtttaagtcaggttag

SEQ ID NO: 232405 - DNA, 270 bp, Artificial Sequence
  derived and/or modified sequence
atgtcggatcggaaagccgttatcaagaatgctgacatgagtgaggatatgcagcaggacgcagtggactgtgctacgcaggcgatggagaagtacaacattgaaaaggacattgcggcatatatcaagaaggagtttgacaaaaagtacaatcccacgtggcattgtatagttgggagaaatttcgggagttacgttacacatgaaacaaaacatttcatctacttctacctcggccaggttgccattctgctgttcaaatccggctag

SEQ ID NO: 232406 - DNA, 270 bp, Artificial Sequence
  derived and/or modified sequence
atgagcgacagaaaggccgtgatcaagaacgccgacatgagcgaggacatgcagcaggacgccgtggactgcgccacccaggccatggagaagtacaacatcgagaaggacatcgccgcctacatcaagaaggagttcgacaagaagtacaaccccacctggcactgcatcgtgggcagaaacttcggcagctacgtgacccacgagaccaagcacttcatctacttctacctgggccaggtggccatcctgctgttcaagagcggctag

SEQ ID NO: 232407 - DNA, 1522 bp, Artificial Sequence
  derived and/or modified sequence
agcggcagagcggagcggagctgtgaggcgccagtgcggagcgggcgggcgggcgggcggcgtgaggcggagcgcgggcggccggcgaaactccaagggcggaccgcggcagggagcgatcggcctcgggctgcgggagccggagaccgcggcggcggcggctgctgcagctgcaggaggagcccagggaacaccgcccctgcctgtgctctgcctcgggccatcgctcctccccagggcccagtgcggactcgcctccgtgaagtgtcacaccatgtctgaccggaaggcagtgatcaagaacgcagacatgtctgaggacatgcaacaggatgccgttgactgcgccacgcaggccatggagaagtacaatatagagaaggacattgctgcctatatcaagaaggaatttgacaagaaatataaccctacctggcattgtatcgtgggccgaaattttggcagctacgtcacacacgagacaaagcacttcatctatttttacttgggtcaagttgcaatcctcctcttcaagtcaggctaggtggccatggtgaaggtgtcagtggcggcggcagcgatggcaagcaggcggcgttgctgggactgttttgcactggagccagcatcaggatgtcctctccaatggctgtgctactgcatggactgtatactcgatttcatgtgtatgtcgcagtaaacaaaaccaaacctctttctgtttagttgcctgggggaagaaggctgctttatgtttatttttcaagactttaaaaatattttttggttgtattgcactaggaaatctctcccacctctcccttttctctttctttccctatacaaaataaaaggcccaccatagagactaggcggccgaaagactaggagggctgaggaaaagaaataggtctctggaggtggaactaaaactgtgcagctgcctcttcctggcggtggatgctgctttgggagggccagggaggctgcagggggacagtgttgggattgtcaaggaaaaaggggtaggaaggaaggtggagggattgatctagtaccagggagaatattccactgaactgtgattctatggcttggggcggagggtggggtggggatgccttctttaggggccctgagatgtgtttgtctgtggtgtgtgggagtggggagcagatttgtcttgctgtctttgtcagaatttctaagtaagggctgtgtctttgtggattaccttcttttgttcttcctgccagagatcatgacaggaggatgctggggtaggattagcttgaatcttttttttctttacatttttctcctgtctgctccctgcttagccctcagtttcctcattcctctggagttctcttagagcagcccctgttgttagttggctggcaagggaatttctggtgactgtagttccttagttaggtcttagcaatcaaaccaaattgatgtctcccttgactcttctgtgtatatgtgtgaatatgtgtgtatatgtgtgtgtatgtgt

SEQ ID NO: 232408 - protein, 1629 aa, Artificial Sequence
  derived and/or modified sequence
MERCSRCHRLLLLLPLVLGLSAAPGWAGAPPVDVLRALRFPSLPDGVRRAKGICPADVAYRVARPAQLSAPTRQLFPGGFPKDFSLLTVVRTRPGLQAPLLTLYSAQGVRQLGLELGRPVRFLYEDQTGRPQPPSQPVFRGLSLADGKWHRVAVAVKGQSVTLIVDCKKRVTRPLPRSARPVLDTHGVIIFGARILDEEVFEGDVQELAIVPGVQAAYESCEQKELECEGGQRERPQNQQPHRAQRSPQQQPSRLHRPQNQEPQSQAAHGPRGLKGEKGEPAVLEPGMLVEGPPGPEGPAGLIGPPGIQGNPGPVGDPGERGPPGRAGLPGSDGAPGPPGTSLMLPFRFGSGGGDKGPVVAAQEAQAQAILQQARLALRGPPGPMGYTGRPGPLGQPGSPGLKGESGDLGPQGPRGPQGLTGPPGKAGRRGRAGADGARGMPGDPGVKGDRGFDGLPGLPGEKGHRGDTGAQGLPGPPGEDGERGDDGEIGPRGLPGESGPRGLLGPKGPPGIPGPPGVRGMDGPQGPKGSLGPQGEPGPPGQQGTPGTQGLPGPQGAIGPHGEKGPQGKPGLPGMPGSDGPPGHPGKEGPPGTKGNQGPSGPQGPLGYPGPRGVKGVDGIRGLKGHKGEKGEDGFPGFKGDIGVKGDRGEVGVPGSRGEDGPEGPKGRTGPTGDPGPPGLMGEKGKLGVPGLPGYPGRQGPKGSLGFPGFPGASGEKGARGLSGKSGPRGERGPTGPRGQRGPRGATGKSGAKGTSGGDGPHGPPGERGLPGPQGPNGFPGPKGPPGPPGKDGLPGHPGQRGEVGFQGKTGPPGPPGVVGPQGAAGETGPMGERGHPGPPGPPGEQGLPGTAGKEGTKGDPGPPGAPGKDGPAGLRGFPGERGLPGTAGGPGLKGNEGPSGPPGPAGSPGERGAAGSGGPIGPPGRPGPQGPPGAAGEKGVPGEKGPIGPTGRDGVQGPVGLPGPAGPPGVAGEDGDKGEVGDPGQKGTKGNKGEHGPPGPPGPIGPVGQPGAAGADGEPGARGPQGHFGAKGDEGTRGFNGPPGPIGLQGLPGPSGEKGETGDVGPMGPPGPPGPRGPAGPNGADGPQGPPGGVGNLGPPGEKGEPGESGSPGIQGEPGVKGPRGERGEKGESGQPGEPGPPGPKGPTGDDGPKGNPGPVGFPGDPGPPGEGGPRGQDGAKGDRGEDGEPGQPGSPGPTGENGPPGPLGKRGPAGSPGSEGRQGGKGAKGDPGAIGAPGKTGPVGPAGPAGKPGPDGLRGLPGSVGQQGRPGATGQAGPPGPVGPPGLPGLRGDAGAKGEKGHPGLIGLIGPPGEQGEKGDRGLPGPQGSPGQKGEMGIPGASGPIGPGGPPGLPGPAGPKGAKGATGPGGPKGEKGVQGPPGHPGPPGEVIQPLPIQMPKKTRRSVDGSRLMQEDEAIPTGGAPGSPGGLEEIFGSLDSLREEIEQMRRPTGTQDSPARTCQDLKLCHPELPDGEYWVDPNQGCARDAFRVFCNFTAGGETCVTPRDDVTQFSYVDSEGSPVGVVQLTFLRLLSVSAHQDVSYPCSGAARDGPLRLRGANEDELSPETSPYVKEFRDGCQTQQGRTVLEVRTPVLEQLPVLDASFSDLGAPPRRGGVLLGPVCFMG

SEQ ID NO: 232409 - protein, 1655 aa, Artificial Sequence
  derived and/or modified sequence
MERCSRCHRLLLLLPLVLGLSAAPGWAGAPPVDVLRALRFPSLPDGVRRAKGICPADVAYRVARPAQLSAPTRQLFPGGFPKDFSLLTVVRTRPGLQAPLLTLYSAQGVRQLGLELGRPVRFLYEDQTGRPQPPSQPVFRGLSLADGKWHRVAVAVKGQSVTLIVDCKKRVTRPLPRSARPVLDTHGVIIFGARILDEEVFEGDVQELAIVPGVQAAYESCEQKELECEGGQRERPQNQQPHRAQRSPQQQPSRLHRPQNQEPQSQPTESLYYDYEPPYYDVMTTGTTPDYQAAHGPRGLKGEKGEPAVLEPGMLVEGPPGPEGPAGLIGPPGIQGNPGPVGDPGERGPPGRAGLPGSDGAPGPPGTSLMLPFRFGSGGGDKGPVVAAQEAQAQAILQQARLALRGPPGPMGYTGRPGPLGQPGSPGLKGESGDLGPQGPRGPQGLTGPPGKAGRRGRAGADGARGMPGDPGVKGDRGFDGLPGLPGEKGHRGDTGAQGLPGPPGEDGERGDDGEIGPRGLPGESGPRGLLGPKGPPGIPGPPGVRGMDGPQGPKGSLGPQGEPGPPGQQGTPGTQGLPGPQGAIGPHGEKGPQGKPGLPGMPGSDGPPGHPGKEGPPGTKGNQGPSGPQGPLGYPGPRGVKGVDGIRGLKGHKGEKGEDGFPGFKGDIGVKGDRGEVGVPGSRGEDGPEGPKGRTGPTGDPGPPGLMGEKGKLGVPGLPGYPGRQGPKGSLGFPGFPGASGEKGARGLSGKSGPRGERGPTGPRGQRGPRGATGKSGAKGTSGGDGPHGPPGERGLPGPQGPNGFPGPKGPPGPPGKDGLPGHPGQRGEVGFQGKTGPPGPPGVVGPQGAAGETGPMGERGHPGPPGPPGEQGLPGTAGKEGTKGDPGPPGAPGKDGPAGLRGFPGERGLPGTAGGPGLKGNEGPSGPPGPAGSPGERGAAGSGGPIGPPGRPGPQGPPGAAGEKGVPGEKGPIGPTGRDGVQGPVGLPGPAGPPGVAGEDGDKGEVGDPGQKGTKGNKGEHGPPGPPGPIGPVGQPGAAGADGEPGARGPQGHFGAKGDEGTRGFNGPPGPIGLQGLPGPSGEKGETGDVGPMGPPGPPGPRGPAGPNGADGPQGPPGGVGNLGPPGEKGEPGESGSPGIQGEPGVKGPRGERGEKGESGQPGEPGPPGPKGPTGDDGPKGNPGPVGFPGDPGPPGEGGPRGQDGAKGDRGEDGEPGQPGSPGPTGENGPPGPLGKRGPAGSPGSEGRQGGKGAKGDPGAIGAPGKTGPVGPAGPAGKPGPDGLRGLPGSVGQQGRPGATGQAGPPGPVGPPGLPGLRGDAGAKGEKGHPGLIGLIGPPGEQGEKGDRGLPGPQGSPGQKGEMGIPGASGPIGPGGPPGLPGPAGPKGAKGATGPGGPKGEKGVQGPPGHPGPPGEVIQPLPIQMPKKTRRSVDGSRLMQEDEAIPTGGAPGSPGGLEEIFGSLDSLREEIEQMRRPTGTQDSPARTCQDLKLCHPELPDGEYWVDPNQGCARDAFRVFCNFTAGGETCVTPRDDVTQFSYVDSEGSPVGVVQLTFLRLLSVSAHQDVSYPCSGAARDGPLRLRGANEDELSPETSPYVKEFRDGCQTQQGRTVLEVRTPVLEQLPVLDASFSDLGAPPRRGGVLLGPVCFMG

SEQ ID NO: 232410 - protein, 1655 aa, Artificial Sequence
  derived and/or modified sequence
MERCSRCHRLLLLLPLVLGLSAAPGWAGAPPVDVLRALRFPSLPDGVRRAKGICPADVAYRVARPAQLSAPTRQLFPGGFPKDFSLLTVVRTRPGLQAPLLTLYSAQGVRQLGLELGRPVRFLYEDQTGRPQPPSQPVFRGLSLADGKWHRVAVAVKGQSVTLIVDCKKRVTRPLPRSARPVLDTHGVIIFGARILDEEVFEGDVQELAIVPGVQAAYESCEQKELECEGGQRERPQNQQPHRAQRSPQQQPSRLHRPQNQEPQSQPTESLYYDYEPPYYDVMTTGTTPDYQAAHGPRGLKGEKGEPAVLEPGMLVEGPPGPEGPAGLIGPPGIQGNPGPVGDPGERGPPGRAGLPGSDGAPGPPGTSLMLPFRFGSGGGDKGPVVAAQEAQAQAILQQARLALRGPPGPMGYTGRPGPLGQPGSPGLKGESGDLGPQGPRGPQGLTGPPGKAGRRGRAGADGARGMPGDPGVKGDRGFDGLPGLPGEKGHRGDTGAQGLPGPPGEDGERGDDGEIGPRGLPGESGPRGLLGPKGPPGIPGPPGVRGMDGPQGPKGSLGPQGEPGPPGQQGTPGTQGLPGPQGAIGPHGEKGPQGKPGLPGMPGSDGPPGHPGKEGPPGTKGNQGPSGPQGPLGYPGPRGVKGVDGIRGLKGHKGEKGEDGFPGFKGDIGVKGDRGEVGVPGSRGEDGPEGPKGRTGPTGDPGPPGLMGEKGKLGVPGLPGYPGRQGPKGSLGFPGFPGASGEKGARGLSGKSGPRGERGPTGPRGQRGPRGATGKSGAKGTSGGDGPHGPPGERGLPGPQGPNGFPGPKGPLGPPGKDGLPGHPGQRGEVGFQGKTGPPGPPGVVGPQGAAGETGPMGERGHPGPPGPPGEQGLPGTAGKEGTKGDPGPPGAPGKDGPAGLRGFPGERGLPGTAGGPGLKGNEGPSGPPGPAGSPGERGAAGSGGPIGPPGRPGPQGPPGAAGEKGVPGEKGPIGPTGRDGVQGPVGLPGPAGPPGVAGEDGDKGEVGDPGQKGTKGNKGEHGPPGPPGPIGPVGQPGAAGADGEPGARGPQGHFGAKGDEGTRGFNGPPGPIGLQGLPGPSGEKGETGDVGPMGPPGPPGPRGPAGPNGADGPQGPPGGVGNLGPPGEKGEPGESGSPGIQGEPGVKGPRGERGEKGESGQPGEPGPPGPKGPTGDDGPKGNPGPVGFPGDPGPPGEGGPRGQDGAKGDRGEDGEPGQPGSPGPTGENGPPGPLGKRGPAGSPGSEGRQGGKGAKGDPGAIGAPGKTGPVGPAGPAGKPGPDGLRGLPGSVGQQGRPGATGQAGPPGPVGPPGLPGLRGDAGAKGEKGHPGLIGLIGPPGEQGEKGDRGLPGPQGSPGQKGEMGIPGASGPIGPGGPPGLPGPAGPKGAKGATGPGGPKGEKGVQGPPGHPGPPGEVIQPLPIQMPKKTRRSVDGSRLMQEDEAIPTGGAPGSPGGLEEIFGSLDSLREEIEQMRRPTGTQDSPARTCQDLKLCHPELPDGEYWVDPNQGCARDAFRVFCNFTAGGETCVTPRDDVTQFSYVDSEGSPVGVVQLTFLRLLSVSAHQDVSYPCSGAARDGPLRLRGANEDELSPETSPYVKEFRDGCQTQQGRTVLEVRTPVLEQLPVLDASFSDLGAPPRRGGVLLGPVCFMG

SEQ ID NO: 232411 - protein, 1655 aa, Artificial Sequence
  derived and/or modified sequence
MERCSRCHRLLLLLPLVLGLSAAPGWAGAPPVDVLRALRFPSLPDGVRRAKGICPADVAYRVARPAQLSAPTRQLFPGGFPKDFSLLTVVRTRPGLQAPLLTLYSAQGVRQLGLELGRPVRFLYEDQTGRPQPPSQPVFRGLSLADGKWHRVAVAVKGQSVTLIVDCKKRVTRPLPRSARPVLDTHGVIIFGARILDEEVFEGDVQELAIVPGVQAAYESCEQKELECEGGQRERPQNQQPHRAQRSPQQQPSRLHRPQNQEPQSQPTESLYYDYKPPYYDVMTTGTTPDYQAAHGPRGLKGEKGEPAVLEPGMLVEGPPGPEGPAGLIGPPGIQGNPGPVGDPGERGPPGRAGLPGSDGAPGPPGTSLMLPFRFGSGGGDKGPVVAAQEAQAQAILQQARLALRGPPGPMGYTGRPGPLGQPGSPGLKGESGDLGPQGPRGPQGLTGPPGKAGRRGRAGADGARGMPGDPGVKGDRGFDGLPGLPGEKGHRGDTGAQGLPGPPGEDGERGDDGEIGPRGLPGESGPRGLLGPKGPPGIPGPPGVRGMDGPQGPKGSLGPQGEPGPPGQQGTPGTQGLPGPQGAIGPHGEKGPQGKPGLPGMPGSDGPPGHPGKEGPPGTKGNQGPSGPQGPLGYPGPRGVKGVDGIRGLKGHKGEKGEDGFPGFKGDIGVKGDRGEVGVPGSRGEDGPEGPKGRTGPTGDPGPPGLMGEKGKLGVPGLPGYPGRQGPKGSLGFPGFPGASGEKGARGLSGKSGPRGERGPTGPRGQRGPRGATGKSGAKGTSGGDGPHGPPGERGLPGPQGPNGFPGPKGPPGPPGKDGLPGHPGQRGEVGFQGKTGPPGPPGVVGPQGAAGETGPMGERGHPGPPGPPGEQGLPGTAGKEGTKGDPGPPGAPGKDGPAGLRGFPGERGLPGTAGGPGLKGNEGPSGPPGPAGSPGERGAAGSGGPIGPPGRPGPQGPPGAAGEKGVPGEKGPIGPTGRDGVQGPVGLPGPAGPPGVAGEDGDKGEVGDPGQKGTKGNKGEHGPPGPPGPIGPVGQPGAAGADGEPGARGPQGHFGAKGDEGTRGFNGPPGPIGLQGLPGPSGEKGETGDVGPMGPPGPPGPRGPAGPNGADGPQGPPGGVGNLGPPGEKGEPGESGSPGIQGEPGVKGPRGERGEKGESGQPGEPGPPGPKGPTGDDGPKGNPGPVGFPGDPGPPGEGGPRGQDGAKGDRGEDGEPGQPGSPGPTGENGPPGPLGKRGPAGSPGSEGRQGGKGAKGDPGAIGAPGKTGPVGPAGPAGKPGPDGLRGLPGSVGQQGRPGATGQAGPPGPVGPPGLPGLRGDAGAKGEKGHPGLIGLIGPPGEQGEKGDRGLPGPQGSPGQKGEMGIPGASGPIGPGGPPGLPGPAGPKGAKGATGPGGPKGEKGVQGPPGHPGPPGEVIQPLPIQMPKKTRRSVDGSRLMQEDEAIPTGGAPGSPGGLEEIFGSLDSLREEIEQMRRPTGTQDSPARTCQDLKLCHPELPDGEYWVDPNQGCARDAFRVFCNFTAGGETCVTPRDDVTQFSYVDSEGSPVGVVQLTFLRLLSVSAHQDVSYPCSGAARDGPLRLRGANEDELSPETSPYVKEFRDGCQTQQGRTVLEVRTPVLEQLPVLDASFSDLGAPPRRGGVLLGPVCFMG

SEQ ID NO: 232412 - protein, 1602 aa, Artificial Sequence
  derived and/or modified sequence
GAPPVDVLRALRFPSLPDGVRRAKGICPADVAYRVARPAQLSAPTRQLFPGGFPKDFSLLTVVRTRPGLQAPLLTLYSAQGVRQLGLELGRPVRFLYEDQTGRPQPPSQPVFRGLSLADGKWHRVAVAVKGQSVTLIVDCKKRVTRPLPRSARPVLDTHGVIIFGARILDEEVFEGDVQELAIVPGVQAAYESCEQKELECEGGQRERPQNQQPHRAQRSPQQQPSRLHRPQNQEPQSQAAHGPRGLKGEKGEPAVLEPGMLVEGPPGPEGPAGLIGPPGIQGNPGPVGDPGERGPPGRAGLPGSDGAPGPPGTSLMLPFRFGSGGGDKGPVVAAQEAQAQAILQQARLALRGPPGPMGYTGRPGPLGQPGSPGLKGESGDLGPQGPRGPQGLTGPPGKAGRRGRAGADGARGMPGDPGVKGDRGFDGLPGLPGEKGHRGDTGAQGLPGPPGEDGERGDDGEIGPRGLPGESGPRGLLGPKGPPGIPGPPGVRGMDGPQGPKGSLGPQGEPGPPGQQGTPGTQGLPGPQGAIGPHGEKGPQGKPGLPGMPGSDGPPGHPGKEGPPGTKGNQGPSGPQGPLGYPGPRGVKGVDGIRGLKGHKGEKGEDGFPGFKGDIGVKGDRGEVGVPGSRGEDGPEGPKGRTGPTGDPGPPGLMGEKGKLGVPGLPGYPGRQGPKGSLGFPGFPGASGEKGARGLSGKSGPRGERGPTGPRGQRGPRGATGKSGAKGTSGGDGPHGPPGERGLPGPQGPNGFPGPKGPPGPPGKDGLPGHPGQRGEVGFQGKTGPPGPPGVVGPQGAAGETGPMGERGHPGPPGPPGEQGLPGTAGKEGTKGDPGPPGAPGKDGPAGLRGFPGERGLPGTAGGPGLKGNEGPSGPPGPAGSPGERGAAGSGGPIGPPGRPGPQGPPGAAGEKGVPGEKGPIGPTGRDGVQGPVGLPGPAGPPGVAGEDGDKGEVGDPGQKGTKGNKGEHGPPGPPGPIGPVGQPGAAGADGEPGARGPQGHFGAKGDEGTRGFNGPPGPIGLQGLPGPSGEKGETGDVGPMGPPGPPGPRGPAGPNGADGPQGPPGGVGNLGPPGEKGEPGESGSPGIQGEPGVKGPRGERGEKGESGQPGEPGPPGPKGPTGDDGPKGNPGPVGFPGDPGPPGEGGPRGQDGAKGDRGEDGEPGQPGSPGPTGENGPPGPLGKRGPAGSPGSEGRQGGKGAKGDPGAIGAPGKTGPVGPAGPAGKPGPDGLRGLPGSVGQQGRPGATGQAGPPGPVGPPGLPGLRGDAGAKGEKGHPGLIGLIGPPGEQGEKGDRGLPGPQGSPGQKGEMGIPGASGPIGPGGPPGLPGPAGPKGAKGATGPGGPKGEKGVQGPPGHPGPPGEVIQPLPIQMPKKTRRSVDGSRLMQEDEAIPTGGAPGSPGGLEEIFGSLDSLREEIEQMRRPTGTQDSPARTCQDLKLCHPELPDGEYWVDPNQGCARDAFRVFCNFTAGGETCVTPRDDVTQFSYVDSEGSPVGVVQLTFLRLLSVSAHQDVSYPCSGAARDGPLRLRGANEDELSPETSPYVKEFRDGCQTQQGRTVLEVRTPVLEQLPVLDASFSDLGAPPRRGGVLLGPVCFMG

SEQ ID NO: 232413 - protein, 1655 aa, Artificial Sequence
  derived and/or modified sequence
MERCSRCHRLLLLLPLVLGLSAAPGWAGAPPVDVLRALRFPSLPDGVRRAKGICPADVAYRVARPAQLSAPTRQLFPGGFPKDFSLLTVVRTRPGLQAPLLTLYSAQGVRQLGLELGPPVRFLYEDQTGRPQPPSQPVFRGLSLADGKWHRVAVAVKGQSVTLIVDCKKRVTRPLPRSARPVLDTHGVIIFGARILDEEVFEGDVQELAIVPGVQAAYESCEQKELECEGGQRERPQNQQPHRAQRSPQQQPSRLHRPQNQEPQSQPTESLYYDYKPPYYDVMTTGTTPDYQAAHGPRGLKGEKGEPAVLEPGMLVEGPPGPEGPAGLIGPPGIQGNPGPVGDPGERGPPGRAGLPGSDGAPGPPGTSLMLPFRFGSGGGDKGPVVAAQEAQAQAILQQARLALRGPPGPMGYTGRPGPLGQPGSPGLKGESGDLGPQGPRGPQGLTGPPGKAGRRGRAGADGARGMPGDPGVKGDRGFDGLPGLPGEKGHRGDTGAQGLPGPPGEDGERGDDGEIGPRGLPGESGPRGLLGPKGPPGIPGPPGVRGMDGPQGPKGSLGPQGEPGPPGQQGTPGTQGLPGPQGAIGPHGEKGPQGKPGLPGMPGSDGPPGHPGKEGPPGTKGNQGPSGPQGPLGYPGPRGVKGVDGIRGLKGHKGEKGEDGFPGFKGDIGVKGDRGEVGVPGSRGEDGPEGPKGRTGPTGDPGPPGLMGEKGKLGVPGLPGYPGRQGPKGSLGFPGFPGASGEKGARGLSGKSGPRGERGPTGPRGQRGPRGATGKSGAKGTSGGDGPHGPPGERGLPGPQGPNGFPGPKGPPGPPGKDGLPGHPGQRGEVGFQGKTGPPGPPGVVGPQGAAGETGPMGERGHPGPPGPPGEQGLPGTAGKEGTKGDPGPPGAPGKDGPAGLRGFPGERGLPGTAGGPGLKGNEGPSGPPGPAGSPGERGAAGSGGPIGPPGRPGPQGPPGAAGEKGVPGEKGPIGPTGRDGVQGPVGLPGPAGPPGVAGEDGDKGEVGDPGQKGTKGNKGEHGPPGPPGPIGPVGQPGAAGADGEPGARGPQGHFGAKGDEGTRGFNGPPGPIGLQGLPGPSGEKGETGDVGPMGPPGPPGPRGPAGPNGADGPQGPPGGVGNLGPPGEKGEPGESGSPGIQGEPGVKGPRGERGEKGESGQPGEPGPPGPKGPTGDDGPKGNPGPVGFPGDPGPPGEGGPRGQDGAKGDRGEDGEPGQPGSPGPTGENGPPGPLGKRGPAGSPGSEGRQGGKGAKGDPGAIGAPGKTGPVGPAGPAGKPGPDGLRGLPGSVGQQGRPGATGQAGPPGPVGPPGLPGLRGDAGAKGEKGHPGLIGLIGPPGEQGEKGDRGLPGPQGSPGQKGEMGIPGASGPIGPGGPPGLPGPAGPKGAKGATGPGGPKGEKGVQGPPGHPGPPGEVIQPLPIQMPKKTRRSVDGSRLMQEDEAIPTGGAPGSPGGLEEIFGSLDSLREEIEQMRRPTGTQDSPARTCQDLKLCHPELPDGEYWVDPNQGCARDAFRVFCNFTAGGETCVTPRDDVTQFSYVDSEGSPVGVVQLTFLRLLSVSAHQDVSYPCSGAARDGPLRLRGANEDELSPETSPYVKEFRDGCQTQQGRTVLEVRTPVLEQLPVLDASFSDLGAPPRRGGVLLGPVCFMG

SEQ ID NO: 232414 - protein, 1629 aa, Artificial Sequence
  derived and/or modified sequence
MERCSRCHRLLLLLPLVLGLSAAPGWAGAPPVDVLRALRFPSLPDGVRRAKGICPADVAYRVARPAQLSAPTRQLFPGGFPKDFSLLTVVRTRPGLQAPLLTLYSAQGVRQLGLELGRPVRFLYEDQTGRPQPPSQPVFRGLSLADGKWHRVAVAVKGQSVTLIVDCKKRVTRPLPRSARPVLDTHGVIIFGARILDEEVFEGDVQELAIVPGVQAAYESCEQKELECEGGQRERPQNQQPHRAQRSPQQQPSRLHRPQNQEPQSQAAHGPRGLKGEKGEPAVLEPGMLVEGPPGPEGPAGLIGPPGIQGNPGPVGDPGERGPPGRAGLPGSDGAPGPPGTSLMLPFRFGSGGGDKGPVVAAQEAQAQAILQQARLALRGPPGPMGYTGRPGPLGQPGSPGLKGESGDLGPQGPRGPQGLTGPPGKAGRRGRAGADGARGMPGDPGVKGDRGFDGLPGLPGEKGHRGDTGAQGLPGPPGEDGERGDDGEIGPRGLPGESGPRGLLGPKGPPGIPGPPGVRGMDGPQGPKGSLGPQGEPGPPGQQGTPGTQGLPGPQGAIGPHGEKGPQGKPGLPGMPGSDGPPGHPGKEGPPGTKGNQGPSGPQGPLGYPGPRGVKGVDGIRGLKGHKGEKGEDGFPGFKGDIGVKGDRGEVGVPGSRGEDGPEGPKGRTGPTGDPGPPGLMGEKGKLGVPGLPGYPGRQGPKGSLGFPGFPGASGEKGARGLSGKSGPRGERGPTGPRGQRGPRGATGKSGAKGTSGGDGPHGPPGERGLPGPQGPNGFPGPKGPLGPPGKDGLPGHPGQRGEVGFQGKTGPPGPPGVVGPQGAAGETGPMGERGHPGPPGPPGEQGLPGTAGKEGTKGDPGPPGAPGKDGPAGLRGFPGERGLPGTAGGPGLKGNEGPSGPPGPAGSPGERGAAGSGGPIGPPGRPGPQGPPGAAGEKGVPGEKGPIGPTGRDGVQGPVGLPGPAGPPGVAGEDGDKGEVGDPGQKGTKGNKGEHGPPGPPGPIGPVGQPGAAGADGEPGARGPQGHFGAKGDEGTRGFNGPPGPIGLQGLPGPSGEKGETGDVGPMGPPGPPGPRGPAGPNGADGPQGPPGGVGNLGPPGEKGEPGESGSPGIQGEPGVKGPRGERGEKGESGQPGEPGPPGPKGPTGDDGPKGNPGPVGFPGDPGPPGEGGPRGQDGAKGDRGEDGEPGQPGSPGPTGENGPPGPLGKRGPAGSPGSEGRQGGKGAKGDPGAIGAPGKTGPVGPAGPAGKPGPDGLRGLPGSVGQQGRPGATGQAGPPGPVGPPGLPGLRGDAGAKGEKGHPGLIGLIGPPGEQGEKGDRGLPGPQGSPGQKGEMGIPGASGPIGPGGPPGLPGPAGPKGAKGATGPGGPKGEKGVQGPPGHPGPPGEVIQPLPIQMPKKTRRSVDGSRLMQEDEAIPTGGAPGSPGGLEEIFGSLDSLREEIEQMRRPTGTQDSPARTCQDLKLCHPELPDGEYWVDPNQGCARDAFRVFCNFTAGGETCVTPRDDVTQFSYVDSEGSPVGVVQLTFLRLLSVSAHQDVSYPCSGAARDGPLRLRGANEDELSPETSPYVKEFRDGCQTQQGRTVLEVRTPVLEQLPVLDASFSDLGAPPRRGGVLLGPVCFMG

SEQ ID NO: 232415 - protein, 1629 aa, Artificial Sequence
  derived and/or modified sequence
MERCSRCHRLLLLLPLVLGLSAAPGWAGAPPVDVLRALRFPSLPDGVRRAKGICPADVAYRVARPAQLSAPTRQLFPGGFPKDFSLLTVVRTRPGLQAPLLTLYSAQGVRQLGLELGPPVRFLYEDQTGRPQPPSQPVFRGLSLADGKWHRVAVAVKGQSVTLIVDCKKRVTRPLPRSARPVLDTHGVIIFGARILDEEVFEGDVQELAIVPGVQAAYESCEQKELECEGGQRERPQNQQPHRAQRSPQQQPSRLHRPQNQEPQSQAAHGPRGLKGEKGEPAVLEPGMLVEGPPGPEGPAGLIGPPGIQGNPGPVGDPGERGPPGRAGLPGSDGAPGPPGTSLMLPFRFGSGGGDKGPVVAAQEAQAQAILQQARLALRGPPGPMGYTGRPGPLGQPGSPGLKGESGDLGPQGPRGPQGLTGPPGKAGRRGRAGADGARGMPGDPGVKGDRGFDGLPGLPGEKGHRGDTGAQGLPGPPGEDGERGDDGEIGPRGLPGESGPRGLLGPKGPPGIPGPPGVRGMDGPQGPKGSLGPQGEPGPPGQQGTPGTQGLPGPQGAIGPHGEKGPQGKPGLPGMPGSDGPPGHPGKEGPPGTKGNQGPSGPQGPLGYPGPRGVKGVDGIRGLKGHKGEKGEDGFPGFKGDIGVKGDRGEVGVPGSRGEDGPEGPKGRTGPTGDPGPPGLMGEKGKLGVPGLPGYPGRQGPKGSLGFPGFPGASGEKGARGLSGKSGPRGERGPTGPRGQRGPRGATGKSGAKGTSGGDGPHGPPGERGLPGPQGPNGFPGPKGPPGPPGKDGLPGHPGQRGEVGFQGKTGPPGPPGVVGPQGAAGETGPMGERGHPGPPGPPGEQGLPGTAGKEGTKGDPGPPGAPGKDGPAGLRGFPGERGLPGTAGGPGLKGNEGPSGPPGPAGSPGERGAAGSGGPIGPPGRPGPQGPPGAAGEKGVPGEKGPIGPTGRDGVQGPVGLPGPAGPPGVAGEDGDKGEVGDPGQKGTKGNKGEHGPPGPPGPIGPVGQPGAAGADGEPGARGPQGHFGAKGDEGTRGFNGPPGPIGLQGLPGPSGEKGETGDVGPMGPPGPPGPRGPAGPNGADGPQGPPGGVGNLGPPGEKGEPGESGSPGIQGEPGVKGPRGERGEKGESGQPGEPGPPGPKGPTGDDGPKGNPGPVGFPGDPGPPGEGGPRGQDGAKGDRGEDGEPGQPGSPGPTGENGPPGPLGKRGPAGSPGSEGRQGGKGAKGDPGAIGAPGKTGPVGPAGPAGKPGPDGLRGLPGSVGQQGRPGATGQAGPPGPVGPPGLPGLRGDAGAKGEKGHPGLIGLIGPPGEQGEKGDRGLPGPQGSPGQKGEMGIPGASGPIGPGGPPGLPGPAGPKGAKGATGPGGPKGEKGVQGPPGHPGPPGEVIQPLPIQMPKKTRRSVDGSRLMQEDEAIPTGGAPGSPGGLEEIFGSLDSLREEIEQMRRPTGTQDSPARTCQDLKLCHPELPDGEYWVDPNQGCARDAFRVFCNFTAGGETCVTPRDDVTQFSYVDSEGSPVGVVQLTFLRLLSVSAHQDVSYPCSGAARDGPLRLRGANEDELSPETSPYVKEFRDGCQTQQGRTVLEVRTPVLEQLPVLDASFSDLGAPPRRGGVLLGPVCFMG

SEQ ID NO: 232416 - DNA, 4890 bp, Artificial Sequence
  derived and/or modified sequence
atggagagatgcagcagatgccacagactgctgctgctgctgcccctggtgctgggcctgagcgccgcccccggctgggccggcgccccccccgtggacgtgctgagagccctgagattccccagcctgcccgacggcgtgagaagagccaagggcatctgccccgccgacgtggcctacagagtggccagacccgcccagctgagcgcccccaccagacagctgttccccggcggcttccccaaggacttcagcctgctgaccgtggtgagaaccagacccggcctgcaggcccccctgctgaccctgtacagcgcccagggcgtgagacagctgggcctggagctgggcagacccgtgagattcctgtacgaggaccagaccggcagaccccagccccccagccagcccgtgttcagaggcctgagcctggccgacggcaagtggcacagagtggccgtggccgtgaagggccagagcgtgaccctgatcgtggactgcaagaagagagtgaccagacccctgcccagaagcgccagacccgtgctggacacccacggcgtgatcatcttcggcgccagaatcctggacgaggaggtgttcgagggcgacgtgcaggagctggccatcgtgcccggcgtgcaggccgcctacgagagctgcgagcagaaggagctggagtgcgagggcggccagagagagagaccccagaaccagcagccccacagagcccagagaagcccccagcagcagcccagcagactgcacagaccccagaaccaggagccccagagccaggccgcccacggccccagaggcctgaagggcgagaagggcgagcccgccgtgctggagcccggcatgctggtggagggcccccccggccccgagggccccgccggcctgatcggcccccccggcatccagggcaaccccggccccgtgggcgaccccggcgagagaggcccccccggcagagccggcctgcccggcagcgacggcgcccccggcccccccggcaccagcctgatgctgcccttcagattcggcagcggcggcggcgacaagggccccgtggtggccgcccaggaggcccaggcccaggccatcctgcagcaggccagactggccctgagaggcccccccggccccatgggctacaccggcagacccggccccctgggccagcccggcagccccggcctgaagggcgagagcggcgacctgggcccccagggccccagaggcccccagggcctgaccggcccccccggcaaggccggcagaagaggcagagccggcgccgacggcgccagaggcatgcccggcgaccccggcgtgaagggcgacagaggcttcgacggcctgcccggcctgcccggcgagaagggccacagaggcgacaccggcgcccagggcctgcccggcccccccggcgaggacggcgagagaggcgacgacggcgagatcggccccagaggcctgcccggcgagagcggccccagaggcctgctgggccccaagggcccccccggcatccccggcccccccggcgtgagaggcatggacggcccccagggccccaagggcagcctgggcccccagggcgagcccggcccccccggccagcagggcacccccggcacccagggcctgcccggcccccagggcgccatcggcccccacggcgagaagggcccccagggcaagcccggcctgcccggcatgcccggcagcgacggcccccccggccaccccggcaaggagggcccccccggcaccaagggcaaccagggccccagcggcccccagggccccctgggctaccccggccccagaggcgtgaagggcgtggacggcatcagaggcctgaagggccacaagggcgagaagggcgaggacggcttccccggcttcaagggcgacatcggcgtgaagggcgacagaggcgaggtgggcgtgcccggcagcagaggcgaggacggccccgagggccccaagggcagaaccggccccaccggcgaccccggcccccccggcctgatgggcgagaagggcaagctgggcgtgcccggcctgcccggctaccccggcagacagggccccaagggcagcctgggcttccccggcttccccggcgccagcggcgagaagggcgccagaggcctgagcggcaagagcggccccagaggcgagagaggccccaccggccccagaggccagagaggccccagaggcgccaccggcaagagcggcgccaagggcaccagcggcggcgacggcccccacggcccccccggcgagagaggcctgcccggcccccagggccccaacggcttccccggccccaagggcccccccggcccccccggcaaggacggcctgcccggccaccccggccagagaggcgaggtgggcttccagggcaagaccggcccccccggcccccccggcgtggtgggcccccagggcgccgccggcgagaccggccccatgggcgagagaggccaccccggcccccccggcccccccggcgagcagggcctgcccggcaccgccggcaaggagggcaccaagggcgaccccggcccccccggcgcccccggcaaggacggccccgccggcctgagaggcttccccggcgagagaggcctgcccggcaccgccggcggccccggcctgaagggcaacgagggccccagcggcccccccggccccgccggcagccccggcgagagaggcgccgccggcagcggcggccccatcggcccccccggcagacccggcccccagggcccccccggcgccgccggcgagaagggcgtgcccggcgagaagggccccatcggccccaccggcagagacggcgtgcagggccccgtgggcctgcccggccccgccggcccccccggcgtggccggcgaggacggcgacaagggcgaggtgggcgaccccggccagaagggcaccaagggcaacaagggcgagcacggcccccccggcccccccggccccatcggccccgtgggccagcccggcgccgccggcgccgacggcgagcccggcgccagaggcccccagggccacttcggcgccaagggcgacgagggcaccagaggcttcaacggcccccccggccccatcggcctgcagggcctgcccggccccagcggcgagaagggcgagaccggcgacgtgggccccatgggcccccccggcccccccggccccagaggccccgccggccccaacggcgccgacggcccccagggcccccccggcggcgtgggcaacctgggcccccccggcgagaagggcgagcccggcgagagcggcagccccggcatccagggcgagcccggcgtgaagggccccagaggcgagagaggcgagaagggcgagagcggccagcccggcgagcccggcccccccggccccaagggccccaccggcgacgacggccccaagggcaaccccggccccgtgggcttccccggcgaccccggcccccccggcgagggcggccccagaggccaggacggcgccaagggcgacagaggcgaggacggcgagcccggccagcccggcagccccggccccaccggcgagaacggcccccccggccccctgggcaagagaggccccgccggcagccccggcagcgagggcagacagggcggcaagggcgccaagggcgaccccggcgccatcggcgcccccggcaagaccggccccgtgggccccgccggccccgccggcaagcccggccccgacggcctgagaggcctgcccggcagcgtgggccagcagggcagacccggcgccaccggccaggccggcccccccggccccgtgggcccccccggcctgcccggcctgagaggcgacgccggcgccaagggcgagaagggccaccccggcctgatcggcctgatcggcccccccggcgagcagggcgagaagggcgacagaggcctgcccggcccccagggcagccccggccagaagggcgagatgggcatccccggcgccagcggccccatcggccccggcggcccccccggcctgcccggccccgccggccccaagggcgccaagggcgccaccggccccggcggccccaagggcgagaagggcgtgcagggcccccccggccaccccggcccccccggcgaggtgatccagcccctgcccatccagatgcccaagaagaccagaagaagcgtggacggcagcagactgatgcaggaggacgaggccatccccaccggcggcgcccccggcagccccggcggcctggaggagatcttcggcagcctggacagcctgagagaggagatcgagcagatgagaagacccaccggcacccaggacagccccgccagaacctgccaggacctgaagctgtgccaccccgagctgcccgacggcgagtactgggtggaccccaaccagggctgcgccagagacgccttcagagtgttctgcaacttcaccgccggcggcgagacctgcgtgacccccagagacgacgtgacccagttcagctacgtggacagcgagggcagccccgtgggcgtggtgcagctgaccttcctgagactgctgagcgtgagcgcccaccaggacgtgagctacccctgcagcggcgccgccagagacggccccctgagactgagaggcgccaacgaggacgagctgagccccgagaccagcccctacgtgaaggagttcagagacggctgccagacccagcagggcagaaccgtgctggaggtgagaacccccgtgctggagcagctgcccgtgctggacgccagcttcagcgacctgggcgccccccccagaagaggcggcgtgctgctgggccccgtgtgcttcatgggctag

SEQ ID NO: 232417 - DNA, 4809 bp, Artificial Sequence
  derived and/or modified sequence
ggcgccccccccgtggacgtgctgagagccctgagattccccagcctgcccgacggcgtgagaagagccaagggcatctgccccgccgacgtggcctacagagtggccagacccgcccagctgagcgcccccaccagacagctgttccccggcggcttccccaaggacttcagcctgctgaccgtggtgagaaccagacccggcctgcaggcccccctgctgaccctgtacagcgcccagggcgtgagacagctgggcctggagctgggcagacccgtgagattcctgtacgaggaccagaccggcagaccccagccccccagccagcccgtgttcagaggcctgagcctggccgacggcaagtggcacagagtggccgtggccgtgaagggccagagcgtgaccctgatcgtggactgcaagaagagagtgaccagacccctgcccagaagcgccagacccgtgctggacacccacggcgtgatcatcttcggcgccagaatcctggacgaggaggtgttcgagggcgacgtgcaggagctggccatcgtgcccggcgtgcaggccgcctacgagagctgcgagcagaaggagctggagtgcgagggcggccagagagagagaccccagaaccagcagccccacagagcccagagaagcccccagcagcagcccagcagactgcacagaccccagaaccaggagccccagagccaggccgcccacggccccagaggcctgaagggcgagaagggcgagcccgccgtgctggagcccggcatgctggtggagggcccccccggccccgagggccccgccggcctgatcggcccccccggcatccagggcaaccccggccccgtgggcgaccccggcgagagaggcccccccggcagagccggcctgcccggcagcgacggcgcccccggcccccccggcaccagcctgatgctgcccttcagattcggcagcggcggcggcgacaagggccccgtggtggccgcccaggaggcccaggcccaggccatcctgcagcaggccagactggccctgagaggcccccccggccccatgggctacaccggcagacccggccccctgggccagcccggcagccccggcctgaagggcgagagcggcgacctgggcccccagggccccagaggcccccagggcctgaccggcccccccggcaaggccggcagaagaggcagagccggcgccgacggcgccagaggcatgcccggcgaccccggcgtgaagggcgacagaggcttcgacggcctgcccggcctgcccggcgagaagggccacagaggcgacaccggcgcccagggcctgcccggcccccccggcgaggacggcgagagaggcgacgacggcgagatcggccccagaggcctgcccggcgagagcggccccagaggcctgctgggccccaagggcccccccggcatccccggcccccccggcgtgagaggcatggacggcccccagggccccaagggcagcctgggcccccagggcgagcccggcccccccggccagcagggcacccccggcacccagggcctgcccggcccccagggcgccatcggcccccacggcgagaagggcccccagggcaagcccggcctgcccggcatgcccggcagcgacggcccccccggccaccccggcaaggagggcccccccggcaccaagggcaaccagggccccagcggcccccagggccccctgggctaccccggccccagaggcgtgaagggcgtggacggcatcagaggcctgaagggccacaagggcgagaagggcgaggacggcttccccggcttcaagggcgacatcggcgtgaagggcgacagaggcgaggtgggcgtgcccggcagcagaggcgaggacggccccgagggccccaagggcagaaccggccccaccggcgaccccggcccccccggcctgatgggcgagaagggcaagctgggcgtgcccggcctgcccggctaccccggcagacagggccccaagggcagcctgggcttccccggcttccccggcgccagcggcgagaagggcgccagaggcctgagcggcaagagcggccccagaggcgagagaggccccaccggccccagaggccagagaggccccagaggcgccaccggcaagagcggcgccaagggcaccagcggcggcgacggcccccacggcccccccggcgagagaggcctgcccggcccccagggccccaacggcttccccggccccaagggcccccccggcccccccggcaaggacggcctgcccggccaccccggccagagaggcgaggtgggcttccagggcaagaccggcccccccggcccccccggcgtggtgggcccccagggcgccgccggcgagaccggccccatgggcgagagaggccaccccggcccccccggcccccccggcgagcagggcctgcccggcaccgccggcaaggagggcaccaagggcgaccccggcccccccggcgcccccggcaaggacggccccgccggcctgagaggcttccccggcgagagaggcctgcccggcaccgccggcggccccggcctgaagggcaacgagggccccagcggcccccccggccccgccggcagccccggcgagagaggcgccgccggcagcggcggccccatcggcccccccggcagacccggcccccagggcccccccggcgccgccggcgagaagggcgtgcccggcgagaagggccccatcggccccaccggcagagacggcgtgcagggccccgtgggcctgcccggccccgccggcccccccggcgtggccggcgaggacggcgacaagggcgaggtgggcgaccccggccagaagggcaccaagggcaacaagggcgagcacggcccccccggcccccccggccccatcggccccgtgggccagcccggcgccgccggcgccgacggcgagcccggcgccagaggcccccagggccacttcggcgccaagggcgacgagggcaccagaggcttcaacggcccccccggccccatcggcctgcagggcctgcccggccccagcggcgagaagggcgagaccggcgacgtgggccccatgggcccccccggcccccccggccccagaggccccgccggccccaacggcgccgacggcccccagggcccccccggcggcgtgggcaacctgggcccccccggcgagaagggcgagcccggcgagagcggcagccccggcatccagggcgagcccggcgtgaagggccccagaggcgagagaggcgagaagggcgagagcggccagcccggcgagcccggcccccccggccccaagggccccaccggcgacgacggccccaagggcaaccccggccccgtgggcttccccggcgaccccggcccccccggcgagggcggccccagaggccaggacggcgccaagggcgacagaggcgaggacggcgagcccggccagcccggcagccccggccccaccggcgagaacggcccccccggccccctgggcaagagaggccccgccggcagccccggcagcgagggcagacagggcggcaagggcgccaagggcgaccccggcgccatcggcgcccccggcaagaccggccccgtgggccccgccggccccgccggcaagcccggccccgacggcctgagaggcctgcccggcagcgtgggccagcagggcagacccggcgccaccggccaggccggcccccccggccccgtgggcccccccggcctgcccggcctgagaggcgacgccggcgccaagggcgagaagggccaccccggcctgatcggcctgatcggcccccccggcgagcagggcgagaagggcgacagaggcctgcccggcccccagggcagccccggccagaagggcgagatgggcatccccggcgccagcggccccatcggccccggcggcccccccggcctgcccggccccgccggccccaagggcgccaagggcgccaccggccccggcggccccaagggcgagaagggcgtgcagggcccccccggccaccccggcccccccggcgaggtgatccagcccctgcccatccagatgcccaagaagaccagaagaagcgtggacggcagcagactgatgcaggaggacgaggccatccccaccggcggcgcccccggcagccccggcggcctggaggagatcttcggcagcctggacagcctgagagaggagatcgagcagatgagaagacccaccggcacccaggacagccccgccagaacctgccaggacctgaagctgtgccaccccgagctgcccgacggcgagtactgggtggaccccaaccagggctgcgccagagacgccttcagagtgttctgcaacttcaccgccggcggcgagacctgcgtgacccccagagacgacgtgacccagttcagctacgtggacagcgagggcagccccgtgggcgtggtgcagctgaccttcctgagactgctgagcgtgagcgcccaccaggacgtgagctacccctgcagcggcgccgccagagacggccccctgagactgagaggcgccaacgaggacgagctgagccccgagaccagcccctacgtgaaggagttcagagacggctgccagacccagcagggcagaaccgtgctggaggtgagaacccccgtgctggagcagctgcccgtgctggacgccagcttcagcgacctgggcgccccccccagaagaggcggcgtgctgctgggccccgtgtgcttcatgggctag

SEQ ID NO: 232418 - DNA, 4890 bp, Artificial Sequence
  derived and/or modified sequence
atggagagatgcagcagatgccacagactgctgctgctgctgcccctggtgctgggcctgagcgccgcccccggctgggccggcgccccccccgtggacgtgctgagagccctgagattccccagcctgcccgacggcgtgagaagagccaagggcatctgccccgccgacgtggcctacagagtggccagacccgcccagctgagcgcccccaccagacagctgttccccggcggcttccccaaggacttcagcctgctgaccgtggtgagaaccagacccggcctgcaggcccccctgctgaccctgtacagcgcccagggcgtgagacagctgggcctggagctgggcagacccgtgagattcctgtacgaggaccagaccggcagaccccagccccccagccagcccgtgttcagaggcctgagcctggccgacggcaagtggcacagagtggccgtggccgtgaagggccagagcgtgaccctgatcgtggactgcaagaagagagtgaccagacccctgcccagaagcgccagacccgtgctggacacccacggcgtgatcatcttcggcgccagaatcctggacgaggaggtgttcgagggcgacgtgcaggagctggccatcgtgcccggcgtgcaggccgcctacgagagctgcgagcagaaggagctggagtgcgagggcggccagagagagagaccccagaaccagcagccccacagagcccagagaagcccccagcagcagcccagcagactgcacagaccccagaaccaggagccccagagccaggccgcccacggccccagaggcctgaagggcgagaagggcgagcccgccgtgctggagcccggcatgctggtggagggcccccccggccccgagggccccgccggcctgatcggcccccccggcatccagggcaaccccggccccgtgggcgaccccggcgagagaggcccccccggcagagccggcctgcccggcagcgacggcgcccccggcccccccggcaccagcctgatgctgcccttcagattcggcagcggcggcggcgacaagggccccgtggtggccgcccaggaggcccaggcccaggccatcctgcagcaggccagactggccctgagaggcccccccggccccatgggctacaccggcagacccggccccctgggccagcccggcagccccggcctgaagggcgagagcggcgacctgggcccccagggccccagaggcccccagggcctgaccggcccccccggcaaggccggcagaagaggcagagccggcgccgacggcgccagaggcatgcccggcgaccccggcgtgaagggcgacagaggcttcgacggcctgcccggcctgcccggcgagaagggccacagaggcgacaccggcgcccagggcctgcccggcccccccggcgaggacggcgagagaggcgacgacggcgagatcggccccagaggcctgcccggcgagagcggccccagaggcctgctgggccccaagggcccccccggcatccccggcccccccggcgtgagaggcatggacggcccccagggccccaagggcagcctgggcccccagggcgagcccggcccccccggccagcagggcacccccggcacccagggcctgcccggcccccagggcgccatcggcccccacggcgagaagggcccccagggcaagcccggcctgcccggcatgcccggcagcgacggcccccccggccaccccggcaaggagggcccccccggcaccaagggcaaccagggccccagcggcccccagggccccctgggctaccccggccccagaggcgtgaagggcgtggacggcatcagaggcctgaagggccacaagggcgagaagggcgaggacggcttccccggcttcaagggcgacatcggcgtgaagggcgacagaggcgaggtgggcgtgcccggcagcagaggcgaggacggccccgagggccccaagggcagaaccggccccaccggcgaccccggcccccccggcctgatgggcgagaagggcaagctgggcgtgcccggcctgcccggctaccccggcagacagggccccaagggcagcctgggcttccccggcttccccggcgccagcggcgagaagggcgccagaggcctgagcggcaagagcggccccagaggcgagagaggccccaccggccccagaggccagagaggccccagaggcgccaccggcaagagcggcgccaagggcaccagcggcggcgacggcccccacggcccccccggcgagagaggcctgcccggcccccagggccccaacggcttccccggccccaagggccccctgggcccccccggcaaggacggcctgcccggccaccccggccagagaggcgaggtgggcttccagggcaagaccggcccccccggcccccccggcgtggtgggcccccagggcgccgccggcgagaccggccccatgggcgagagaggccaccccggcccccccggcccccccggcgagcagggcctgcccggcaccgccggcaaggagggcaccaagggcgaccccggcccccccggcgcccccggcaaggacggccccgccggcctgagaggcttccccggcgagagaggcctgcccggcaccgccggcggccccggcctgaagggcaacgagggccccagcggcccccccggccccgccggcagccccggcgagagaggcgccgccggcagcggcggccccatcggcccccccggcagacccggcccccagggcccccccggcgccgccggcgagaagggcgtgcccggcgagaagggccccatcggccccaccggcagagacggcgtgcagggccccgtgggcctgcccggccccgccggcccccccggcgtggccggcgaggacggcgacaagggcgaggtgggcgaccccggccagaagggcaccaagggcaacaagggcgagcacggcccccccggcccccccggccccatcggccccgtgggccagcccggcgccgccggcgccgacggcgagcccggcgccagaggcccccagggccacttcggcgccaagggcgacgagggcaccagaggcttcaacggcccccccggccccatcggcctgcagggcctgcccggccccagcggcgagaagggcgagaccggcgacgtgggccccatgggcccccccggcccccccggccccagaggccccgccggccccaacggcgccgacggcccccagggcccccccggcggcgtgggcaacctgggcccccccggcgagaagggcgagcccggcgagagcggcagccccggcatccagggcgagcccggcgtgaagggccccagaggcgagagaggcgagaagggcgagagcggccagcccggcgagcccggcccccccggccccaagggccccaccggcgacgacggccccaagggcaaccccggccccgtgggcttccccggcgaccccggcccccccggcgagggcggccccagaggccaggacggcgccaagggcgacagaggcgaggacggcgagcccggccagcccggcagccccggccccaccggcgagaacggcccccccggccccctgggcaagagaggccccgccggcagccccggcagcgagggcagacagggcggcaagggcgccaagggcgaccccggcgccatcggcgcccccggcaagaccggccccgtgggccccgccggccccgccggcaagcccggccccgacggcctgagaggcctgcccggcagcgtgggccagcagggcagacccggcgccaccggccaggccggcccccccggccccgtgggcccccccggcctgcccggcctgagaggcgacgccggcgccaagggcgagaagggccaccccggcctgatcggcctgatcggcccccccggcgagcagggcgagaagggcgacagaggcctgcccggcccccagggcagccccggccagaagggcgagatgggcatccccggcgccagcggccccatcggccccggcggcccccccggcctgcccggccccgccggccccaagggcgccaagggcgccaccggccccggcggccccaagggcgagaagggcgtgcagggcccccccggccaccccggcccccccggcgaggtgatccagcccctgcccatccagatgcccaagaagaccagaagaagcgtggacggcagcagactgatgcaggaggacgaggccatccccaccggcggcgcccccggcagccccggcggcctggaggagatcttcggcagcctggacagcctgagagaggagatcgagcagatgagaagacccaccggcacccaggacagccccgccagaacctgccaggacctgaagctgtgccaccccgagctgcccgacggcgagtactgggtggaccccaaccagggctgcgccagagacgccttcagagtgttctgcaacttcaccgccggcggcgagacctgcgtgacccccagagacgacgtgacccagttcagctacgtggacagcgagggcagccccgtgggcgtggtgcagctgaccttcctgagactgctgagcgtgagcgcccaccaggacgtgagctacccctgcagcggcgccgccagagacggccccctgagactgagaggcgccaacgaggacgagctgagccccgagaccagcccctacgtgaaggagttcagagacggctgccagacccagcagggcagaaccgtgctggaggtgagaacccccgtgctggagcagctgcccgtgctggacgccagcttcagcgacctgggcgccccccccagaagaggcggcgtgctgctgggccccgtgtgcttcatgggctag

SEQ ID NO: 232419 - DNA, 4890 bp, Artificial Sequence
  derived and/or modified sequence
atggagagatgcagcagatgccacagactgctgctgctgctgcccctggtgctgggcctgagcgccgcccccggctgggccggcgccccccccgtggacgtgctgagagccctgagattccccagcctgcccgacggcgtgagaagagccaagggcatctgccccgccgacgtggcctacagagtggccagacccgcccagctgagcgcccccaccagacagctgttccccggcggcttccccaaggacttcagcctgctgaccgtggtgagaaccagacccggcctgcaggcccccctgctgaccctgtacagcgcccagggcgtgagacagctgggcctggagctgggcccccccgtgagattcctgtacgaggaccagaccggcagaccccagccccccagccagcccgtgttcagaggcctgagcctggccgacggcaagtggcacagagtggccgtggccgtgaagggccagagcgtgaccctgatcgtggactgcaagaagagagtgaccagacccctgcccagaagcgccagacccgtgctggacacccacggcgtgatcatcttcggcgccagaatcctggacgaggaggtgttcgagggcgacgtgcaggagctggccatcgtgcccggcgtgcaggccgcctacgagagctgcgagcagaaggagctggagtgcgagggcggccagagagagagaccccagaaccagcagccccacagagcccagagaagcccccagcagcagcccagcagactgcacagaccccagaaccaggagccccagagccaggccgcccacggccccagaggcctgaagggcgagaagggcgagcccgccgtgctggagcccggcatgctggtggagggcccccccggccccgagggccccgccggcctgatcggcccccccggcatccagggcaaccccggccccgtgggcgaccccggcgagagaggcccccccggcagagccggcctgcccggcagcgacggcgcccccggcccccccggcaccagcctgatgctgcccttcagattcggcagcggcggcggcgacaagggccccgtggtggccgcccaggaggcccaggcccaggccatcctgcagcaggccagactggccctgagaggcccccccggccccatgggctacaccggcagacccggccccctgggccagcccggcagccccggcctgaagggcgagagcggcgacctgggcccccagggccccagaggcccccagggcctgaccggcccccccggcaaggccggcagaagaggcagagccggcgccgacggcgccagaggcatgcccggcgaccccggcgtgaagggcgacagaggcttcgacggcctgcccggcctgcccggcgagaagggccacagaggcgacaccggcgcccagggcctgcccggcccccccggcgaggacggcgagagaggcgacgacggcgagatcggccccagaggcctgcccggcgagagcggccccagaggcctgctgggccccaagggcccccccggcatccccggcccccccggcgtgagaggcatggacggcccccagggccccaagggcagcctgggcccccagggcgagcccggcccccccggccagcagggcacccccggcacccagggcctgcccggcccccagggcgccatcggcccccacggcgagaagggcccccagggcaagcccggcctgcccggcatgcccggcagcgacggcccccccggccaccccggcaaggagggcccccccggcaccaagggcaaccagggccccagcggcccccagggccccctgggctaccccggccccagaggcgtgaagggcgtggacggcatcagaggcctgaagggccacaagggcgagaagggcgaggacggcttccccggcttcaagggcgacatcggcgtgaagggcgacagaggcgaggtgggcgtgcccggcagcagaggcgaggacggccccgagggccccaagggcagaaccggccccaccggcgaccccggcccccccggcctgatgggcgagaagggcaagctgggcgtgcccggcctgcccggctaccccggcagacagggccccaagggcagcctgggcttccccggcttccccggcgccagcggcgagaagggcgccagaggcctgagcggcaagagcggccccagaggcgagagaggccccaccggccccagaggccagagaggccccagaggcgccaccggcaagagcggcgccaagggcaccagcggcggcgacggcccccacggcccccccggcgagagaggcctgcccggcccccagggccccaacggcttccccggccccaagggcccccccggcccccccggcaaggacggcctgcccggccaccccggccagagaggcgaggtgggcttccagggcaagaccggcccccccggcccccccggcgtggtgggcccccagggcgccgccggcgagaccggccccatgggcgagagaggccaccccggcccccccggcccccccggcgagcagggcctgcccggcaccgccggcaaggagggcaccaagggcgaccccggcccccccggcgcccccggcaaggacggccccgccggcctgagaggcttccccggcgagagaggcctgcccggcaccgccggcggccccggcctgaagggcaacgagggccccagcggcccccccggccccgccggcagccccggcgagagaggcgccgccggcagcggcggccccatcggcccccccggcagacccggcccccagggcccccccggcgccgccggcgagaagggcgtgcccggcgagaagggccccatcggccccaccggcagagacggcgtgcagggccccgtgggcctgcccggccccgccggcccccccggcgtggccggcgaggacggcgacaagggcgaggtgggcgaccccggccagaagggcaccaagggcaacaagggcgagcacggcccccccggcccccccggccccatcggccccgtgggccagcccggcgccgccggcgccgacggcgagcccggcgccagaggcccccagggccacttcggcgccaagggcgacgagggcaccagaggcttcaacggcccccccggccccatcggcctgcagggcctgcccggccccagcggcgagaagggcgagaccggcgacgtgggccccatgggcccccccggcccccccggccccagaggccccgccggccccaacggcgccgacggcccccagggcccccccggcggcgtgggcaacctgggcccccccggcgagaagggcgagcccggcgagagcggcagccccggcatccagggcgagcccggcgtgaagggccccagaggcgagagaggcgagaagggcgagagcggccagcccggcgagcccggcccccccggccccaagggccccaccggcgacgacggccccaagggcaaccccggccccgtgggcttccccggcgaccccggcccccccggcgagggcggccccagaggccaggacggcgccaagggcgacagaggcgaggacggcgagcccggccagcccggcagccccggccccaccggcgagaacggcccccccggccccctgggcaagagaggccccgccggcagccccggcagcgagggcagacagggcggcaagggcgccaagggcgaccccggcgccatcggcgcccccggcaagaccggccccgtgggccccgccggccccgccggcaagcccggccccgacggcctgagaggcctgcccggcagcgtgggccagcagggcagacccggcgccaccggccaggccggcccccccggccccgtgggcccccccggcctgcccggcctgagaggcgacgccggcgccaagggcgagaagggccaccccggcctgatcggcctgatcggcccccccggcgagcagggcgagaagggcgacagaggcctgcccggcccccagggcagccccggccagaagggcgagatgggcatccccggcgccagcggccccatcggccccggcggcccccccggcctgcccggccccgccggccccaagggcgccaagggcgccaccggccccggcggccccaagggcgagaagggcgtgcagggcccccccggccaccccggcccccccggcgaggtgatccagcccctgcccatccagatgcccaagaagaccagaagaagcgtggacggcagcagactgatgcaggaggacgaggccatccccaccggcggcgcccccggcagccccggcggcctggaggagatcttcggcagcctggacagcctgagagaggagatcgagcagatgagaagacccaccggcacccaggacagccccgccagaacctgccaggacctgaagctgtgccaccccgagctgcccgacggcgagtactgggtggaccccaaccagggctgcgccagagacgccttcagagtgttctgcaacttcaccgccggcggcgagacctgcgtgacccccagagacgacgtgacccagttcagctacgtggacagcgagggcagccccgtgggcgtggtgcagctgaccttcctgagactgctgagcgtgagcgcccaccaggacgtgagctacccctgcagcggcgccgccagagacggccccctgagactgagaggcgccaacgaggacgagctgagccccgagaccagcccctacgtgaaggagttcagagacggctgccagacccagcagggcagaaccgtgctggaggtgagaacccccgtgctggagcagctgcccgtgctggacgccagcttcagcgacctgggcgccccccccagaagaggcggcgtgctgctgggccccgtgtgcttcatgggctag

SEQ ID NO: 232420 - DNA, 4890 bp, Artificial Sequence
  derived and/or modified sequence
atggagcggtgtagccgttgtcacaggctcctgctcctgcttcccctggtgctggggttgagcgctgcgcccggatgggcaggagccccacctgtggacgtgttgcgtgctctcaggttcccgagtctcccagatggtgtgaggcgcgcaaaagggatctgcccggctgatgtcgcataccgtgttgcccggcctgcccagctctcagcgcccacacgacagctgttccctgggggcttcccgaaagactttagccttttaacagtcgttcgcacaagaccaggtctgcaggccccacttctgactctctatagtgcgcagggggtgcggcagctcggactggagctggggagaccggtccgcttcctatatgaggatcagactgggagaccgcaaccaccttcccagcctgttttccgcggactgagtctggccgacgggaaatggcatcgggtggcggtggccgttaaaggccagagcgtaacccttattgtggattgcaagaagagagtaacacgcccactccccaggtcagcgcgccccgtgctcgacacacatggggtcattatctttggggctaggattttggatgaggaggtatttgagggggatgtgcaggagttagccatcgtgcccggcgtccaggctgcttatgaatcttgcgaacagaaggaactggaatgtgagggcggacaacgagaacgacctcagaatcaacagccccaccgtgcgcagaggagtcctcagcagcagccatctcgcctgcatcggccccaaaaccaggagccacaaagtcaagccgcccacggcccaaggggacttaagggagagaaaggcgagcccgcagtactggagcctgggatgctcgttgagggcccccccggacctgagggcccagctggactgatcggtccccctggcatccagggtaatccaggtcccgttggggaccctggtgaacggggccctcccggacgtgcgggactccctggaagcgacggagcgcctgggccaccaggaaccagtctgatgctgccattcaggttcggatctggcggtggcgataagggccccgtggtcgctgcacaggaggcccaggcacaggccatcctgcagcaggcccgcctcgccctgcgcggtccccccggtcctatgggttataccgggcgccccgggccactgggtcaaccaggaagtcccggtctcaaaggcgagagcggggatctcggcccccagggccctcgcggtccccagggactcacaggcccacccggaaaggctgggcggcgaggaagggcaggagcggacggagctagaggaatgccaggcgatcccggcgtaaaaggagacagagggttcgatgggttgcccggccttccaggcgagaaaggacacagaggcgacaccggtgctcagggtcttccaggccctccgggcgaggatggggaacgcggcgatgacggcgagattgggccgagaggcttgcctggtgagagcggcccccgaggactcctaggaccgaaggggccccctggcatcccgggcccaccaggcgttagaggtatggatgggccacaagggcccaaaggcagcctgggcccccagggagaacctggcccacctggacagcaggggacacccggaacacagggcctccctgggccgcagggagctattgggccccacggagagaagggaccacaaggcaagcccgggctgccgggcatgccggggtcagatggacccccaggacatccaggcaaagaagggccaccgggaacaaagggtaaccaaggcccctcagggccccagggtcctctcggctatccgggcccaagaggagttaaaggcgtggatggcattaggggactgaaagggcataagggagagaaaggcgaggacggatttccgggctttaaaggggacattggtgtgaagggtgaccgcggcgaagtaggagttcctggctccagaggcgaagacgggccagaggggcccaaggggcgcacagggccaacgggagatcctggtcctcccggcctgatgggagaaaaggggaagctcggagtgccaggcctgcccggataccctggcaggcagggcccgaaggggagtcttggcttccccgggtttccaggcgccagcggtgaaaaaggcgctcggggactgtccgggaagagtggcccccggggggagcggggacccactggacctcgcggacaacgaggacccaggggggccacgggaaaatctggcgcaaaagggacgagcggcggcgacgggcctcacgggcctccgggggaacggggccttccgggcccacagggccctaatggcttccccggtcccaaaggcccaccaggacccccaggaaaagacgggcttccaggacaccccggacagcgcggtgaggttggcttccagggcaagaccggacccccgggccccccaggggtggttgggccacagggcgcggccggagagacaggacccatgggggagcgtggccacccaggccccccagggccacctggggaacagggacttccggggaccgccggaaaggagggcacaaagggtgaccctggcccccccggcgctccaggaaaagatggacccgctggactgaggggattccccggagaaagagggctccctgggacggctggcggtcccggcctgaagggtaatgaaggaccttcggggcctcctgggcccgccgggtcccctggggaaagaggcgccgctggaagcgggggaccgatcgggcctcctgggagaccaggtcctcaagggccacccggagcagcaggcgaaaaaggtgtgcccggcgaaaagggacctatcggcccgacaggacgcgatggggtgcagggcccagttgggctcccaggtccagcaggcccacctggagttgccggcgaagacggcgacaagggggaggtgggtgaccccggacaaaagggtacaaagggcaataagggagagcatggtccgcccggcccacccggaccgatcggccccgtgggccagccgggtgctgccggtgccgacggagagccaggagcccgaggaccccagggacacttcggagctaagggagacgaaggcactcgcggcttcaacggcccacctggacccattggcttgcaggggctgcctggccctagtggcgaaaaaggtgaaaccggcgacgtgggtccgatgggtcctcccggtccccccggcccccgcgggcctgccgggcctaatggtgccgacgggcctcaagggccaccggggggcgtcggcaaccttggtcccccaggcgagaagggcgagcctggggaatccggctctcctggcattcaaggggagccaggtgtgaaaggcccaagaggtgagcgtggagagaagggcgagtcaggtcaaccaggggagcctggtccacccggccctaaggggccaacaggagacgatggccccaaaggaaatccggggccagttggtttccctggcgatccaggccccccaggtgagggcggacctcgtggccaagacggtgcaaagggcgacagaggagaggatggggaaccggggcagccgggcagtcccggtcctactggtgagaacggacccccaggacctctgggcaaacgcggacccgctgggtccccggggtcagaaggtcggcagggaggtaaaggagcaaagggggaccctggagctatcggggcgcccggaaagaccggacccgtaggccccgccggccccgctggcaaacccggcccagacggattgcgcggcctgccgggctccgtagggcagcagggacggcctggggctactggccaagcaggccctccagggcctgtcggcccaccgggcctgcctggcctgaggggcgatgcaggagcgaagggcgagaaggggcatccaggattgattggtctgatcggccccccgggagaacagggggagaagggcgaccggggcctgccaggacctcagggctcccctggacagaagggggaaatggggatccccggggcctccggccccatagggcccggcggaccgcctggtctgcctggcccggcgggcccaaaaggcgctaagggtgccaccggacccgggggacctaagggagaaaagggggtgcagggcccacccggacaccctggacctcctggggaagtgatccagccattgcccatccagatgccaaaaaaaacacggcgatccgtggacgggagtaggctgatgcaggaggatgaggctattcccacaggaggggccccaggatctcccggcggacttgaggagatttttgggtctcttgattctctgcgcgaagaaatcgaacaaatgcggagacccacgggaacccaagacagccctgccaggacctgtcaggacttgaagctgtgccatcctgagttaccagacggggaatattgggtggacccgaatcagggatgtgcccgagatgcattccgagttttctgcaacttcacggcaggtggtgaaacctgtgtcaccccgcgcgatgacgtgacacagttttcttatgtcgactccgaaggcagtccagtgggcgtggtgcaactgacctttctgagattactttccgttagtgcacaccaggacgtcagctatccatgctccggagctgcccgtgatggccctttgcgcctccgcggtgccaacgaggatgaattgtctccagagacttccccatacgtgaaagaatttagagacggctgccaaacgcaacaaggaaggaccgtgctggaggtgagaactccggttctggaacaacttccagtgctggatgcctctttttcggacctgggggccccgccccgcagagggggggtactgcttggccccgtctgctttatgggctag

SEQ ID NO: 232421 - DNA, 4809 bp, Artificial Sequence
  derived and/or modified sequence
ggagcaccccccgtcgacgttctccgagctcttagattcccgagcctgcccgacggcgtgaggcgggccaaggggatctgtccagcagatgtggcctaccgcgtcgcgcgccctgcacagctaagcgcgcctacgagacagctgttccctggcggattcccaaaggacttctcacttctgaccgtggtgcggacccgacccggattacaggcaccactgctcaccctctatagtgctcagggggtgagacagctcggcctggagctgggacggcctgtgcgctttctctatgaggaccagaccggtcgcccccagcctccatcccagcccgttttccggggcttgtcactcgctgatgggaagtggcatagagtcgctgtggctgtgaagggccaaagcgtcacactgatcgtcgactgtaagaagcgagtgactagaccactccccaggtctgcccgacctgtgctggacacacacggagtgataatcttcggtgcacggatattagacgaagaagttttcgagggcgacgtgcaagaactggcaattgtaccaggggtgcaagccgcatatgaaagttgtgaacagaaagagcttgagtgtgagggtggacagagagagcggcctcagaatcagcagcctcacagagcacagaggtctccacagcagcagccttctcgtctgcatagaccgcagaatcaggaacctcaatcccaagctgctcatggcccaaggggcctgaagggggagaagggcgagccggctgtgctggagcccggtatgttagtggaggggcctcccggtcctgaagggccggcaggactgatcggcccacccggcatccagggcaatcctggccccgtgggtgatccgggagaaaggggcccccctggcagggcaggactccctggaagtgacggagccccaggcccgccgggcacatcgttaatgcttcctttccggtttgggtccggtggcggggataaagggccagtcgtcgctgcccaggaagcacaggcccaggcaattttgcaacaggccagactcgcgctgcgcggcccacctggaccaatgggctatactgggcgccccgggcctctgggacagccgggttcaccagggttgaaaggcgagtctggcgacttagggccgcaaggccccagggggcctcaggggctgaccggaccacccggcaaggcgggccgcagaggccgggcaggtgccgatggtgcgaggggcatgcccggagatcccggtgtgaagggagatcgtgggtttgatggactgcctggcctgccaggtgaaaagggccacagaggagacaccggcgcccaggggctcccaggcccccccggggaggatggcgagaggggcgatgatggggagataggacccagaggtttgccgggggaaagcggtccaagaggccttttaggacccaagggacctccgggtatccctggcccacccggcgtgcgcggaatggatggtccacagggccccaaaggatccctcggcccccaaggcgaacccggccctcccgggcaacaggggactcctggaacacagggtctgccaggaccccagggtgccatcgggccccatggtgaaaagggaccacagggcaaacctgggctgccgggaatgccaggctcagacggcccaccgggtcatccaggcaaagaaggtccccccggcacaaagggcaatcagggaccaagcggccctcagggacctctaggatatcccggtcctcgtggagtaaaaggggtggatggaattcgtggcctcaaggggcataaaggagaaaagggtgaggatggtttccccggattcaagggagacattggcgtaaaaggagacaggggagaggtgggcgttcccggctctcgaggggaagacggaccagaagggccaaaggggcgcacaggacccaccggggatcctgggccaccgggtctgatgggagagaaggggaaactgggggttcccggccttcccggctatcccgggcgacagggcccaaaaggctcattgggttttcctggattcccaggagcctctggtgagaagggagctcggggcttgagtggaaaaagtggaccacgcggtgaacgaggcccaaccggcccacgggggcagagaggtcctcggggtgcaaccggtaaaagcggggccaagggcacatcaggcggcgatgggccccatgggccaccaggtgagagagggctgccaggaccacagggaccaaatggctttccagggcctaaaggccctcctgggcccccaggcaaagacggcctgcctggacaccccggacagcggggcgaagtagggttccagggcaaaacaggacccccgggccctccgggagttgtcggccctcaaggtgccgcaggtgagacaggaccaatgggagagcgaggccatcctggtccccccggaccccctggagagcagggcctgcccggcactgcaggaaaagaaggcacaaagggtgacccaggaccccctggagcccccgggaaggatggtccggctggactgaggggtttcccgggagaaagagggctccccggaactgctgggggccctgggctcaagggtaatgaaggtccatccggccctcccggcccagccggttccccgggcgagcgaggcgccgccgggtccggcgggccaattgggcccccaggtcgtcctggaccgcagggcccaccgggagcggctggcgagaaaggcgtacctggcgagaagggccctataggaccaaccggtagagacggagttcagggccccgtgggactcccaggcccagccggcccgccaggggtcgcgggcgaagatggagataagggggaggttggagaccctggtcaaaagggaacaaaaggcaataaaggtgagcacggcccaccgggaccgccagggccaatcgggccggtcggtcagcctggcgccgctggtgcagatggagagccaggggctcggggcccccagggccacttcggggccaaaggagatgaaggcacccggggattcaatggcccccctggaccaatcgggcttcaggggctgccaggaccaagtggcgaaaaaggcgaaaccggtgatgtgggcccaatgggccctcctggtccccctggcccaagggggccagctgggcccaacggcgctgacggcccccaaggcccacccggaggagtcggcaacctgggacccccaggagagaagggggagccaggcgagtccggctctccaggaatacaaggcgagcccggcgtaaagggaccccggggggagagaggcgaaaaaggggagtccggacagcctggcgagcccggaccaccaggtccaaagggaccaactggcgatgatggaccaaaggggaacccaggaccagtgggtttccctggagatcccggaccacctggcgagggaggccccagaggccaggacggagcgaagggcgacaggggcgaggacggagaacccggccagccaggcagcccagggccaaccggcgagaatgggccgccaggccccctcggaaaacgcgggcctgccggaagccccgggtctgaggggcggcagggtgggaagggagcaaaaggtgacccaggcgccattggcgctcctggcaagaccgggccagtcggcccagccggccctgcaggtaaacctgggccagacggcctgcgcggcctccctggtagcgtggggcagcagggtagacctggagcaacagggcaggctgggccacccggcccagtgggcccgcctggcctgcccggactgaggggcgacgcaggcgccaaaggggagaaggggcatcccggattgattgggttgattggaccccccggcgagcaaggcgagaagggggacagggggctccctgggccccagggcagcccagggcagaagggagagatgggcatccctggcgcttctggtccgatcggccctggcgggccacccgggcttcctgggcctgcaggcccaaagggagctaaaggcgctacaggcccagggggcccgaagggggaaaagggcgttcaaggaccaccaggacatccgggacctcctggcgaggttattcagcctttgccgatacagatgcctaagaagacacggaggtctgtggacggctccagactgatgcaggaggatgaagccatcccgacaggtggagctccgggaagtccagggggtctcgaggaaatctttggctccctggactcgctaagggaggagattgaacagatgcgtcggccgactggtacccaggatagcccagcgcgaacatgtcaggacctcaagttatgccatcctgaactgcccgacggggaatattgggtggatcccaatcagggttgcgcccgggatgcattcagagtcttctgcaatttcaccgccggtggagagacgtgcgtgacaccccgcgatgacgtgacccaatttagctatgtggattctgagggcagtccagtcggggttgtgcagctaactttcttgcggttactgtccgtatctgcccaccaggatgtatcatacccctgctccggggccgcccgcgatggtcctctcaggctgagaggggccaatgaagatgagctgtcgcctgaaacgagcccttatgttaaggagttccgagatggctgtcagacccagcaaggacgcacagtgctcgaagtccgaacgcctgtccttgagcagctcccagtcttggatgccagtttctccgatttgggcgcaccccctaggagaggcggcgtactcctgggtccagtgtgttttatgggatag

SEQ ID NO: 232422 - DNA, 4890 bp, Artificial Sequence
  derived and/or modified sequence
atggaaagatgcagcagatgtcataggctgctgctgcttctgcccctggtgctgggacttagcgccgcgccagggtgggccggggccccacctgtggacgtgctcagagccctgagattcccatccttgcctgacggcgtccgacgggcaaagggcatttgtccagccgatgtggcctaccgcgtggcgcgacccgcccagttgtcagccccaactaggcaactgttcccaggaggatttcctaaagattttagtcttcttactgtcgtacgaacccggccaggcctgcaggcacctctgttaacgctttactccgctcagggggtgagacagctgggcctggaacttgggaggccagttaggtttctgtacgaggaccaaacaggccgcccccagccgcccagtcagcctgtgtttagaggtttgtccctagccgatgggaaatggcatagggtcgccgttgccgttaagggccagtctgtgacacttatcgtggactgcaaaaaacgcgtgaccagacctctcccccgctcagcacggccagttttggatacgcacggcgtaattatatttggggctcgcatcctggatgaagaggtcttcgagggagacgtccaagagctcgccattgtgccaggcgtccaggccgcgtatgagtcatgcgagcagaaggaactggaatgtgagggagggcagcgcgagcgacctcagaatcagcagccacatcgagcccagcggtctccacaacagcagcccagtagattgcatcgaccacaaaaccaggaaccccagtcccaggctgctcacggtccccgcggcctgaaaggcgagaagggggaaccggctgtcctggagcctggaatgttggtcgaaggccctccaggaccagaaggtccagccggtctgattggcccgcctggaatccaaggaaatccaggacccgttggtgaccctggcgaacggggcccaccaggtcgggccggtcttccggggagcgacggcgcccctggccctcctggcacatccctcatgctgccattccggttcggaagcggaggaggcgataaagggccggtggtcgccgcccaggaagctcaggctcaggcaatcctgcagcaggcacgtctggccctgcgaggccctcctgggcctatgggatataccgggcgccccggtcctctgggacagccaggctccccggggcttaagggcgagtcgggggatctgggccctcagggccctaggggtccgcagggcctcacagggcctcctggaaaagccggcaggcggggaagagcgggcgccgatggcgccaggggcatgcccggcgaccctggggtgaaaggtgacaggggattcgacggactgcctggactgccaggtgagaaaggccatagaggtgacacaggggcccaaggcctgcctggaccaccgggggaggatggcgagaggggagatgatggagagattggacctcgtggtctgccgggggaatcaggccctcgcgggttattaggcccaaagggaccccccggtattccaggcccgccaggcgtacgcgggatggatggaccgcagggtcccaaaggatctcttgggcctcagggggaacctggaccccccgggcagcaggggacaccagggactcagggccttcctggaccacaaggggccatcgggccacatggcgaaaaaggcccacagggtaagcccggtctccccggcatgccagggtccgacggcccccccggccacccaggcaaagaaggaccacccggaactaagggcaatcagggcccatctggacctcagggcccgttgggataccctgggccaagaggcgtgaagggagtcgatggaatcagaggactgaagggacacaagggcgagaagggagaagacggattccccgggttcaagggcgatattggcgtaaaaggcgaccgtggcgaagtgggcgtgcctggtagcagaggagaagatggaccagaagggccgaaggggcggaccggcccgaccggcgatcctggacctccagggctgatgggggaaaagggcaaactgggcgtgcccgggctaccaggttatccagggcgtcagggccctaaaggaagcttgggattccccggattcccgggagcgagcggtgagaaaggggcccgtggactgagcggaaagtcagggcctcggggcgagcgaggtccaaccggaccgcggggtcagaggggcccacgcggggcgaccggtaaaagcggggccaaaggaacatctgggggagacgggccacatgggcccccaggagaacggggcctcccaggaccccaaggcccaaatggctttcctggcccaaaaggccctcccggcccgccagggaaagacggtcttccaggccaccctggacagcgaggagaagttggtttccagggcaagaccggcccaccaggccctcctggtgttgtgggcccccagggagctgccggtgagacaggcccaatgggggagcgcggacatccggggcccccaggcccacctggtgagcagggattgcccggtaccgcaggaaaagagggtaccaaaggcgaccccggaccccctggggcgcccggcaaagatggacccgccggactgagaggtttcccaggagagcgcggactgcccgggaccgccgggggtccggggttgaaaggaaatgagggcccctccggaccccctgggcccgctgggtccccaggggagagaggagccgccggaagcggaggaccaattgggcctcccggtcgacctggcccccaagggcccccaggcgcggctggggagaaaggagtgccaggcgagaagggaccgatcggtcctactggcagagacggcgtgcaaggcccagttggcttgccaggcccggctggccctcctggagtggccggagaggacggtgataaaggggaggtgggggatcccggtcagaagggcactaaggggaacaagggagagcatggcccccccggcccccctggtcccataggcccagttgggcaaccaggggccgcaggcgccgatggggaacccggagctcgtggcccccagggccactttggcgcaaagggagatgagggcacgcgaggcttcaatggcccccccggacctattgggctgcagggtctccctgggccttcaggggaaaagggggagactggcgacgtcggccccatggggccacctgggcctcccggcccccgcggcccagccggccctaacggggccgatggacctcagggtccacctggaggagtggggaacctgggtccacccggggaaaagggtgagccaggagagtcagggagtccaggaattcagggagaaccaggcgtgaaaggcccaaggggagagagaggagaaaagggggagtcagggcagccaggggagccaggacctccaggccctaagggtccgacaggcgacgatggtccaaaaggcaatcctggccctgtggggtttcctggtgaccccggtcctccgggggagggaggccctagaggacaggatggagcaaaaggggatcgcggcgaagacggggaaccaggccagcccggtagccccggacccacaggtgaaaatggcccccccgggccgctgggcaaaaggggtcccgctgggagtcccggttcggaggggcggcagggaggaaagggggcaaagggagaccctggtgcgattggtgcgcccggaaagacgggacctgtgggtccagccggcccagctggaaagcctggacccgacgggcttcggggactccctggcagtgtgggacagcaggggcgtccaggtgccaccggacaggcagggccgcccggccccgtcggcccccctggactgccgggtttgcgaggagacgcgggagccaagggcgaaaaagggcatcctggcctgatcggactcatcgggcctcctggagagcagggagagaaaggtgaccggggactcccaggacctcaggggtctccaggccagaagggtgagatgggtatacctggagcttccggtcccatagggcctggcgggccccccggcctgcccggccctgccggccccaaaggagctaaaggcgctacaggaccaggaggccctaagggggaaaagggcgtgcaggggcctccgggacatcccgggccacccggtgaagtcatccagccactccctattcagatgcccaagaagactcgccggtccgtggatgggtcccgactgatgcaggaagatgaagccattcctacgggaggcgccccaggcagccccggcgggctggaagaaatcttcggaagcctggatagcttgagagaagagatcgaacaaatgcgccgacctactgggacccaggacagccccgcgcgcacatgtcaggaccttaaattgtgtcatccagaactgccagatggcgagtattgggttgaccctaaccaaggttgtgcgcgggatgcgttcagagtgttctgtaactttacagccggtggcgagacatgtgtcacaccccgggatgatgtgactcagttttcctatgtcgattcggaaggcagcccagtcggtgtggtacagttaacattcctgaggctcctctctgtgtctgcccaccaggatgtgtcctacccatgctctggggccgcgcgcgacgggcccctgcgtctgcggggggccaacgaagacgaactgtcaccagaaacttcgccttacgttaaggagtttcgggacggatgccagacgcagcagggtcggacggtgctggaagtcaggaccccagtcttggaacagctccccgtgttagacgcttcattctcagacttgggagcaccacctcgtagaggcggtgtccttttagggcctgtgtgtttcatgggttag

SEQ ID NO: 232423 - DNA, 4890 bp, Artificial Sequence
  derived and/or modified sequence
atggagcgttgctcgcggtgccataggctgctcttgctgctgcccctggttctagggctgagtgccgcccctggatgggctggcgcccccccagtggacgtgttgagggccttacggttcccgtctctgcccgacggagtcaggagagccaaggggatctgccccgctgacgttgcctaccgcgtggccaggcctgcccagctgtccgctcctactaggcagttattcccaggaggctttcccaaggacttctccctcttaaccgtagtcaggacccgcccaggtctccaggcccctctgttgaccctgtatagtgcacagggagtgcggcagctggggctcgagctgggccggcccgtgagatttttatacgaagatcagactggtagaccccagcctccttcgcagcctgtgttccggggcctgtctctggcggatggcaaatggcacagagtcgccgtcgccgtgaaaggacagagcgttaccctgatcgtcgattgcaaaaagagggtgactaggcccctaccgagatccgcccgccccgtgctggacacgcatggtgtgatcattttcggagctcgcattctcgatgaagaggtcttcgagggcgatgttcaggagctcgctattgtccctggcgtgcaagcagcatacgagtcttgtgagcagaaagaactggaatgcgaaggaggtcagagagagaggccccagaaccagcagccacatcgcgcacaaagatctccccagcagcagcctagccgactgcaccggcctcagaatcaggaacctcagagccaggccgcgcatggccctcgtggcttgaagggagagaagggcgaaccagccgttctggaacctggcatgctggtggaagggcctcccggccctgaggggcctgcggggctgattggcccgccaggcatacagggtaatcctggccctgtaggagaccccggagagcgaggcccccctggtcgggctggcctgcctggctccgatggggcgcctggcccacctgggacgtcgctgatgctcccgtttcgcttcggatctggcggcggcgacaagggacccgtggtagctgcccaggaagctcaggcccaggcaatactgcaacaggctcggttagcgctccgcggccctcccggacctatggggtacacaggccgccccggtccactaggtcagcctggcagccctggcctcaaaggggagagcggtgatcttggtcctcagggccctcgggggccccagggactcactggcccgcctggaaaggcagggcgccgcggcagggcgggcgccgacggggcaaggggcatgccgggagatccaggggtgaagggcgatcggggcttcgacggtctgccgggcctgcctggagaaaaggggcacagaggcgacacgggtgcccagggcctccccggaccccccggcgaagatggagaaaggggggacgatggagaaatcggacctcggggtttacccggtgagtccggacctcgcggactgcttggaccaaagggaccccctggcattcccggaccaccaggcgtccgtggaatggatgggccacagggtccaaagggctccttgggaccccagggtgagccgggaccgccggggcaacagggaacaccagggacacagggcctgcccggccctcaaggcgctatcgggccacacggcgaaaaggggccccaaggtaaacctgggttgccagggatgcccggcagcgacggccctcctggacatccgggaaaagaggggccgccaggtaccaaaggcaatcagggccccagcggaccgcagggacccctaggatatccaggcccccgcggtgtaaaaggagtggatgggattagagggctcaaaggacacaagggcgagaagggggaggacggattcccagggtttaaaggtgacattggagtcaaaggggaccgaggggaagtcggcgtgcctggcagtagaggggaggacggccctgaagggcctaagggtcggactggaccgaccggagacccaggaccaccaggcctaatgggggagaaagggaaactcggagtaccaggtctccccggctaccccgggcggcagggtcctaagggatctctgggctttcccggttttcccggagcatcaggggaaaagggggcccggggcctgagtggcaagagcggaccacgaggcgaaaggggtccgaccggacccagggggcagagggggcctcgtggggccactggcaaatcgggcgccaaaggtacctcggggggagatgggcctcatggaccgcccggcgagagaggcttgccaggcccccagggtcctaacggattccctgggccaaaagggccacccgggcccccaggtaaagatggattgcctggacaccctgggcagagaggggaggtaggtttccagggtaagaccggacctcctggaccccctggcgtggtagggcctcagggcgccgctggtgagacagggcctatgggagaacgcggccaccccggaccacccggtccccctggcgagcaaggtctgcccgggacagccggcaaggaaggaaccaagggcgatcctggccccccaggcgcccctgggaaggacgggccagcaggcctgagaggattccccggggagagggggttgccgggaacagccggcgggccagggctgaaaggaaatgaagggccctccggtccaccagggcccgccgggtcccctggggagagaggggcagctggctctggaggccccatcggcccacccggaaggccgggcccccagggtcctcctggtgctgcaggcgagaaaggcgtgccaggggagaaagggcctatcggccctaccgggcgtgacggggttcaaggccccgttggtttgcccggacccgcgggccccccaggggttgctggggaggatggggataagggcgaagtgggagatccgggacaaaagggtacgaagggtaacaagggtgagcatggccctcccggccctccggggccaataggtccagttgggcaaccaggcgctgcaggcgcagatggcgaacccggagcacgcggccctcaagggcatttcggcgctaagggggacgaaggcacaagagggttcaacggccctccagggcctattgggctgcaggggttaccaggccccagcggcgagaaaggagagactggcgacgtcggtccgatgggccctcctgggccaccgggacctcggggcccggctggcccaaatggtgccgatggaccgcagggccctccaggtggagtcgggaacttgggtcccccaggggagaagggtgaaccaggggagtcaggcagccccggtattcaaggggaaccgggggtaaagggcccccggggggaaagaggcgaaaagggggaatccggtcagcccggagagccaggtcctccaggccccaagggacccacgggagacgacggccccaaaggcaatccaggtccggtggggtttccaggcgacccaggcccacccggggaaggcggaccgcggggtcaggacggagcaaagggcgaccgcggcgaggatggggaacccgggcaacctgggtccccgggccctaccggcgagaatggacctcccggcccccttggcaaaaggggcccagccggtagtccaggcagcgaaggccggcaggggggcaaaggcgcaaagggcgacccgggggctatcggagctcctggaaagacgggcccagtgggaccagctggccctgccgggaaaccaggccctgacggtcttcggggccttcccggatccgtggggcagcaaggtaggcctggtgccacgggccaggcaggcccccctggtccagtgggaccaccaggcctgcctggacttcgaggtgatgcaggtgccaagggagaaaagggccatccaggcctgattggcctgataggtccaccaggggagcagggagagaaaggtgacagaggcctgcctggaccccagggctccccaggacaaaaaggcgaaatgggtattcccggagcgtccggacctattggtcctgggggtcctccaggactccccggaccagcaggcccgaaaggtgccaaaggggcaacgggccccggcggccctaagggggagaaaggggtacagggcccgcccgggcaccccggaccgcccggggaggtgattcagccactgccgattcagatgcctaagaaaactcgccggagtgtggacggctctagattgatgcaggaagacgaggccatccctaccggcggcgcaccaggaagccccggcggactggaagaaatcttcggaagtcttgacagtttgagggaggagatcgagcagatgcggcgccctacagggacacaggattcaccggctcggacgtgccaggatctgaagctttgccaccccgaattgccagatggagagtactgggtcgacccaaaccagggatgcgctagagatgcatttagagttttctgtaactttacagccggcggtgagacatgtgtcaccccccgtgacgacgtaactcagttttcttacgttgactccgaagggtccccagtaggtgtggttcagctcacctttctgcgcctcctgtccgtttccgcacatcaagatgtaagctatccttgttcaggtgccgcgcgtgatggaccccttcgtctcagaggagctaacgaggatgagctgtcacccgagacaagcccctacgtgaaggaatttcgggatggttgtcaaactcagcagggcaggactgtgttggaggtccgcacacccgtcctggaacagttacccgtgcttgatgcatcattcagtgatctaggcgctccgccccgacggggcggcgtgctgttgggccccgtctgtttcatgggatag

SEQ ID NO: 232424 - DNA, 4890 bp, Artificial Sequence
  derived and/or modified sequence
atggaacggtgtagcagatgccatcggttattgcttcttttgccattggtcctcgggctgagcgcagcacccggctgggccggtgcccctcccgtggatgtcctcagagcgctccgatttccctccctgcctgatggcgtgcgcagagccaagggaatttgccctgccgacgtcgcctatcgcgtggcgagaccagcccagttgtctgccccaacccgccagctctttccaggggggttcccaaaggatttctctctcctgactgtcgttagaacccggcccgggctgcaggcccccctgctgacactctacagcgcccagggagttaggcagctcggcctagaactcggacgtcccgtccgattcttgtacgaggaccagacgggacggccacagccaccgtcccaaccagtgtttagaggcctcagcttggccgatgggaagtggcaccgggtcgctgtagccgtgaaagggcagtccgtcacactgatcgtggattgtaagaagcgcgtaacaagacctctccctagaagcgcaagaccggtcctggatacgcacggagttatcatcttcggggccaggatactcgacgaggaagtctttgagggggacgtgcaggagctggccatagtccctggggtgcaggccgcctatgagtcttgtgaacaaaaggagctggagtgcgaaggcggccagcgcgagcgtcctcagaatcagcaaccccaccgcgctcaaaggagccctcagcagcagcccagcaggctccatcggcctcaaaaccaggagccccaaagccaagcagcccacggccctagaggtctcaaaggagagaaaggtgagcctgcggtactggagcccggtatgctggtggaaggaccacctggaccagaaggtccagccggactgattggcccacctgggatccaaggcaaccccggtcctgtaggcgatcctggagagcgtgggccaccgggtcgcgcagggcttccagggtccgacggcgccccaggtcctcctggcactagtctcatgctgccttttcggttcggcagcgggggcggggacaaaggcccagttgtggccgcccaggaggcacaagcccaggccatactgcagcaagctcggcttgcgctgcgggggcccccgggacccatgggctatactggtcgtcccggcccgctgggacagcccggtagtcctggactgaagggcgagtccggagacctgggaccacagggaccaagggggccacaggggctgacggggccacctgggaaagcgggacggcgaggcagggctggcgctgatggagccaggggtatgccaggcgacccaggggtgaagggtgacaggggcttcgatgggctgccaggactgcccggagaaaaaggtcataggggcgacacaggcgctcaagggctccccggtccgcctggtgaagacggcgagcggggcgatgatggtgaaatcgggcctcgtggacttcccggggaaagtggcccacgtgggttactgggtcccaagggcccccctggaatccccgggcctcctggcgtgcgtgggatggatggaccacagggcccaaagggcagtctcgggccacagggcgagcctgggccgcctggccagcaaggcacacccggcacccagggcctccctggaccgcaaggcgccataggaccccatggggagaaaggtccccaaggtaaaccgggacttccgggcatgccaggaagcgatggcccgcctggacacccaggcaaagaaggacctcctgggaccaagggcaaccaaggcccatccggtccccagggccctctcggataccccgggccaaggggtgtgaaaggtgttgatggaatcagagggctgaagggacataaaggagagaagggggaggatggatttcccggatttaagggggacatcggagtcaagggggatcgcggcgaagttggggtacccgggagcagaggtgaggatggacctgaggggcccaagggcagaactgggcctactggggatccaggcccacctgggctgatgggtgagaagggaaagctcggtgtgcctggcttacctgggtaccccggtcgccagggacccaaggggagtctggggtttccaggcttccccggcgcctcgggggaaaaaggggctagagggctatctgggaagagtgggccccgaggggagcgcggacctacaggccctcggggacagcgaggaccccgcggagccacgggcaagtctggcgcgaagggaacctctggcggcgacgggccacatggcccccctggagagcggggactccccggtccccaagggccaaacggatttccaggcccaaagggaccattaggtcctcctgggaaagacggtctacctggacaccccggacagaggggcgaggtgggatttcaagggaaaaccggaccaccggggccacccggcgtggtggggcctcagggggctgctggagagaccgggccaatgggggaacggggtcaccctggccctcccggccctcctggtgaacagggcctgcccggtacggccggtaaagagggtaccaagggtgatcctggccctccaggagccccaggcaaggatggaccggccggtttgcgcggtttcccaggagaacgcgggctgccggggaccgccggtgggcccgggctcaaaggcaatgagggtccatcgggccccccgggaccagcaggctccccaggagaacggggcgctgcagggagcggcggtcctattggcccgccagggagacctggacctcaaggaccccccggtgccgctggggaaaagggtgtccctggcgagaaggggcccattggaccaactgggcgcgacggggtgcagggaccagtggggcttccaggacctgctgggccacctggagtggcaggagaagacggagataagggggaagtgggggacccagggcagaaagggactaagggcaacaagggagagcacgggcctcccggaccacctggccccatcggcccagtgggtcagcctggtgccgctggagcagatggggagcctggagcaaggggtccccagggtcattttggcgctaaaggcgacgaaggcacaagaggcttcaacggacccccaggaccaataggtcttcagggcctccccgggccttccggggagaagggcgaaactggggacgtggggccaatgggcccccccggcccaccaggaccgagaggtcccgcaggaccaaacggggctgacggaccacaggggccgcccgggggggtaggtaatctgggaccccccggagaaaaaggtgaacctggggagtccgggtcccccggaatccagggtgagccaggtgtgaaaggcccacggggcgaacgtggtgagaagggagagtccggacagccaggggagcctggtcctccggggcccaagggtcccaccggtgacgacgggccgaagggaaatccgggaccagtcggattcccaggagaccccggaccgccgggggaaggaggtcctcggggccaggatggagcgaagggggatcggggtgaggatggtgaaccgggtcagcccggcagcccaggaccaacaggagagaatggccctcccggaccactcggcaaaaggggccccgccgggtcgcctggctcagagggacggcagggcggaaaaggggcgaagggagatccgggggccatcggggcaccaggaaagactggccccgtgggacctgctggaccagcgggaaagcctggacccgatggactcagaggtctgccgggttcagtcggtcagcaggggagacccggagctacaggtcaagcgggtccaccaggtcccgtgggaccccctgggctgccggggctgcgcggggacgcgggggctaagggtgagaaaggacaccccggattaatcggcctgattggcccacccggggaacagggtgaaaagggggatcgcggattgcccggtccacagggtagcccaggccaaaaaggagagatgggcatacctggcgccagcggcccaattggccccggggggccacctggattgccagggcccgcggggccgaagggcgctaaaggagctacaggccccggcgggcctaagggcgaaaaaggagtgcagggcccccctgggcaccctggccctccaggagaagttattcagcccctgcccattcagatgccaaagaaaactagacgtagcgtagacggaagcagactcatgcaagaggacgaagcaatcccaacaggcggtgcccctggctcccccggcggcctagaagagatattcggttctttagactccctgcgcgaagagattgagcaaatgcgcaggccaactggcacgcaggactcccccgcacgcacatgtcaggatctcaaactatgccacccagaattgccagatggcgagtattgggtggaccccaaccagggatgcgcccgcgatgccttccgtgtcttttgtaacttcaccgctggaggagaaacttgcgtgacccctagggatgatgtgactcagttttcttacgtagattccgaaggttcacccgtcggtgtggtccagctgaccttcttgagattgctttccgtgagtgcacaccaggacgtgagttacccctgcagcggggctgccagggacggcccactgcgattgcgcggcgcaaatgaggatgagctgtcccccgaaacctcaccatatgtaaaggaatttagggacggttgccagacccagcaaggccgcaccgtgcttgaggtgcgcacacccgtccttgaacagctgccggttctcgacgcaagttttagcgacttgggggccccacccagaaggggcggggtcttgctcggccctgtctgcttcatggggtag

SEQ ID NO: 232425 - DNA, 4890 bp, Artificial Sequence
  derived and/or modified sequence
atggagcggtgctcacgatgccatcggctgctcttactgctgccactggtactgggcctgtcagccgccccgggctgggctggggcgccaccggttgatgtgctcagagccctgcgcttcccctcactgccagatggggtgaggagggctaaaggcatctgtcctgcagacgttgcttacagggtcgcccggcccgctcagctgtctgctcctacaaggcaacttttccctgggggcttcccaaaggatttttctctgctgacagtggtgcgcactcgacccgggctccaggccccactgctgaccctgtattccgcccagggggtgcggcagctggggctcgaacttggaccacccgtgagattcctctacgaggatcagaccgggaggccccagcccccgtcccagccggtgttccgcgggctgagcctggcagatgggaagtggcatcgggtggccgtggccgtgaaggggcagtctgttacactcattgtggactgtaaaaaacgtgtcacccgacctctcccccgtagtgctcgccccgtcctggatacacacggtgtaataatctttggcgcccggatcctcgacgaagaggtgtttgagggcgacgttcaggagcttgccatcgtgccgggggtccaggctgcctacgaaagttgtgagcagaaggagctggagtgtgagggcggccaacgagagaggccgcagaatcagcagccccatagagcgcagaggagcccacagcagcagccgagcagactacacagacctcagaatcaggagcctcagagtcaggccgcacatggtccccggggcctgaaaggtgaaaaaggagaacccgctgtcctcgagcctggcatgttggttgaaggcccacccgggcctgagggccctgccgggcttattggaccccccggcattcagggcaatccaggacccgtaggggaccccggagagcgcggtccaccaggccgtgctggtctgcccggaagtgacggcgcacccgggcctccgggaactagtctgatgctccccttcaggttcggttctggaggcggggacaagggaccagtcgttgcagcgcaggaagcccaggctcaggctattctccagcaagctcgcctggccctgcgcgggccgcccggccctatgggctacaccggaagacctggcccactgggacagcctggctccccaggcctgaaaggtgaatccggtgatctcggcccacagggcccgaggggcccccagggcctgaccggccctccaggcaaagcaggtaggcggggaagggctggcgccgatggcgctcgcggcatgcctggagaccccggagttaagggcgatcgcggttttgacggtctgcctggcttgcctggcgagaagggacatcggggggacacaggcgcccagggcctcccaggaccacctggagaagatggcgagagaggggatgatggcgagatcggaccccgcggactgccaggcgaatccggaccacgggggctgctgggccccaaaggcccgccggggatcccaggaccccccggagttagaggaatggacgggcctcaaggaccaaaaggatcgctgggccctcagggggagccgggtccaccgggccaacagggtacccccggcacgcagggactacctggtccacaaggagccatcgggcctcacggagaaaagggaccacaggggaagcccgggctgcctggcatgccaggatccgacggcccccctggacaccctggcaaagaagggcctcctgggacgaagggtaatcagggcccctcaggtccgcagggcccactcggatatccaggtcctagaggggtgaagggagtggacggaatccggggactgaagggccataagggcgaaaaaggggaggatggctttccggggttcaaaggagatataggcgtcaaaggcgatcgcggtgaggttggcgtccctgggtcaaggggcgaggatggccctgaggggccaaagggcagaacgggtcccacaggcgatcctggccccccgggactgatgggcgaaaaaggcaaactaggtgtgcccggcctgccagggtacccagggcggcagggccccaagggatcccttggcttcccaggattccctggggccagcggagagaagggagctagaggcttaagtgggaaatccggtcctagaggtgaaagaggtcccacaggaccacgcggacaaagaggcccacggggcgccacaggaaagtccggtgcaaaaggcacaagtggtggcgacggaccgcatggcccgccaggcgaacgcggactgcctggccctcagggacctaacggattccctgggcctaagggccccccaggaccgccggggaaggatgggctccctggccaccctgggcagcggggagaggtgggcttccagggaaagacgggacctcctggcccacccggggttgtgggccctcagggagctgccggggaaaccggaccaatgggagaacggggacaccccggtccgccaggccctcccggtgagcagggcttgccgggcactgcagggaaagaaggaacgaaaggcgatcctggacccccaggcgcccctggaaaagacggtccagccggactgcgaggctttcccggagagaggggactgcccgggaccgctggcggcccaggtctcaagggcaacgaaggcccgtctggcccgccggggccggcgggttcacctggtgagcgaggggccgcaggaagtggggggcccataggaccaccaggccgccccggcccccagggcccgcccggagccgccggcgagaagggggtccccggggaaaaaggccctatagggccaactgggcgagatggggtgcagggtcctgtgggcctaccaggccccgctgggccccctggggtcgctggggaggatggtgacaaaggtgaggtgggcgaccccggacaaaagggtacgaagggtaacaagggcgaacatggacccccgggtcctcctggcccaattgggccggtgggccagcctggggccgctggagccgacggggagcctggtgcgcgtgggccacagggacatttcggtgccaagggggacgagggaactcgcggctttaatgggccaccaggaccaataggcctgcaggggcttcccggcccgtccggcgaaaagggggaaaccggtgacgttggcccgatgggacctccaggccctccagggccacgaggccctgcagggccgaatggtgccgacggcccgcaggggcccccggggggcgtgggaaacctggggccacctggagagaagggcgagcctggcgagtctggctccccggggatccaaggtgagcctggggtgaagggtccccggggcgagcggggcgagaaaggggagtccggccaaccaggtgaaccaggacctcctggacctaagggacccactggagatgacggccctaaaggtaatccggggccagtcggctttccaggagatcccggcccccccggtgagggaggtcctaggggccaggacggggcaaagggagatagaggcgaagatggcgagccaggccagcctgggtcccccggccccactggagaaaatggaccaccaggacccctgggcaaacgaggcccggcagggagtcccggtagcgagggcaggcaaggtggtaaaggtgcaaaaggagaccctggcgcaatcggagcccctggcaagacaggccccgttggaccagccggacctgctgggaaacccggacccgatggcctacgaggtctcccgggatcagtcggccagcaaggtcgtcctggcgcaacaggtcaagccgggccccccggaccagttggacctcctgggctgccaggtctgcgcggggacgccggagccaagggcgagaaaggacacccggggctgattgggttgatcggaccacctggggaacagggcgagaaaggggatcggggtctgcccgggccccaggggtctccgggccagaagggtgagatgggcatacctggcgcatcaggtcctattggtcctggcggccctcccggcctgcctggcccagctggaccaaaaggagccaagggagcaactggacctggaggtccaaagggagaaaagggcgtgcaaggaccccccggccatccaggtcctcctggggaagttatacagcccctgccaatccagatgccaaagaaaactcgacggagtgtggacggaagcagattgatgcaagaagacgaggccatcccaactgggggagccccgggcagtccggggggtctggaggagatcttcgggtccttagattcgctgagggaggaaattgaacagatgcggaggccgaccggaacccaggatagcccagcccgcacctgccaggacttaaaattgtgtcacccagagctccctgacggtgagtactgggtcgaccccaatcagggatgcgcaagagacgcattcagagtcttttgtaatttcactgccggcggtgaaacttgtgtaaccccccgtgatgacgtgacccagtttagctacgtagattccgagggcagccccgtcggagttgtgcaacttaccttcttgagactgctaagtgtctcggcacaccaagacgtgagctacccttgctctggtgctgcccgtgacgggcctcttcgtctgcgcggcgcaaatgaggacgagttgtcaccagagactagcccctatgtgaaagagttcagagacggctgccaaacacagcaggggaggacagtcttagaggtccggacgccggtgcttgaacaactgcccgtgctcgacgcgtccttttctgatctgggggcaccgccgcgtaggggcggcgtacttctcggccccgtttgcttcatgggttag

SEQ ID NO: 232426 - DNA, 4890 bp, Artificial Sequence
  derived and/or modified sequence
atggagcgatgctcccgctgtcaccgtctgctgctcctcctgccacttgtgcttggactgagcgccgcccctgggtgggcaggcgcccccccagtggacgtgctcagggctcttagatttcccagtctcccagacggagttagaagggctaagggcatttgccccgctgacgtagcgtaccgtgtagccagaccagcacagctcagcgcccctactcgtcagctgttcccgggcgggttccccaaagacttttccctcttaactgtggtgcgaaccaggcccgggctccaggcccctcttctgaccctgtactcggcgcaaggggtcaggcagctgggactggagctgggacggccggtgaggttcctgtatgaggatcagaccggcaggccccagcccccctctcagcctgtgttccggggcctatctcttgcggatgggaagtggcaccgcgtcgccgttgcggtcaagggtcaatctgtgaccctcatagttgactgtaaaaagagagtaaccagaccactcccacgttccgcccgcccggttcttgacacgcatggagtcattatatttggcgcccgcatcctggacgaggaggtcttcgagggggacgtgcaagagctggctatcgttcccggggtgcaggccgcttatgagtcatgtgagcaaaaggaattagaatgtgaaggcggtcagagggaacggccccaaaaccagcagccccaccgggcgcaacgctccccacagcaacagccatcccggttacaccgcccgcagaatcaggagcctcagagccaggccgctcatggcccgaggggcttaaaaggcgaaaagggcgagcccgctgttctagaacctgggatgctggtggagggtccacctggccccgagggtcccgcgggactgataggccctcccgggatccagggcaatcccggcccggtcggagaccctggagagcggggaccccccggtagagctggcctgccaggatcagacggggcaccaggcccaccaggcacaagtctgatgctgccctttaggttcggtagcggcggaggagataaagggcctgtcgttgcagctcaggaggcacaggctcaggccattcttcagcaggcgcgcttggccctgaggggaccccctggcccaatggggtatactgggcgcccaggtccgctcggtcagcctgggtcccctggcctgaagggggaaagtggggacctgggtccacagggaccacgcggacctcaggggctgaccggcccgcccggaaaagccggtcggaggggaagagctggtgcggacggagcccgcgggatgccaggagacccaggggtgaagggggataggggtttcgatggcctgcccggactaccaggggagaaggggcaccgaggggacacaggcgcacagggccttcccggacccccaggtgaggatggcgagcgcggcgacgacggtgaaatcggcccacgtggactgcccggggagagtggcccccgtgggctcctcgggcccaagggccctcccggaatccccggccccccaggagtgcgaggtatggacggcccccaggggcccaaaggaagcctgggcccgcagggagaaccggggccccccggccaacagggaactcctgggactcagggactcccaggcccccagggcgccatcggccctcatggagaaaaaggcccacaggggaagccggggttacccgggatgccaggatcagatggacccccgggccacccgggtaaggaggggccgcccggaactaagggaaatcagggacccagcggacctcagggacccctgggctatccgggccctcggggggttaaaggtgtagacggtattaggggactgaagggacacaagggcgaaaagggcgaagacggtttccctggtttcaaaggggatatcggagtaaagggggacaggggggaagtcggagttccaggtagccggggagaggacggccctgagggtcctaaaggtaggacaggaccgactggggacccaggcccaccaggacttatgggggagaagggaaagctcggggtgccaggcctacccgggtacccgggtaggcagggtcctaaggggtctctcggcttcccaggtttcccgggggcctccggcgagaagggtgcaaggggtctgtccgggaagtccggccccagaggcgaacgggggccaactggccctcgcgggcagaggggacctcgaggtgccaccggcaagtccggagcaaagggtacctccggaggagatggtccacacggaccccctggagagagaggcctgcctggtcctcaaggccctaacggcttccccgggcctaagggtcccccgggccccccgggaaaagacggtcttccaggccatccgggtcaaagaggggaagtggggttccagggcaagacgggacctccaggacccccaggagtcgtgggaccccaaggggccgccggagagaccgggcccatgggcgagaggggtcatccagggcccccaggaccaccgggggagcagggcctccccggtaccgccggaaaggaaggaaccaagggcgaccctggcccaccgggcgctcctgggaaggatggaccagccggcctccgaggatttcccggcgagcggggacttccaggtactgccggaggtcctggcctaaaaggtaacgaaggacccagcggccctccaggcccagctggcagcccaggagaacgaggggccgccggatcaggagggcccatcggcccaccaggaagaccaggaccgcaaggcccccctggtgcagccggtgagaagggggtgccgggagaaaagggcccgatagggcccacaggacgcgatggtgtacaggggcctgtgggcctgcccggccctgcaggtccacctggtgttgccggagaagacggagataagggtgaagtgggcgatccgggtcagaagggcacaaagggaaataagggggaacacggcccaccgggtcctcccggcccaatcggccccgtcggccaaccgggagccgcgggagctgatggggagccaggagcccgagggccccagggccactttggtgcaaaaggtgacgaggggaccagggggtttaatggacctcctgggcctataggactacagggcctccccggaccatcaggggagaagggcgaaaccggggacgtcggacccatggggcctcccggacccccggggccccgtgggcccgccggaccaaatggcgcagatgggccccagggaccacccggaggcgttgggaacttggggccgcctggcgagaaaggcgagcctggagaatcaggctcccccggcattcagggcgagcccggcgtcaagggacctaggggggaacgaggcgagaagggggagtctggccagccaggcgagcccgggccgcctggtccaaagggtccaaccggtgacgatggccccaagggaaatcccggtcctgtggggttccccggtgatccaggcccgcccggcgaggggggacctagaggccaagatggagctaagggcgacagaggggaggacggtgagcctgggcagccgggatcccctggccccaccggggaaaatggtcccccgggtccccttggaaagaggggtccagccggctcccctggatctgaagggaggcagggcggcaaaggagccaagggagacccgggcgctattggcgcccccggtaagaccggacctgttggaccagcagggccagccggaaaacccggtccagatggactgcgtgggttacctgggagtgtggggcagcaaggccggcctggggccaccgggcaagcagggccacctggtcccgtcggcccaccagggcttcctggcttgaggggcgatgccggcgccaagggagagaagggacaccctgggttaattgggttgatcggtcctcccggcgagcagggggagaaaggtgacaggggcctcccaggcccacaggggtccccagggcagaaaggagagatggggataccaggagcttcgggccctattgggcccggcggaccaccaggtctgccagggccagccggacctaaaggtgctaaaggtgccaccggccctggcggccccaaaggtgaaaaaggggtgcagggaccacccgggcaccccgggcctccaggagaggtgattcaaccattgccgatacaaatgcccaagaagacacgcaggagcgtggacggctccaggctaatgcaggaggatgaagccatacctaccgggggagcgcccggtagtccgggcgggctggaggagatttttgggagtttggactcgctccgggaggagattgaacagatgcggagaccaacgggcacacaggattcccctgctcgtacatgtcaagacctgaaactttgccatccggagttacccgacggcgaatattgggtggacccgaaccaaggatgcgcccgagatgcctttcgagtcttctgtaactttacggccggtggcgagacttgcgtgacaccccgggacgatgtcacacagttttcctacgtggatagtgagggtagccccgtcggagtagttcagcttacattcctacggcttttgtctgtgtccgcccaccaggacgtgtcatacccgtgttccggggccgcccgcgacggccccctacggctccggggggcaaatgaagatgagctttcacctgagacgagcccgtacgtcaaggagtttcgggatggttgtcagacacagcagggaaggactgtgcttgaggtgcgcactccagtgctggagcaactacccgtgcttgatgcgtccttcagtgacctgggcgcgccaccacgacgtgggggggtgctattgggaccagtatgtttcatgggatag

SEQ ID NO: 232427 - DNA, 4890 bp, Artificial Sequence
  derived and/or modified sequence
atggagcgctgcagccgctgccaccggctgctgctgctgctgcccctggtgctgggcctgtctgctgcccctggctgggccggggcccctcctgtggatgtgctgcgggccctgcgcttccccagcctgcctgatggagtgcggcgggccaagggcatctgcccagcagatgtggcctacagagtggcccggcctgcccagctgagcgcccccacccggcagctgtttcctgggggcttccccaaggacttcagcctgctgactgtggtgaggacccggcccggcctgcaggcccccctgctgaccctgtacagcgcccagggcgtgcggcagctgggcctggagctgggccggcctgtgcgcttcctgtatgaggaccagacaggccggccccagccccccagccagcctgtgttccggggcctgagcctggctgatggcaagtggcaccgggtggccgtggccgtgaagggccagagcgtgaccctcatcgtggactgcaagaagagggtgacccggcccctgcccaggtctgcccggcctgtgctggacacccacggcgtcatcatctttggagcccgcatcctggatgaggaggtgtttgaaggagatgtgcaggagctggccatcgtgcctggggtgcaggccgcctatgagagctgtgagcagaaggagctggagtgtgagggcggccagcgggagcggccccagaaccagcagccccaccgggcccagaggagcccccagcagcagcccagccggctgcaccggccccagaaccaggagccccagagccaggccgcccacggcccccggggcctgaagggggagaagggggagcctgctgtgctggagcccggcatgctggtggagggccccccaggccctgagggccctgctggcctgattggccccccaggcatccagggcaaccctggccctgtgggggaccccggggagcggggccccccaggccgggccggcctgcccggcagtgatggagcccctggccccccaggcaccagcctgatgctgcccttccgctttggaagtggcggcggggacaagggccctgtggtggccgcccaggaggcccaggcccaggccatcctgcagcaggcccggctggccctgcggggccccccaggccccatgggctacacaggccggcccggccccctgggccagcccggcagccctggcctgaagggggagagcggggacctgggcccccagggcccccggggcccccagggcctgactggacctcctgggaaggccggcagaagaggccgggccggggctgatggagcccggggcatgcctggggaccccggggtgaagggggaccggggctttgatggcctgcccggcctgcccggggagaagggccacagaggagacacaggagcccagggcctgcccggccccccaggagaagatggagagagaggagatgatggagagatcggcccccggggcctgcccggggagagcggcccccggggcctgctgggccccaagggccccccaggcatccctggccccccaggagtgcggggcatggatggcccccagggccccaagggcagcctgggcccccagggcgagcccggccccccaggccagcagggcaccccaggcacccagggcctgcccggcccccagggcgccatcggcccccacggggagaagggcccccagggcaagccaggcctgcccggcatgcctggcagtgatggccccccaggccaccctgggaaggagggccccccaggcaccaagggcaaccagggccccagcggcccccagggccccctgggctacccaggcccccggggcgtgaagggcgtggatggcatccggggcctgaagggccacaagggggagaagggagaagatggcttccctggcttcaagggggacattggagtgaagggggacagaggagaggtgggcgtgcccggcagcagaggagaagatggccctgagggccccaagggccgcacaggccccactggagaccccggccccccaggcctgatgggagagaagggcaagctgggcgtgcccggcctgcccggctacccaggccggcagggccccaagggcagcctgggcttccctggcttccctggggccagcggggagaagggggcccggggcctgagcggcaagagcggccccagaggagagcggggccccaccggcccccggggccagaggggccccaggggggccaccgggaagagcggggccaagggcaccagcggaggagatggcccccacggccccccaggagagcggggcctgcccggcccccagggccccaacggcttccctggccccaagggccccccaggccccccaggcaaggatggcctgcccggccaccctggccagagaggagaggtgggcttccagggcaagacaggccccccaggccccccaggagtggtgggcccccagggcgccgccggggagaccggccccatgggagagcggggccaccctggccccccaggccccccaggagagcagggcctgcccggcacagctgggaaggagggcaccaagggggaccccggccccccaggggcccctgggaaggatggccctgctggcctgcggggcttccctggagagcggggcctgcccggcacagctgggggccctggcctgaagggaaatgaaggccccagcggccccccaggccctgctggcagccctggagagagaggagctgctggcagcggcggccccatcggccccccaggccggcccggcccccagggccccccaggagctgctggggagaagggcgtgcctggagagaagggccccatcggccccaccggcagagatggagtgcagggccctgtgggcctgcccggccctgctggccccccaggagtggccggagaagatggagacaagggggaggtgggggaccccggccagaagggcaccaagggcaacaagggggagcacggccccccaggccccccaggccccatcggccctgtgggccagcccggggctgctggagcagatggagagcccggggcccggggcccccagggccactttggagccaagggagatgagggcacccggggcttcaacggccccccaggccccatcggcctgcagggcctgcccggccccagcggggagaagggggagactggagatgtgggccccatgggccccccaggccccccaggcccccggggccctgctggccccaacggggctgatggcccccagggccccccaggaggagtgggcaacctgggccccccaggagagaagggggagcccggggagagcggcagccctggcatccagggcgagcccggggtgaagggccccagaggagagcggggggagaagggggagagcggccagcccggggagcccggccccccaggccccaagggccccactggagatgatggccccaagggcaaccctggccctgtgggcttccctggggaccccggccccccaggagagggcggcccccggggccaggatggagccaagggggacagaggagaagatggagagcccggccagcccggcagccctggccccactggagaaaatggccccccaggccccctgggcaagaggggccctgctggcagccctggcagcgagggccggcagggcggcaagggggccaagggggaccccggggccatcggggcccctgggaagacaggccctgtgggccctgctggccctgctgggaagccaggcccagatggcctgcggggcctgcccggctctgtgggccagcagggccggcctggggccaccggccaggccggccccccaggccctgtgggccccccaggcctgcccggcctgcggggagatgctggggccaagggggagaagggccaccctggcctgattggcctcatcggccccccaggagagcagggcgagaagggggaccggggcctgcccggcccccagggcagccctggccagaagggggagatgggcatccctggggccagcggccccatcggccctgggggccccccaggcctgcccggccctgctggccccaagggggccaagggggccactggacctgggggccccaagggggagaagggcgtgcagggccccccaggccaccctggccccccaggagaggtgatccagcccctgcccatccagatgcccaagaagacccggcgctctgtggatggcagccggctgatgcaggaggatgaggccatccccactggaggagcccctggcagccctgggggcctggaggagatcttcggcagcctggacagcctgcgggaggagattgagcagatgagaagacccaccggcacccaggacagccctgcccggacctgccaggacctgaagctgtgccaccctgagctgcctgatggagagtactgggtggaccccaaccagggctgtgccagagatgccttccgggtcttctgcaacttcaccgctggaggagagacctgtgtgaccccaagagatgatgtgacccagttctcctatgtggacagcgagggcagccctgtgggcgtggtgcagctgaccttcctgcggctgctgtctgtgtctgcccaccaggatgtgtcctacccctgcagcggggccgccagagatggccccctgcggctgcggggggccaatgaagatgagctgagccctgagaccagcccctacgtgaaggagttcagagatggctgccagacccagcagggccgcacagtgctggaggtgaggacccctgtgctggagcagctgcctgtgctggatgccagcttcagtgacctgggcgccccaccccggcggggcggcgtgctgctgggccctgtgtgcttcatgggctag

SEQ ID NO: 232428 - DNA, 4809 bp, Artificial Sequence
  derived and/or modified sequence
ggggcccctcctgtggatgtgctgcgggccctgcgcttccccagcctgcctgatggagtgagaagagccaagggcatctgcccagcagatgtggcctacagagtggcccggcctgcccagctgagcgcccccacccggcagctgtttcctgggggcttccccaaggacttcagcctgctgactgtggtgaggaccaggcctggcctgcaggcccccctgctgaccctgtacagcgcccagggcgtgcggcagctgggcctggagctgggccggcctgtgcgcttcctgtatgaggaccagacaggccggccccagccccccagccagcccgtcttccggggcctgagcctggctgatggcaagtggcaccgggtggccgtggccgtgaagggccagagcgtgaccctgattgtggactgcaagaagagggtgacccggcccctgcccaggtctgcccggcctgtgctggacacccatggagtcatcatctttggagcccgcatcctggatgaggaggtgtttgaaggagatgtgcaggagctggccatcgtgcctggggtgcaggccgcctatgagagctgtgagcagaaggagctggagtgtgagggcggccagcgggagcggccccagaaccagcagccccaccgggcccagaggagcccccagcagcagcccagccggctgcaccggccccagaaccaggagccccagagccaggccgcccacggcccccggggcctgaagggggagaagggggagcctgctgtgctggagcccggcatgctggtggagggccccccaggccctgagggccctgctggcctcatcggccccccaggcatccagggcaaccctggccctgtgggggaccctggagagcggggccccccaggccgggccggcctgcccggcagtgatggagcccctggccccccaggcaccagcctgatgctgcccttccgcttcggcagcggcggcggggacaagggccctgtggtggccgcccaggaggcccaggcccaggccatcctgcagcaggcccggctggccctgcggggccccccaggccccatgggctacacaggccggcccggccccctgggccagcccggcagccctggcctgaagggggagagcggggacctgggcccccagggcccccggggcccccagggcctgaccggccccccaggcaaggccggccggcggggccgggccggggctgatggagcccggggcatgcctggggaccccggggtgaagggggaccggggctttgatggcctgcccggcctgcctggagagaagggccacagaggagacaccggggcccagggcctgcccggccccccaggagaagatggagagagaggagatgatggagaaattggcccccggggcctgcctggagagagcggcccccggggcctgctgggccccaagggccccccaggcatccctggccccccaggagtgcggggcatggatggcccccagggccccaagggcagcctgggcccccagggcgagcccggccccccaggccagcagggcaccccaggcacccagggcctgcccggcccccagggcgccatcggcccccatggagagaagggcccccagggcaagccaggcctgcccggcatgcctggcagtgatggccccccaggccaccctgggaaggagggccccccaggcaccaagggcaaccagggccccagcggcccccagggccccctgggctacccaggcccccggggcgtgaagggcgtggatggcatccggggcctgaagggccacaagggggagaagggggaggatggcttccctggcttcaagggggacatcggcgtgaagggggacagaggagaggtgggcgtgcccggcagcagaggagaagatggccctgagggccccaagggccgcacaggccccaccggggaccccggccccccaggcctgatgggagagaagggcaagctgggcgtgcccggcctgcccggctacccaggccggcagggccccaagggcagcctgggcttccctggcttccctggggccagcggggagaagggggcccggggcctgagcggcaagagcggccccagaggagagcggggccccaccggcccccggggccagaggggccccaggggggccaccgggaagagcggggccaagggcaccagcggaggagatggcccccacggccccccaggagagcggggcctgcccggcccccagggccccaacggcttccctggccccaagggccccccaggccccccaggcaaggatggcctgcccggccaccctggccagagaggagaggtgggcttccagggcaagacaggccccccaggccccccaggagtggtgggcccccagggcgctgctggggagaccggccccatgggagagcggggccaccctggccccccaggccccccaggagagcagggcctgcctggaacagctgggaaggagggcaccaagggggaccccggccccccaggggcccctgggaaggatggccctgctggcctgcggggcttccctggagagcggggcctgcctggaacagctgggggccctggcctgaagggaaatgaaggccccagcggccccccaggccctgctggcagccctggagagagaggagctgctggcagcggcggccccatcggccccccaggccggcccggcccccagggccccccaggagctgctggggagaagggcgtgcctggagagaagggccccatcggccccaccggcagagatggagtgcagggccctgtgggcctgcccggccctgctggccccccaggagtggccggggaggatggagacaagggggaggtgggggaccccggccagaagggcaccaagggcaacaagggggagcacggccccccaggccccccaggccccatcggccctgtgggccagcctggagctgctggagcagatggagagcccggggcccggggcccccagggccactttggagccaagggagatgagggcacccggggcttcaatggacctcctggccccatcggcctgcagggcctgcccggccccagcggggagaagggggagactggagatgtgggccccatgggccccccaggccccccaggcccccggggccctgctggccccaatggagcagatggcccccagggccccccaggcggcgtgggcaacctgggccccccaggagagaagggggagcctggagagagcggcagccctggcatccagggcgagcccggggtgaagggccccagaggagagcggggggagaagggggagagcggccagcctggagagcccggccccccaggccccaagggccccactggagatgatggccccaagggcaaccctggccctgtgggcttccctggggaccccggccccccaggagagggcggcccccggggccaggatggagccaagggggacagaggagaagatggagagcccggccagcccggcagccctggccccaccggggagaatggacctcctggccccctgggcaagaggggccctgctggcagccctggcagcgagggccggcagggcggcaaaggagccaagggggaccccggggccatcggggcccctgggaagacaggccctgtgggccctgctggccctgctgggaagccaggcccagatggcctgcggggcctgcccggctctgtgggccagcagggccggcctggggccaccggccaggccggccccccaggccctgtgggccccccaggcctgcccggcctgcggggagatgctggggccaagggggagaagggccaccctggcctcatcggcctgattggccccccaggagagcagggcgagaagggggaccggggcctgcccggcccccagggcagccctggccagaagggggagatgggcatccctggggccagcggccccatcggccctgggggccccccaggcctgcccggccctgctggccccaagggggccaagggggccaccggccctgggggccccaagggggagaagggcgtgcagggccccccaggccaccctggccccccaggagaggtgatccagcccctgcccatccagatgcccaagaagaccaggagatctgtggatggcagccggctgatgcaggaggatgaggccatccccaccggcggggcccctggcagccctgggggcctggaggagatcttcggcagcctggacagcctgcgggaggagattgagcagatgaggcggcccaccggcacccaggacagccctgcccggacctgccaggacctgaagctgtgccaccctgagctgcctgatggagagtactgggtggaccccaaccagggctgtgccagagatgccttccgggtcttctgcaacttcaccgctggaggagagacctgtgtgaccccaagagatgatgtgacccagttctcctatgtggacagcgagggcagccctgtgggcgtggtgcagctgaccttcctgcggctgctgtctgtgtctgcccaccaggatgtgtcctacccctgcagcggggccgccagagatggccccctgcggctgcggggggccaatgaagatgagctgagccctgagaccagcccctacgtgaaggagttcagagatggctgccagacccagcagggccgcacagtgctggaggtgaggacccctgtgctggagcagctgcctgtgctggatgccagcttcagtgacctgggcgcccccccaagaagaggaggagtgctgctgggccctgtgtgcttcatgggctag

SEQ ID NO: 232429 - DNA, 4890 bp, Artificial Sequence
  derived and/or modified sequence
atggagcgctgcagccgctgccaccggctgctgctgctgctgcccctggtgctgggcctgtctgctgcccctggctgggccggggcccctcctgtggatgtgctgcgggccctgcgcttccccagcctgcctgatggagtgcggcgggccaagggcatctgcccagcagatgtggcctacagagtggcccggcctgcccagctgagcgcccccacccggcagctgtttcctgggggcttccccaaggacttcagcctgctgactgtggtgaggacccggcccggcctgcaggcccccctgctgaccctgtacagcgcccagggcgtgcggcagctgggcctggagctgggccggcctgtgcgcttcctgtatgaggaccagacaggccggccccagccccccagccagcctgtgttccggggcctgagcctggctgatggcaagtggcaccgggtggccgtggccgtgaagggccagagcgtgaccctcatcgtggactgcaagaagagggtgacccggcccctgcccaggtctgcccggcctgtgctggacacccacggcgtcatcatctttggagcccgcatcctggatgaggaggtgtttgaaggagatgtgcaggagctggccatcgtgcctggggtgcaggccgcctatgagagctgtgagcagaaggagctggagtgtgagggcggccagcgggagcggccccagaaccagcagccccaccgggcccagaggagcccccagcagcagcccagccggctgcaccggccccagaaccaggagccccagagccaggccgcccacggcccccggggcctgaagggggagaagggggagcctgctgtgctggagcccggcatgctggtggagggccccccaggccctgagggccctgctggcctgattggccccccaggcatccagggcaaccctggccctgtgggggaccccggggagcggggccccccaggccgggccggcctgcccggcagtgatggagcccctggccccccaggcaccagcctgatgctgcccttccgctttggaagtggcggcggggacaagggccctgtggtggccgcccaggaggcccaggcccaggccatcctgcagcaggcccggctggccctgcggggccccccaggccccatgggctacacaggccggcccggccccctgggccagcccggcagccctggcctgaagggggagagcggggacctgggcccccagggcccccggggcccccagggcctgactggacctcctgggaaggccggcagaagaggccgggccggggctgatggagcccggggcatgcctggggaccccggggtgaagggggaccggggctttgatggcctgcccggcctgcccggggagaagggccacagaggagacacaggagcccagggcctgcccggccccccaggagaagatggagagagaggagatgatggagagatcggcccccggggcctgcccggggagagcggcccccggggcctgctgggccccaagggccccccaggcatccctggccccccaggagtgcggggcatggatggcccccagggccccaagggcagcctgggcccccagggcgagcccggccccccaggccagcagggcaccccaggcacccagggcctgcccggcccccagggcgccatcggcccccacggggagaagggcccccagggcaagccaggcctgcccggcatgcctggcagtgatggccccccaggccaccctgggaaggagggccccccaggcaccaagggcaaccagggccccagcggcccccagggccccctgggctacccaggcccccggggcgtgaagggcgtggatggcatccggggcctgaagggccacaagggggagaagggagaagatggcttccctggcttcaagggggacattggagtgaagggggacagaggagaggtgggcgtgcccggcagcagaggagaagatggccctgagggccccaagggccgcacaggccccactggagaccccggccccccaggcctgatgggagagaagggcaagctgggcgtgcccggcctgcccggctacccaggccggcagggccccaagggcagcctgggcttccctggcttccctggggccagcggggagaagggggcccggggcctgagcggcaagagcggccccagaggagagcggggccccaccggcccccggggccagaggggccccaggggggccaccgggaagagcggggccaagggcaccagcggaggagatggcccccacggccccccaggagagcggggcctgcccggcccccagggccccaacggcttccctggccccaagggccccctgggccccccaggcaaggatggcctgcccggccaccctggccagagaggagaggtgggcttccagggcaagacaggccccccaggccccccaggagtggtgggcccccagggcgccgccggggagaccggccccatgggagagcggggccaccctggccccccaggccccccaggagagcagggcctgcccggcacagctgggaaggagggcaccaagggggaccccggccccccaggggcccctgggaaggatggccctgctggcctgcggggcttccctggagagcggggcctgcccggcacagctgggggccctggcctgaagggaaatgaaggccccagcggccccccaggccctgctggcagccctggagagagaggagctgctggcagcggcggccccatcggccccccaggccggcccggcccccagggccccccaggagctgctggggagaagggcgtgcctggagagaagggccccatcggccccaccggcagagatggagtgcagggccctgtgggcctgcccggccctgctggccccccaggagtggccggagaagatggagacaagggggaggtgggggaccccggccagaagggcaccaagggcaacaagggggagcacggccccccaggccccccaggccccatcggccctgtgggccagcccggggctgctggagcagatggagagcccggggcccggggcccccagggccactttggagccaagggagatgagggcacccggggcttcaacggccccccaggccccatcggcctgcagggcctgcccggccccagcggggagaagggggagactggagatgtgggccccatgggccccccaggccccccaggcccccggggccctgctggccccaacggggctgatggcccccagggccccccaggaggagtgggcaacctgggccccccaggagagaagggggagcccggggagagcggcagccctggcatccagggcgagcccggggtgaagggccccagaggagagcggggggagaagggggagagcggccagcccggggagcccggccccccaggccccaagggccccactggagatgatggccccaagggcaaccctggccctgtgggcttccctggggaccccggccccccaggagagggcggcccccggggccaggatggagccaagggggacagaggagaagatggagagcccggccagcccggcagccctggccccactggagaaaatggccccccaggccccctgggcaagaggggccctgctggcagccctggcagcgagggccggcagggcggcaagggggccaagggggaccccggggccatcggggcccctgggaagacaggccctgtgggccctgctggccctgctgggaagccaggcccagatggcctgcggggcctgcccggctctgtgggccagcagggccggcctggggccaccggccaggccggccccccaggccctgtgggccccccaggcctgcccggcctgcggggagatgctggggccaagggggagaagggccaccctggcctgattggcctcatcggccccccaggagagcagggcgagaagggggaccggggcctgcccggcccccagggcagccctggccagaagggggagatgggcatccctggggccagcggccccatcggccctgggggccccccaggcctgcccggccctgctggccccaagggggccaagggggccactggacctgggggccccaagggggagaagggcgtgcagggccccccaggccaccctggccccccaggagaggtgatccagcccctgcccatccagatgcccaagaagacccggcgctctgtggatggcagccggctgatgcaggaggatgaggccatccccactggaggagcccctggcagccctgggggcctggaggagatcttcggcagcctggacagcctgcgggaggagattgagcagatgagaagacccaccggcacccaggacagccctgcccggacctgccaggacctgaagctgtgccaccctgagctgcctgatggagagtactgggtggaccccaaccagggctgtgccagagatgccttccgggtcttctgcaacttcaccgctggaggagagacctgtgtgaccccaagagatgatgtgacccagttctcctatgtggacagcgagggcagccctgtgggcgtggtgcagctgaccttcctgcggctgctgtctgtgtctgcccaccaggatgtgtcctacccctgcagcggggccgccagagatggccccctgcggctgcggggggccaatgaagatgagctgagccctgagaccagcccctacgtgaaggagttcagagatggctgccagacccagcagggccgcacagtgctggaggtgaggacccctgtgctggagcagctgcctgtgctggatgccagcttcagtgacctgggcgccccaccccggcggggcggcgtgctgctgggccctgtgtgcttcatgggctag

SEQ ID NO: 232430 - DNA, 4890 bp, Artificial Sequence
  derived and/or modified sequence
atggagcgctgcagccgctgccaccggctgctgctgctgctgcccctggtgctgggcctgtctgctgcccctggctgggccggggcccctcctgtggatgtgctgcgggccctgcgcttccccagcctgcctgatggagtgcggcgggccaagggcatctgcccagcagatgtggcctacagagtggcccggcctgcccagctgagcgcccccacccggcagctgtttcctgggggcttccccaaggacttcagcctgctgactgtggtgaggacccggcccggcctgcaggcccccctgctgaccctgtacagcgcccagggcgtgcggcagctgggcctggagctgggcccccctgtgcgcttcctgtatgaggaccagacaggccggccccagccccccagccagcctgtgttccggggcctgagcctggctgatggcaagtggcaccgggtggccgtggccgtgaagggccagagcgtgaccctcatcgtggactgcaagaagagggtgacccggcccctgcccaggtctgcccggcctgtgctggacacccacggcgtcatcatctttggagcccgcatcctggatgaggaggtgtttgaaggagatgtgcaggagctggccatcgtgcctggggtgcaggccgcctatgagagctgtgagcagaaggagctggagtgtgagggcggccagcgggagcggccccagaaccagcagccccaccgggcccagaggagcccccagcagcagcccagccggctgcaccggccccagaaccaggagccccagagccaggccgcccacggcccccggggcctgaagggggagaagggggagcctgctgtgctggagcccggcatgctggtggagggccccccaggccctgagggccctgctggcctgattggccccccaggcatccagggcaaccctggccctgtgggggaccccggggagcggggccccccaggccgggccggcctgcccggcagtgatggagcccctggccccccaggcaccagcctgatgctgcccttccgctttggaagtggcggcggggacaagggccctgtggtggccgcccaggaggcccaggcccaggccatcctgcagcaggcccggctggccctgcggggccccccaggccccatgggctacacaggccggcccggccccctgggccagcccggcagccctggcctgaagggggagagcggggacctgggcccccagggcccccggggcccccagggcctgactggacctcctgggaaggccggcagaagaggccgggccggggctgatggagcccggggcatgcctggggaccccggggtgaagggggaccggggctttgatggcctgcccggcctgcccggggagaagggccacagaggagacacaggagcccagggcctgcccggccccccaggagaagatggagagagaggagatgatggagagatcggcccccggggcctgcccggggagagcggcccccggggcctgctgggccccaagggccccccaggcatccctggccccccaggagtgcggggcatggatggcccccagggccccaagggcagcctgggcccccagggcgagcccggccccccaggccagcagggcaccccaggcacccagggcctgcccggcccccagggcgccatcggcccccacggggagaagggcccccagggcaagccaggcctgcccggcatgcctggcagtgatggccccccaggccaccctgggaaggagggccccccaggcaccaagggcaaccagggccccagcggcccccagggccccctgggctacccaggcccccggggcgtgaagggcgtggatggcatccggggcctgaagggccacaagggggagaagggagaagatggcttccctggcttcaagggggacattggagtgaagggggacagaggagaggtgggcgtgcccggcagcagaggagaagatggccctgagggccccaagggccgcacaggccccactggagaccccggccccccaggcctgatgggagagaagggcaagctgggcgtgcccggcctgcccggctacccaggccggcagggccccaagggcagcctgggcttccctggcttccctggggccagcggggagaagggggcccggggcctgagcggcaagagcggccccagaggagagcggggccccaccggcccccggggccagaggggccccaggggggccaccgggaagagcggggccaagggcaccagcggaggagatggcccccacggccccccaggagagcggggcctgcccggcccccagggccccaacggcttccctggccccaagggccccccaggccccccaggcaaggatggcctgcccggccaccctggccagagaggagaggtgggcttccagggcaagacaggccccccaggccccccaggagtggtgggcccccagggcgccgccggggagaccggccccatgggagagcggggccaccctggccccccaggccccccaggagagcagggcctgcccggcacagctgggaaggagggcaccaagggggaccccggccccccaggggcccctgggaaggatggccctgctggcctgcggggcttccctggagagcggggcctgcccggcacagctgggggccctggcctgaagggaaatgaaggccccagcggccccccaggccctgctggcagccctggagagagaggagctgctggcagcggcggccccatcggccccccaggccggcccggcccccagggccccccaggagctgctggggagaagggcgtgcctggagagaagggccccatcggccccaccggcagagatggagtgcagggccctgtgggcctgcccggccctgctggccccccaggagtggccggagaagatggagacaagggggaggtgggggaccccggccagaagggcaccaagggcaacaagggggagcacggccccccaggccccccaggccccatcggccctgtgggccagcccggggctgctggagcagatggagagcccggggcccggggcccccagggccactttggagccaagggagatgagggcacccggggcttcaacggccccccaggccccatcggcctgcagggcctgcccggccccagcggggagaagggggagactggagatgtgggccccatgggccccccaggccccccaggcccccggggccctgctggccccaacggggctgatggcccccagggccccccaggaggagtgggcaacctgggccccccaggagagaagggggagcccggggagagcggcagccctggcatccagggcgagcccggggtgaagggccccagaggagagcggggggagaagggggagagcggccagcccggggagcccggccccccaggccccaagggccccactggagatgatggccccaagggcaaccctggccctgtgggcttccctggggaccccggccccccaggagagggcggcccccggggccaggatggagccaagggggacagaggagaagatggagagcccggccagcccggcagccctggccccactggagaaaatggccccccaggccccctgggcaagaggggccctgctggcagccctggcagcgagggccggcagggcggcaagggggccaagggggaccccggggccatcggggcccctgggaagacaggccctgtgggccctgctggccctgctgggaagccaggcccagatggcctgcggggcctgcccggctctgtgggccagcagggccggcctggggccaccggccaggccggccccccaggccctgtgggccccccaggcctgcccggcctgcggggagatgctggggccaagggggagaagggccaccctggcctgattggcctcatcggccccccaggagagcagggcgagaagggggaccggggcctgcccggcccccagggcagccctggccagaagggggagatgggcatccctggggccagcggccccatcggccctgggggccccccaggcctgcccggccctgctggccccaagggggccaagggggccactggacctgggggccccaagggggagaagggcgtgcagggccccccaggccaccctggccccccaggagaggtgatccagcccctgcccatccagatgcccaagaagacccggcgctctgtggatggcagccggctgatgcaggaggatgaggccatccccactggaggagcccctggcagccctgggggcctggaggagatcttcggcagcctggacagcctgcgggaggagattgagcagatgagaagacccaccggcacccaggacagccctgcccggacctgccaggacctgaagctgtgccaccctgagctgcctgatggagagtactgggtggaccccaaccagggctgtgccagagatgccttccgggtcttctgcaacttcaccgctggaggagagacctgtgtgaccccaagagatgatgtgacccagttctcctatgtggacagcgagggcagccctgtgggcgtggtgcagctgaccttcctgcggctgctgtctgtgtctgcccaccaggatgtgtcctacccctgcagcggggccgccagagatggccccctgcggctgcggggggccaatgaagatgagctgagccctgagaccagcccctacgtgaaggagttcagagatggctgccagacccagcagggccgcacagtgctggaggtgaggacccctgtgctggagcagctgcctgtgctggatgccagcttcagtgacctgggcgccccaccccggcggggcggcgtgctgctgggccctgtgtgcttcatgggctag

SEQ ID NO: 232431 - DNA, 6104 bp, Artificial Sequence
  derived and/or modified sequence
cacacagaagcggcagccaccgaggagggagcagtgccgggagccccgacggcgccttgctgcatggagctgggccgctgacagctgtcgctgcccgcagcctctgacctccctgggaccccggcgtctgaggctcatagtctgctccctgtcttctgtcagcctcagggcatccagcgtctcaggccgacctgggtccctgggacccggcgtttcggcttctcagccatggagcggtgcagccgctgccatcgcctcctcctcctcctacctctggtgctggggctgagcgcggccccaggctgggcaggtgcaccccctgtggatgtgctccgggccctgaggttcccctccctccctgatggtgtccggagagcgaaaggcatctgtccagctgatgtggcctaccgagtggcacgacctgcccagctcagtgcacccactcgccagcttttcccaggaggatttcccaaagatttctctctgctgactgttgtccggacccgccctggtctccaagctcccctcctgactctctacagtgcccagggtgtccgacagctgggcctggagctgggccgacctgtccgcttcctgtatgaagaccagactgggcggcctcaacctccctctcagccagtcttccgaggcctcagcctagcagatggcaagtggcaccgtgtggctgtggctgtgaagggccagtctgtcaccctcattgttgactgcaagaagcgagtcacccggcctctcccccgaagtgctcgtccagtattggacacccatggagtgatcatctttggtgcccgtattctggatgaagaagtctttgagggtgatgtccaggagctggccattgtcccaggggtccaggcagcctatgaatcatgtgaacagaaggagctggaatgcgaggggggccagagggaaagaccccaaaaccaacagcctcacagagcccagagatctccacagcagcaaccatcaagacttcacaggccacaaaatcaggaaccccagagccaggctgcccatggaccccgagggctgaagggagagaaaggagagcctgcagtgttggaacctggtatgctcgtggaggggccccctggcccagaaggccctgcgggattgattggtccccctggcatccaggggaacccaggcccagttggagaccctggagagaggggcccccctggccgagcagggctccctggatcagatggggctcctggtcctcctggcacatctctcatgctcccattccggtttggcagtggtgggggtgacaagggccctgtggtggcggcccaggaggctcaggcccaggcgatcctgcagcaggcgaggctggcgctccgtggaccccctggccccatgggatacacagggcgccctggacccttgggccaacctgggagccctggcctgaaaggagagtctggagacttaggacctcagggccccagaggacctcagggcctcacaggccctcctggcaaggctgggcgaaggggccgggcaggtgctgatggagcccgagggatgcctggagatcctggagtgaagggtgaccgaggttttgatggactcccagggctccctggagagaagggccataggggtgatactggtgcccagggccttcctggtccccctggtgaggatggagagaggggagatgacggggagattgggcctcgagggctgcctggagagtcgggacctcgaggtctccttggccccaaaggcccacctggtattcctggaccccctggcgtccgaggcatggatggtccccagggccccaaagggagcttgggaccccagggagagccaggacctcctggacaacagggcacccctgggacccagggtcttcccgggccccagggtgccatcggccctcatggagagaagggtcctcaagggaagccagggctccccggcatgcctggctcagacggacccccgggtcacccagggaaggaaggtccccctggaaccaaaggaaaccagggtccctctggacctcagggacctctaggatacccaggacctcgaggggtcaagggtgtggacggaattcggggtctgaagggtcataagggtgagaagggtgaggatggctttcctgggttcaaaggtgacataggcgtgaaaggtgacaggggcgaagttggagtccctggttccaggggagaggatggtcctgaggggccaaagggacgcactggaccgactggagaccctgggcccccagggctcatgggcgagaagggcaagctgggtgttcctggtctgcctggctatcctggacgtcagggacccaaggggtccctaggatttcctggctttcctggtgccagtggagagaagggagcccggggcctgtcggggaagtcagggcctcggggagaacggggccccacgggtccacggggtcagcggggaccccgaggtgccactgggaagtctggagctaagggaacatctggtggtgatggcccccatgggccccctggagagaggggcctccctggacctcagggtcccaacgggtttcctggaccgaaaggacccccgggcccccctgggaaggatgggctgccgggacacccaggccaaagaggagaagtgggtttccaagggaagaccggcccccctggtcctccaggagtggtgggacctcagggagcagcaggagaaaccggccctatgggggagagaggtcacccaggccccccggggccccctggagagcagggactacctgggacagctggaaaagaaggaacaaagggtgaccctggtccccctggggccccagggaaggatggtcctgctggtctgaggggattcccaggagagagaggcctcccaggcactgctggtggacctggtttgaaggggaatgaaggtccgtctggcccccctggccctgcaggctcccctggggaacgaggtgcagcaggatcagggggacccattggtccgccagggcgcccaggcccgcagggtccccctggagcagcaggagagaaaggtgtcccaggtgagaagggccccattggcccgactggccgagatggagtgcagggtcctgtggggcttcctggtcctgctgggcctccaggtgtggctggagaggatggagacaagggtgaggtgggggaccccggacagaagggcaccaaagggaacaagggtgaacatggccctcctggaccccctggacccattggtcctgtggggcagcctggagcagcgggagcagatggggagcccggagctcggggaccccagggacactttggagccaaaggtgatgaaggaacaagaggattcaatgggcccccaggacccattggcctacagggtttgccaggcccctctggggagaagggagaaacaggagatgtgggtcctatgggaccacctggccccccaggacctcgaggtccagctggacccaatggcgctgatggcccacaaggtcccccaggaggtgttgggaacctgggtccccctggagagaagggggaaccaggagagtcaggatctccagggatccagggcgagccaggtgtcaagggtccacgcggggaacgtggagagaaaggagagtcggggcagccaggagagccagggccaccagggcctaaaggccccacaggcgatgatggccccaaagggaaccctggtcctgttggttttcctggtgaccctggcccccctggagaaggtggccctcggggccaggatggtgctaagggtgaccgaggcgaggatggtgagccaggacagcctggatcccctggtcccaccggggagaatggacccccagggccacttggaaagcgaggtcctgctggctcgcctggttccgaggggcgacaaggagggaagggagccaagggagatcctggcgctataggtgccccggggaagacaggcccggtgggtcctgcaggcccagcagggaaacctggccctgatggtctgagggggctcccaggctcagtgggtcagcaaggccgacctggagctacaggccaggctgggcccccaggtcctgtgggacccccagggctgcctggtctccggggcgatgctggagccaagggagagaagggccacccaggtctcattggactgattgggcccccgggtgagcagggagagaagggagatcggggacttcctgggcctcagggctcccctgggcagaagggtgagatgggtatcccaggagcatccggccccattggtcctggaggtccccccggcctccccggacctgctggccccaaaggagccaaaggagccacaggcccaggcggacccaagggagagaagggtgtgcagggccctccaggacacccgggtcccccaggcgaggtgatccagccactgcccattcagatgcccaagaagactcggcgctcggtggatggaagccgtctgatgcaggaagatgaggccataccgaccgggggagcccccggcagtcctggggggctggaggagatctttggctcactcgactccctgcgggaggagatcgagcagatgaggcggccaacagggacccaggacagccctgctcgcacctgccaggacctgaagctgtgccacccagagcttcccgatggagagtactgggtcgaccccaaccagggctgtgctcgggatgccttccgagttttctgcaacttcacagcagggggtgagacctgtgtgacgcctagggatgacgtcacgcagttctcttacgtggactcagagggctccccagtgggtgtggtccagctcaccttcctgcggctgctcagcgtctcagcccaccaggacgtctcctacccctgctctggagcagcccgtgacggtcccctgagactccgtggggccaatgaggatgagctgagcccggagactagcccctatgtcaaagaattcagagatggctgccagacacagcaaggccggacggtgctggaggtgcgaacgcctgtgctggagcagctgccagtgctggatgcctccttctcagacctgggagccccaccgaggcggggaggggtgctgctggggcctgtctgcttcatgggataggaccgtctctgtctgatcctgtccattcggaaccaggcccacctggaatcccacaacatcagctctgtgccacctcccaagagggctcctcactatctagggagccctgggccagggcgtggagagccctcagtcggggcaggccaggggaggggtgaagtggttgcctggacaccccacgggaggagtggcatctggggctcttggccctcccacctggagcctgttacccgttagagagctgagacccttatttaaaactcacctcccaatcaccccaaacaaatggaagagaagagaaaggacatggcgtattttgtatttaaaagtaattgtattaattatttaaagtgtggaaagcaaaataacaaaaaagagaaacgccaacaaaaatcagcagatgttgaagacaggggtctcgggggtgggctccggcacccacatcctggagtcaggactttcctcagtgactgtgtgtaggggggtttcagggctgaaccccacctccctcccaccttcctcccacctcacctgtcgcacccactgtgaaagttggaatatgtggtctccctggcctcagggctctgactctgccagggtggggctctctaacccacaggtgttggctgcctggcccatgtgcccactgtctcttccacttggtctgggtttggcaggcactgcctgctacttgagggccaggatgctcccccagggaagaaacggaatagtgtggggtgtgtgcagggctgcatcccgcagatggctggaatattaaaattcttctatattggctggtaaattgccatggccctgagccactgagtatgttcattgccacccctgtccctcccctgggcacccctcactttccctgatcctgcaattaaagggttaatgtgtggcatatggaagggactcccaggaccctgtgcccagcttccatgctgactgatggttaaataatgtgattgtctcctcccagg

SEQ ID NO: 232432 - DNA, 4890 bp, Artificial Sequence
  derived and/or modified sequence
atggagcggtgcagccggtgccaccggctgctgctgctgctgcccctggtgctgggcttgagtgcagccccaggctgggccggcgcacccccagtggatgtgctcagagctctcaggttcccaagcctgcccgacggagtcaggagagcaaagggaatctgtccagcagatgtcgcataccgggttgcgcgacctgcacagttatccgcgccgacacggcagctttttcctgggggcttccctaaagatttttccctgctcacagtggttagaacacgccccggattgcaggcaccgctgctcaccctgtattcagcccagggggttcggcagctcgggcttgaattaggtagacccgtgcgctttctctatgaagatcagaccggtcgtccgcaaccacctagccagcccgtatttcgaggactatcactcgctgatgggaaatggcacagggtggccgttgcggtgaaagggcaatcagttacccttatagttgactgcaagaagcgggtaactagacccctcccccggtctgctcgccccgtactcgacactcatggagtcatcatttttggtgctagaatcctggatgaggaggtgtttgaaggcgacgtgcaggagcttgccatagtcccaggggtgcaggctgcctacgagtcttgtgagcagaaggaacttgagtgcgagggaggtcagcgcgagcggccccagaaccagcagccacaccgcgcgcaaagatctccgcagcagcagccatcccgactgcaccggccccagaaccaggaacctcagagccaagcggcacacggccccagggggctcaagggcgagaagggggaacctgccgtgctggaacccgggatgctcgtggaaggcccccccggacctgaggggcccgcgggcctcatcgggcctccagggatacagggaaacccggggccagtgggggatcctggagaaaggggcccacccggtagggccggtctgcccggctctgacggggcccccggaccgccagggactagcctgatgctgccattccgatttggcagcggaggtggagataaaggccctgtggtagcggctcaggaagcacaggctcaagctatacttcagcaggcccggctggcactcagaggacctcccggccccatgggttatactggtaggccgggacctctggggcagccaggaagccccggcttgaaaggggagagcggtgacctaggcccacagggcccacgtggacctcaggggctgaccggcccgccaggaaaggctggtcggcgaggccgcgcgggcgccgacggcgcccgcggaatgccaggggaccccggggtcaaaggggatagaggttttgatgggctgcctgggcttcccggtgagaaggggcacaggggcgatacaggagcccagggcctaccagggccacccggtgaggatggcgaacgaggtgatgatggggaaatcggacccagaggtctacccggggagtctggccctcgcggcctgctcggaccaaagggccccccaggcattcccgggcctcccggggtgcgcggtatggatggcccacaaggaccgaaaggctcactggggccccagggcgagccaggcccccccggccagcagggcaccccggggacacaggggcttcctggcccccagggagctatcggtcctcacggggagaaggggccacaaggaaagcctggactccccggtatgcccgggtctgatggccccccagggcaccctggcaaagaaggaccccctggcacaaagggtaatcaaggaccctccgggccccagggaccactgggctaccctggcccacggggcgtgaaaggcgtggatggtatcagaggcctaaaaggtcataaaggcgaaaaaggcgaggacggtttcccaggattcaagggagacatcggcgttaagggcgatcggggcgaggtgggggtccccggaagtcgcggtgaagatggccctgagggtccgaaaggccgcaccggacccactggcgatccagggccccccggacttatgggagagaaaggtaagcttggtgtgcctgggctgcccgggtaccccgggaggcaagggccaaagggctcactgggcttccccggctttccgggcgcttctggcgagaagggggctaggggtctttctggcaagagcggcccccgaggcgagcgaggtcccaccggcccaagaggccagagaggtccgcgtggggccactggcaagagcggggccaaaggaacatccggaggcgatgggccccatggcccaccaggggaacgcggcctgcctggcccccagggacctaacggctttcccggacctaagggccctcccgggcccccaggcaaagacggactccccggacaccctgggcagcgaggagaagtcgggttccagggcaagacgggaccaccaggaccccctggagtcgtcggtccccagggggctgccggagagactggccccatgggcgagcgcgggcacccaggcccacccggtcctccgggagagcaaggcctccctgggaccgcagggaaagagggtacaaaaggggatcctggaccgcccggtgctcctgggaaagatgggcccgcgggtcttagaggctttcctggagagagaggactccccgggactgctggtgggccgggcctcaaaggtaatgagggaccctctgggccacccggaccagccggaagccccggagaaagaggtgctgctgggagtggaggtccaattgggcccccaggccggcctggcccccaggggccccctggcgctgccggtgaaaaaggggtcccaggggaaaagggacccattgggccgactggaagagacggggttcagggtcctgtgggtcttcctgggcctgcgggcccgccgggggtagccggggaggacggagataagggggaggttggcgaccccggacagaaaggaacaaaaggtaataaaggggagcacggacctccagggccacccggacccatcggtcctgtgggacagccaggagctgcaggagccgatggcgaaccgggagcacgcggaccccaaggccatttcggagcaaagggggacgagggaacccgggggtttaatgggccccccggtcccatcgggctacaggggctaccaggccctagcggcgagaaaggcgagaccggggatgtgggccctatgggcccccccggtccacccggacctagaggccctgcgggtcctaatggggcagatggccctcagggaccccctgggggcgttggaaatcttggccctccgggggaaaaaggggaacctggcgaatccggtagcccaggcattcaaggggagcccggcgtgaaggggccacgcggagagcgcggcgagaagggggagagcgggcaaccgggggagccaggccccccgggcccaaagggacctaccggggatgacggacctaagggtaatccagggcccgtgggatttcctggggaccccggacctccaggagaggggggcccaaggggacaggatggcgccaagggcgataggggggaagatggagagcccggacagcccggctcccccggcccaactggcgagaacggcccacccggcccgctgggtaaacgaggtcctgccgggtctccagggtccgagggaaggcagggcgggaaaggcgctaagggagaccctggcgcaattggtgctcccggtaaaactggtccagtgggcccagctggcccagcaggtaagcccggtccagatggactgaggggactgccaggctccgtgggacaacagggccggccaggggccacaggacaggccggccccccaggcccagtgggtccccctgggctccccggtttgcgtggcgacgccggcgcaaagggcgaaaagggccaccccggattgatagggttgattggcccccctggcgaacaaggcgaaaagggggatcgaggcctaccagggccccaggggtcaccaggccagaaaggagaaatgggcattcctggggctagcggacctattggtcccggggggccccccggcttgcccggacctgcaggaccaaagggcgctaagggcgcaaccggccccggggggcccaagggggaaaaaggcgtgcagggccctcctggccaccctggcccaccaggtgaggttatacagcccctgcccattcaaatgccaaaaaaaaccagaaggtccgtcgacggtagccgcctcatgcaggaggacgaggctatccctacggggggcgcacctggcagccccggaggccttgaggagatctttggtagccttgattccttgcgggaggagatcgaacagatgaggcggccgacaggcactcaagactcccctgcccggacatgccaggacctaaaactgtgtcatccggagctgccggacggcgaatattgggtagacccaaatcagggttgtgcaagagatgcgtttcgggtgttttgcaatttcacagccgggggcgagacctgcgtaacgccccgtgatgatgtaacacagttcagctacgtggattccgagggcagcccagttggcgttgtacaactgacgttcctccgtctactatcagtctccgctcaccaggatgtgagctacccatgcagcggagccgcccgtgatggccccctgagacttcgcggagctaacgaagatgagttgtctccggagacgtcaccctatgtgaaggaattccgcgacggatgccagacacagcagggcaggacagttctggaagtcaggactccagtgctcgaacagttgcctgttctcgacgcttctttttccgacttgggggcaccacccagaaggggcggcgttctgctcggccccgtctgctttatgggttag

SEQ ID NO: 232433 - DNA, 5792 bp, Artificial Sequence
  derived and/or modified sequence
ggtgcaccccctgtggatgtgctccgggccctgaggttcccctccctccctgatggtgtccggagagcgaaaggcatctgtccagctgatgtggcctaccgagtggcacgacctgcccagctcagtgcacccactcgccagcttttcccaggaggatttcccaaagatttctctctgctgactgttgtccggacccgccctggtctccaagctcccctcctgactctctacagtgcccagggtgtccgacagctgggcctggagctgggccgacctgtccgcttcctgtatgaagaccagactgggcggcctcaacctccctctcagccagtcttccgaggcctcagcctagcagatggcaagtggcaccgtgtggctgtggctgtgaagggccagtctgtcaccctcattgttgactgcaagaagcgagtcacccggcctctcccccgaagtgctcgtccagtattggacacccatggagtgatcatctttggtgcccgtattctggatgaagaagtctttgagggtgatgtccaggagctggccattgtcccaggggtccaggcagcctatgaatcatgtgaacagaaggagctggaatgcgaggggggccagagggaaagaccccaaaaccaacagcctcacagagcccagagatctccacagcagcaaccatcaagacttcacaggccacaaaatcaggaaccccagagccaggctgcccatggaccccgagggctgaagggagagaaaggagagcctgcagtgttggaacctggtatgctcgtggaggggccccctggcccagaaggccctgcgggattgattggtccccctggcatccaggggaacccaggcccagttggagaccctggagagaggggcccccctggccgagcagggctccctggatcagatggggctcctggtcctcctggcacatctctcatgctcccattccggtttggcagtggtgggggtgacaagggccctgtggtggcggcccaggaggctcaggcccaggcgatcctgcagcaggcgaggctggcgctccgtggaccccctggccccatgggatacacagggcgccctggacccttgggccaacctgggagccctggcctgaaaggagagtctggagacttaggacctcagggccccagaggacctcagggcctcacaggccctcctggcaaggctgggcgaaggggccgggcaggtgctgatggagcccgagggatgcctggagatcctggagtgaagggtgaccgaggttttgatggactcccagggctccctggagagaagggccataggggtgatactggtgcccagggccttcctggtccccctggtgaggatggagagaggggagatgacggggagattgggcctcgagggctgcctggagagtcgggacctcgaggtctccttggccccaaaggcccacctggtattcctggaccccctggcgtccgaggcatggatggtccccagggccccaaagggagcttgggaccccagggagagccaggacctcctggacaacagggcacccctgggacccagggtcttcccgggccccagggtgccatcggccctcatggagagaagggtcctcaagggaagccagggctccccggcatgcctggctcagacggacccccgggtcacccagggaaggaaggtccccctggaaccaaaggaaaccagggtccctctggacctcagggacctctaggatacccaggacctcgaggggtcaagggtgtggacggaattcggggtctgaagggtcataagggtgagaagggtgaggatggctttcctgggttcaaaggtgacataggcgtgaaaggtgacaggggcgaagttggagtccctggttccaggggagaggatggtcctgaggggccaaagggacgcactggaccgactggagaccctgggcccccagggctcatgggcgagaagggcaagctgggtgttcctggtctgcctggctatcctggacgtcagggacccaaggggtccctaggatttcctggctttcctggtgccagtggagagaagggagcccggggcctgtcggggaagtcagggcctcggggagaacggggccccacgggtccacggggtcagcggggaccccgaggtgccactgggaagtctggagctaagggaacatctggtggtgatggcccccatgggccccctggagagaggggcctccctggacctcagggtcccaacgggtttcctggaccgaaaggacccccgggcccccctgggaaggacgggctgccgggacacccaggccaaagaggagaagtgggtttccaagggaagaccggcccccctggtcctccaggagtggtgggacctcagggagcagcaggagaaaccggccctatgggggagagaggtcacccaggccccccggggccccctggagagcagggactacctgggacagctggaaaagaaggaacaaagggtgaccctggtccccctggggccccagggaaggatggtcctgctggtctgaggggattcccaggagagagaggcctcccaggcactgctggtggacctggtttgaaggggaatgaaggtccgtctggcccccctggccctgcaggctcccctggggaacgaggtgcagcaggatcagggggacccattggtccgccagggcgcccaggcccgcagggtccccctggagcagcaggagagaaaggtgtcccaggtgagaagggccccattggcccaactggccgagatggagtgcagggtcctgtggggcttcctggtcctgctgggcctccaggtgtggctggagaggatggagacaagggtgaggtgggggaccccggacagaagggcaccaaagggaacaagggtgaacatggccctcctggaccccctggacccattggtcctgtggggcagcctggagcagcgggagcagatggggagcctggagctcggggaccccagggacactttggagccaaaggtgatgaaggaacaagaggattcaatgggcccccaggacccattggcctacagggtttgccaggcccctctggggagaagggagaaacaggagatgtgggtcctatgggaccacctggccccccaggacctcgaggtccagctggacccaatggcgctgatggcccacaaggtcccccaggaggtgttgggaacctgggtccccctggagagaagggggaaccaggagagtcaggatctccagggatccagggcgagccaggtgtcaagggtccacgcggggaacgtggagagaaaggagagtcggggcagccaggagagccagggccaccagggcctaaaggccccacaggcgatgatggccccaaagggaaccctggtcctgttggttttcctggtgaccctggcccccctggagaaggtggccctcggggccaggatggtgctaagggtgaccgaggcgaggatggtgagccaggacagcctggatcccctggtcccaccggggagaatggacccccagggccacttggaaagcgaggtcctgctggctcgcctggttccgaggggcgacaaggagggaagggagccaagggagatcctggcgctataggtgccccggggaagacaggcccggtgggtcctgcaggcccagcagggaaacctggccctgatggtctgagggggctcccaggctcagtgggtcagcaaggccgacctggagctacaggccaggctgggcccccaggtcctgtgggacccccagggctgcctggtctccggggcgatgctggagccaagggagagaagggccacccaggtctcattggactgattgggcccccgggtgagcagggagagaagggagatcggggacttcctgggcctcagggctcccctgggcagaagggtgagatgggtatcccaggagcatccggccccattggtcctggaggtccccccggcctccccggacctgctggccccaaaggagccaaaggagccacaggcccaggcggacccaagggagagaagggtgtgcagggccctccaggacacccgggtcccccaggcgaggtgatccagccactgcccattcagatgcccaagaagactcggcgctcggtggatggaagccgtctgatgcaggaagatgaggccataccgaccgggggagcccccggcagtcctggggggctggaggagatctttggctcactcgactccctgcgggaggagatcgagcagatgaggcggccaacagggacccaggacagccctgctcgcacctgccaggacctgaagctgtgccacccagagcttcccgatggagagtactgggtcgaccccaaccagggctgtgctcgggatgccttccgagttttctgcaacttcacagcagggggtgagacctgtgtgacgcctagggatgacgtcacgcagttctcttacgtggactcagagggctccccagtgggtgtggtccagctcaccttcctgcggctgctcagcgtctcagcccaccaggacgtctcctacccctgctctggagcagcccgtgacggtcccctgagactccgtggggccaatgaggatgagctgagcccggagactagcccctatgtcaaagaattcagagatggctgccagacacagcaaggccggacggtgctggaggtgcgaacgcctgtgctggagcagctgccagtgctggatgcctccttctcagacctgggagccccaccgaggcggggaggggtgctgctggggcctgtctgcttcatgggataggaccgtctctgtctgatcctgtccattcggaaccaggcccacctggaatcccacaacatcagctctgtgccacctcccaagagggctcctcactatctagggagccctgggccagggcgtggagagccctcagtcggggcaggccaggggaggggtgaagtggttgcctggacaccccacgggaggagtggcatctggggctcttggccctcccacctggagcctgttacccgttagagagctgagacccttatttaaaactcacctcccaatcaccccaaacaaatggaagagaagagaaaggacatggcgtattttgtatttaaaagtaattgtattaattatttaaagtgtggaaagcaaaataacaaaaaagagaaacgccaacaaaaatcagcagatgttgaagacaggggtctcgggggtgggctccggcacccacatcctggagtcaggactttcctcagtgactgtgtgtaggggggtttcagggctgaaccccacctccctcccaccttcctcccacctcacctgtcgcacccactgtgaaagttggaatatgtggtctccctggcctcagggctctgactctgccagggtggggctctctaacccacaggtgttggctgcctggcccatgtgcccactgtctcttccacttggtctgggtttggcaggcactgcctgctacttgagggccaggatgctcccccagggaagaaacggaatagtgtggggtgtgtgcagggctgcatcccgcagatggctggaatattaaaattcttctatattggctggtaaattgccatggccctgagccactgagtatgttcattgccacccctgtccctcccctgggcacccctcactttccctgatcctgcaattaaagggttaatgtgtggcatatggaagggactcccaggaccctgtgcccagcttccatgctgactgatggttaaataatgtgattgtctcctccc

SEQ ID NO: 232434 - DNA, 4809 bp, Artificial Sequence
  derived and/or modified sequence
ggcgccccccccgtggacgtgctgcgggccctgcggttccccagcttgccagatggggtgagacgggcgaaaggcatctgcccagctgacgtggcttatagagtggcccgcccagcacagctgagcgcccctacccgccagctttttcccggtggatttccgaaggatttctctttattgaccgttgtgcgaacccggcctggcctccaagctcccctgctcacactgtactccgcacaaggcgttcggcagctaggccttgaacttggccgccctgttaggtttctctacgaagaccagacaggcagacctcagccacccagccagcccgtcttccgcggattatctttagcagacggaaaatggcacagagtcgcggtcgccgtaaaaggtcagagcgtgacgctgatcgttgactgcaaaaaacgggtgaccagaccactaccccggtctgcacgtccagtccttgacactcatggggttatcatattcggcgctagaatcctcgacgaggaggtgtttgaaggcgatgtgcaagaattggcaatagtgcccggcgtgcaagcagcctatgaatcgtgtgaacaaaaagagctagagtgcgaaggtgggcagcgggagcggccccaaaatcaacagccacaccgtgctcaacgttcaccgcagcagcaaccctcacgccttcacaggcctcagaaccaggagccccaaagccaggcagcccacggccctaggggtctgaaaggagaaaagggcgaacccgcggtgttagaacccggcatgctcgtggagggacctcctggacctgagggcccggctggtctgatcgggcctcctggaattcagggcaaccctggacctgtaggcgacccgggtgaaagaggcccccccgggagagccggccttcccggctctgacggagcccccgggccaccaggcacctctttgatgctgcccttccgctttggatcaggtggcggcgataaaggccccgtggttgcagcacaggaggctcaggcccaggcaattttgcagcaggccaggttggccctaagaggacctcctgggccgatgggatatacagggcgacccggacccctaggacagcccgggagcccaggactcaagggagagagcggtgacctgggaccccaaggtcccagaggtccccagggccttactgggcctcctggcaaggctggacgccgaggccgcgcaggcgctgatggggcgagaggaatgcccggcgaccccggagtgaagggcgacaggggattcgacggactgccgggcctgcccggagaaaaggggcatcgtggagacacgggagcccaggggctccccggtccccctggggaggatggggaaagaggggatgatggagagatcggccctcgtgggctgcccggcgaatctggtccaagggggctgctgggccccaaggggccccctggtataccgggcccaccaggggtcagagggatggatggcccacagggtcccaaaggtagtctgggacctcagggcgaacccgggccacccggtcagcaaggaacaccaggtacccaaggtttgcccggtccgcagggcgcaataggccctcacggagagaagggcccgcaggggaagcccggactgcctggtatgcccggcagcgatggcccccccggccaccctggtaaggaggggccccctggtaccaaaggcaatcaaggcccgtccggtccacagggccctttaggctaccccgggccccggggggtcaagggggtggacgggataagaggactgaaagggcataagggggaaaaaggcgaagacggcttccctggatttaagggggacatcggcgtgaaaggagacagaggggaagttggagtgcccgggagtcgaggcgaagacggaccagaaggcccaaaggggcgcacaggcccgacaggagaccctggtccccccggcctcatgggcgagaaaggcaaactgggagttccgggattaccagggtatcctggacgccagggcccgaaaggttccctgggcttcccaggattccctggagccagcggagagaagggcgcccgggggctgagcgggaagtcaggccctaggggcgaaagaggacctactggacctcgcggacagcgaggtcccagaggtgctactgggaaaagcggtgcaaaaggaacctctgggggggatggacctcacgggcctccaggtgaaaggggtctgcccggtccccagggcccaaacgggtttccaggccctaagggacctccgggaccacccggcaaggatggactccctggccacccggggcagcgcggagaggtaggattccaaggtaaaactggaccgccaggtcctccaggcgtagtcggcccacaaggcgcagccggtgaaactggccccatgggggaacgcgggcacccgggccctcccggccctcccggcgaacaggggctgccagggactgccggaaaagaggggactaagggtgacccaggccctccaggtgctccaggtaaagatggccctgccggattaagaggctttcctggtgagcggggcttgccgggaactgccggaggccctggcctcaaaggcaatgagggacccagcggacctcccggcccagctggaagccccggtgagcgcggagcagccggcagcggggggcccattggcccaccaggccggccaggaccccagggcccacctggggccgccggcgagaagggggtccccggagagaagggccctatcggtccaacaggtcgggatggtgtacagggccctgttggacttccaggccctgcaggccctccaggcgtcgccggggaggatggagataaaggcgaagtcggggatcctggtcagaaaggtaccaaaggcaacaaaggagagcacgggccaccagggcctccaggaccaattgggcctgtaggccaacccggagccgcaggtgctgatggagagcccggagctcgcgggccacaaggccactttggcgctaagggcgatgaaggtactcggggtttcaacggacctcctggacccatagggttacaaggccttcctggaccatctggtgaaaaaggtgaaacaggagacgtgggtcctatgggacccccaggccctcccggtccaaggggcccagccgggcccaacggtgccgatgggccacagggaccacccggaggcgtcggaaacctcggaccacccggagaaaaaggcgagcctggcgagtccggttcccctggcatccagggggagccaggcgtgaagggtcctcggggagagagaggagagaagggggagtccggccagccgggggaaccaggacctcccggccctaaaggaccaacaggcgatgacggccctaaagggaatcctggacccgtcggattccctggcgaccctggccctccaggggaaggcggaccacgcgggcaggatggcgcaaaaggcgatcggggcgaagatggcgaaccaggtcaacctggctctccgggaccaaccggagaaaatgggccacctgggcccctgggtaaacgcggaccagccgggagcccgggatccgagggcagacaaggaggcaaaggcgccaaaggagacccaggggcaatcggagctccgggcaagactggccctgttggacccgcggggccggcagggaagcccggccccgatggactgaggggtcttcccggatctgtcggccagcaggggagaccaggagccacaggtcaggcaggccctccaggacctgtgggcccacccgggctcccggggcttcggggcgacgctggagccaaaggtgaaaaaggtcatcccggactcatcggccttatcggaccgccgggcgaacaaggagagaagggggacaggggcctcccaggcccccaaggcagcccaggccaaaagggcgagatgggcattcccggagcatccggaccaattggtcctggcgggcctcccggattacccggacccgccgggccaaaaggggctaaaggcgctaccggaccaggagggcctaaaggagagaaaggggtgcaggggccaccaggccacccgggcccaccgggagaagttatccagccgctgccgatccaaatgcctaaaaaaacacggagaagtgtggatgggtcgaggctcatgcaggaggatgaagccattcccaccgggggggcccctggctctcccggaggcctggaggaaatctttgggagtctggatagcctcagggaagaaatcgaacagatgcggagaccaactggcacccaggattctcctgctcgaacctgtcaagacctcaagctatgtcaccccgagcttccagacggcgagtactgggtggatccgaaccaagggtgcgcaagagatgctttccgcgtcttctgtaactttacagctgggggagaaacctgtgtcaccccacgagacgatgtgacacaattttcttacgtcgacagcgaaggaagtccagtcggcgtggttcagctcaccttcctgaggctgctgtctgtaagtgctcatcaggacgtatcttatccatgctctggggccgcccgcgatgggccactacgcctgcgaggagctaacgaggatgaattgagcccagaaactagcccttatgtgaaagaatttagagatggatgccagacccagcagggacgaacggtcctggaagtccggacccccgtcctggagcagctgccggtgctggacgcctctttctccgatctcggagcccctccgagacgcggaggagtgctgctcggtcctgtgtgcttcatgggatag

SEQ ID NO: 232435 - DNA, 4890 bp, Artificial Sequence
  derived and/or modified sequence
atggagcggtgcagccggtgccaccggctgctgctgctgctgcccctggtgctgggactatctgcagcacccgggtgggcaggagctccccccgttgatgtgctgcgggcattaaggtttcccagcctgcctgatggcgtccgcagggccaagggcatctgcccagccgacgtggcctatcgtgttgctaggcccgcccagttgagcgcacctacaaggcagctgtttccgggaggttttccaaaggatttttctctcctaaccgtagtgcgtacacgccctggactgcaggccccgcttcttaccttgtactcagctcagggcgtgcgacagcttgggctggagctgggcagacccgtccggttcctttatgaggaccagacaggaagaccacagcctccatctcagcccgtgtttcgtggcttgagcctagctgatggcaagtggcacagggttgcagttgccgtcaagggacagtctgttaccctgatcgtggactgcaaaaagcgggtgacgaggccactgcccaggtctgccagaccagtgctggatacccacggcgtgattatcttcggggctcgaattctagacgaggaggtctttgagggtgatgtgcaggagctggccattgtgcctggcgtgcaggctgcatacgagtcctgcgagcaaaaggagctggaatgcgaaggggggcagagagagcgtccacagaatcagcagcctcatagggcgcagcgaagtcctcaacagcagccctctagactccatcgaccccagaaccaggagccccaaagtcaggctgcacatggaccacggggtttgaagggagaaaaaggtgaacccgctgttcttgagccgggtatgcttgtggaaggcccaccagggcccgaaggacctgcaggactcattggacctcccggcatccagggcaaccctggaccagtcggggatcctggggaacggggaccccccggaagggccggcctaccaggttccgacggcgctccagggcctcctggaacgagcctcatgctgcccttccgcttcggctccggcggtggggacaagggccctgttgtcgccgctcaagaagcccaggcccaggcaatcctgcagcaggcaagactcgctcttcggggtcctccgggacccatgggatataccgggaggcctgggcccctaggtcagcccggtagtcctggccttaagggagagagtggtgatcttgggcctcagggaccgcgtgggccccagggactcactgggcctcccgggaaagccggccgccgcggcagggcaggcgccgacggggctcgggggatgcccggtgaccccggtgtgaagggcgatagagggttcgatggactgccggggcttcctggcgagaaaggccacagaggcgacacaggggcccagggtctgccagggcctcccggagaggatggcgagcggggtgacgacggggagatcggcccaaggggtctgccaggggaatcaggaccccgcgggctcctcggcccaaagggcccgccagggattccaggcccacctggcgtgaggggtatggatggcccccagggacccaagggtagcctgggaccgcagggcgagcccgggccgccaggacagcaggggactccgggtacccaggggttgcccggcccacaaggcgcgatcggtccgcatggggaaaagggcccacaggggaaaccaggtctccccggtatgcctggtagtgacggtcctccgggccatcctgggaaggaaggacctcccgggaccaaaggaaaccaaggtccatctgggcctcagggacccttaggctaccctggaccccgaggcgttaagggcgtcgacgggataagggggctgaaagggcacaagggcgaaaaaggagaggacgggtttccgggctttaaaggggacataggcgtgaaaggcgacagaggagaggtcggagtgccaggcagtcgtggggaggatggtcccgagggtcccaaaggccgtacaggacccaccggggaccccggaccgcccggactgatgggggagaaaggcaaactgggcgtgccaggattgcctggatacccagggaggcagggccctaagggcagcctaggctttccggggtttccaggggcgagcggagaaaagggcgctcgaggactttcggggaagtcaggccccaggggagagaggggcccaactggaccgcggggccaacgcggacccaggggcgccacaggaaagtctggtgccaaagggactagcgggggagatggaccacacggacctcctggtgaaaggggcctccccggcccacagggaccgaatggtttccctgggcctaaaggccccccaggtccgcctgggaaggatggtctacccggccatcccggccaacgcggtgaggtggggttccagggtaagaccggacctcctggacctccgggagtggtcggcccacagggggccgccggagagactggccccatgggcgaaagggggcatccagggccccctgggcccccaggcgagcagggtctccctggtaccgctggtaaggaggggactaagggtgaccctggtccccctggagccccaggcaaggatggtccagcaggcttgagaggattccctggcgagcgggggctccccggcactgctggcggccctggtctaaaggggaacgaaggaccaagcggcccacccggacccgccggttcaccgggggagaggggggctgctggatctggcggacccattggaccacccggccggccaggccctcaggggccaccaggagctgctggtgagaaaggcgttcctggagaaaaaggaccaatcggaccaaccgggagggatggcgtacaaggtcccgtgggtctcccagggcctgctgggcctccaggcgtggctggcgaggatggtgacaagggtgaggtgggggacccgggccagaagggaacaaaaggtaataagggcgagcatggacctcccggcccgcccggccctatcggccccgtgggccaacccggcgccgccggcgccgacggagagccaggtgctcgcggcccacaggggcattttggagcaaaaggggacgaaggcacaaggggtttcaacggacctcccggcccaatcgggttgcaaggacttccaggaccttccggtgaaaaaggcgagaccggtgacgtgggccctatgggacccccaggaccaccaggacccagaggcccagccggtccaaatggcgccgacggaccacagggaccccccggtggagtgggaaatcttggcccgcccggagaaaaaggcgaacctggtgaatccggaagtcccggtattcagggagaacctggcgtgaagggacctaggggcgagcggggggagaaaggcgagagcgggcaaccgggggagcctggcccccccggcccgaagggtcctaccggggacgatgggccgaaggggaaccccggtcctgtcggatttcctggcgatcccgggccaccaggggaaggaggacctaggggacaggatggtgcaaaaggcgaccgaggtgaagatggcgaaccgggccagcctgggtcacccggccccaccggagagaatggcccccctggcccactaggcaagcgcgggcctgccggaagtcccggcagtgaagggagacaagggggaaaaggcgctaaaggcgatccgggagccatcggggcccctggaaagacgggccctgtcggaccagccgggcccgccggcaagccgggcccggatggcctccggggattacccggatctgtggggcagcagggacgtccaggtgctacaggccaggctgggccacctgggcccgtgggtccgcccggactgcccggacttcgaggggatgcgggcgccaaaggtgagaaagggcaccccgggctgatcggactgattggacctccgggggagcagggcgagaagggtgatcggggactgcccggtccgcagggaagcccagggcaaaaaggtgaaatgggtattcctggggctagtggtcccatcggtcctgggggcccccctggtctcccaggccccgccggcccaaagggtgcgaaaggggcgaccggccctggaggcccaaaaggcgaaaaaggggtacagggcccacctgggcaccctggcccacctggcgaagtgattcagcctctccctatacagatgccaaagaagaccaggcgttccgttgatgggtccagattgatgcaggaagatgaggcaattccaacaggaggcgcaccaggcagtcccggtggtctggaggagatctttggatccctggattctctgagggaagaaattgaacaaatgagacgccctacagggacgcaggatagcccagcccgcacttgccaggaccttaagttgtgccaccccgaactgcccgacggtgaatactgggtggaccccaatcagggatgcgcccgtgatgccttccgtgttttttgcaatttcactgccggaggcgaaacctgcgttacaccccgcgacgacgtaacccagttttcttacgtcgactctgaggggtcccccgtaggcgtcgtgcagcttacttttctccgactattgtcagtgtccgcgcatcaggatgtgtcctacccgtgctccggcgcggccagggacggacccctgaggctaaggggcgctaacgaggatgagttatcccctgaaacgtcgccctacgtaaaagagttcagggacggctgccagacccaacagggacgcaccgtgttggaagtcagaaccccggtcctcgaacagctgcccgtcctggacgcatctttttctgatcttggagccccccctaggcgtgggggtgttcttctgggcccggtctgcttcatgggatag

SEQ ID NO: 232436 - DNA, 4890 bp, Artificial Sequence
  derived and/or modified sequence
atggagcggtgcagccggtgccaccggctgctgctgctgctgccccttgtacttggcttgagcgcagcgcccggatgggcaggcgcaccaccagtggacgtgctgagagccttgagattcccatcactgcccgacggcgtgaggcgggcgaaaggcatctgtcctgcagacgtggcctatcgagtagcccgccctgcccagttgtctgcccccacacggcagctgtttcccggtggatttcctaaagacttttccttactgacagtcgttaggactaggccgggactccaggctccattattgaccctgtacagcgcccagggagttagacagctgggactggagctgggacggcctgttagattcctgtacgaagaccaaacaggccgcccccagcccccatctcagccagtctttcggggcctgagcctggctgacgggaagtggcatagagtagctgtggctgtgaaaggtcagtctgtgacgctgatcgttgactgtaaaaagcgcgtgacacgccccctgccaagaagtgcaagacccgtgttggacacgcacggggtgataatctttggcgctcgcatattggatgaagaggtcttcgaaggggatgtgcaggaattggcaatcgtacccggcgttcaggcagcttacgaaagctgcgaacagaaggaactggagtgtgaggggggacagcgcgagagaccccaaaaccagcagccccacagggcacagcgcagtccgcagcaacaaccatcgcgccttcacaggccccaaaatcaggaacctcagagtcaggctgcacatggccctcgaggactaaaaggagagaaaggggagcctgccgttctcgagccaggaatgctggtcgagggtcccccgggcccagaaggccccgctggcctgattggcccacctggcatccaagggaaccctggcccggtaggagatccaggcgaaagggggccccccgggcgcgcaggactcccaggctcggatggagctcctgggcctccgggtacctcacttatgttgccctttcgtttcggctccggtggtggcgataaaggtccggtagtcgctgctcaagaagcccaggcccaagccattttgcaacaagcaaggctggccctgcgagggccgccagggcccatgggatacacagggagaccaggacctctaggccagcctgggtccccaggtctgaagggagaaagtggcgatctggggcctcagggcccacggggaccccagggcctcaccggacctcctggtaaagcaggccgccgtggtcgcgctggggccgacggcgccagagggatgcctggagatcctggagtgaaaggtgacaggggattcgacggactgccagggctgccaggcgagaaaggccatcgtggagatactggcgcgcagggcttacccggccctcctggggaggacggcgagcgaggcgacgatggagagataggaccaagaggcctgcctggagaaagtggtccaagaggactgctgggtccaaaaggcccccctggcatacccggccctcccggcgtccgcggcatggatgggccccagggccccaagggctcccttggaccgcagggtgaacctggcccacctggtcagcagggtactcctggaacgcagggcttgcccggtcctcaaggcgccataggccctcatggagaaaagggtccacaaggtaaacctggtctacctgggatgcctggatctgacgggccgcccggtcatccaggaaaggaaggcccgccaggcaccaagggcaaccaggggccctcaggacctcagggaccccttggctaccccggtccccgcggcgtgaagggggtggatggcattcgcgggctcaaaggccataaaggcgaaaaaggcgaagacggattccccgggtttaaaggcgatatcggcgtgaagggggatcgaggcgaagtcggcgtgcccggtagccgcggtgaggacgggccagagggccctaaagggcggacaggacctaccggcgatcccggaccgccgggcctgatgggagaaaaaggcaagctaggcgtccccggacttccaggataccccggacgccaaggacccaagggaagccttgggtttccaggcttccccggcgcaagcggggagaaaggagcacgcggcctgtccggaaagagtggacctagaggggagcggggcccaaccggcccaaggggccaaaggggcccccggggggccactggcaaatctggcgccaaaggcactagtgggggcgacggaccacacggaccacccggagagagaggcttaccaggaccccagggaccaaacggcttcccaggacctaaagggcctccaggccctcccggcaaggatggactgcccgggcaccccgggcagcggggcgaagtgggctttcaggggaagaccggccctcccggtccacccggcgtggtggggcctcagggcgctgccggcgagactgggcctatgggggagagagggcaccccggaccacctggcccaccaggcgaacaggggctccccggaaccgcgggcaaggagggaacaaagggggaccctgggcctcctggcgctcctggaaaagacggacccgccggcctgcgtggttttccgggggagaggggtttgccagggactgcaggcggcccaggcttaaagggcaacgaaggtccctccggaccacccggaccggccggatctcctggggagaggggggccgcaggatcagggggccctatcggaccgccgggcagacccggcccccagggaccccctggggccgctggcgaaaaaggcgtgcccggggagaaggggcctatcgggccgacgggacgtgacggcgtgcaggggccagttgggctgccaggacctgcaggcccacctggggtggctggcgaggacggtgataagggcgaggtgggggatcccggacaaaaagggacgaaaggcaacaagggggagcatggaccaccaggcccgcctgggcccatcgggcccgttggtcagcctggcgctgccggagcggacggtgagccaggagctcgcgggcctcaaggtcactttggcgccaagggcgatgagggaacacgtggctttaacggtccccctggaccaattggactgcaaggcttgcccggaccttcaggcgaaaaaggcgaaactggcgacgtgggacccatgggaccccccgggccgcctgggccgaggggcccggcgggtccaaacggcgctgatggacctcaaggaccccctggcggcgtgggcaatctgggccctcccggggaaaaaggtgagccgggggaatctggttcacccggaatacagggcgaaccaggcgtcaagggtccccgaggagagagaggcgagaagggcgaatctggacagcccggagaaccaggtcctcctggacccaaagggccgaccggagatgacggacctaaggggaacccggggcccgtcggattccccggcgacccgggtcctccgggtgaggggggaccacggggccaggacggggcaaagggcgaccgaggcgaggacggagagcccggtcagccaggtagcccagggccgacaggggagaacggtccaccaggccccctcggaaaacgcggcccagccggcagcccaggaagtgagggacggcaagggggcaagggcgccaagggggatcccggggctattggggcccccggaaaaacaggacctgtgggccccgctggtccagccgggaaaccggggcctgatggactgcgtgggctgccaggctccgtggggcagcaaggtagacctggggcaaccgggcaagcgggtcctcccggccctgttggtcctcccggtctgcctggtctgagaggagacgccggcgccaagggcgaaaagggccaccctggccttattggccttatcggccctcccggtgaacagggagagaaaggagacagaggcctgcccgggccacaggggagtcccggtcaaaaaggcgaaatgggcattccaggcgccagcgggccgattggtcctggcggtcctcccggactgcctgggcctgcgggacctaagggagcgaaaggagccacaggaccagggggcccaaaaggagagaaaggggtccagggccctcccgggcatccaggtccacccggcgaagtgattcagccccttcctatccaaatgcccaaaaaaacacgccgcagcgtggatgggtcccgcctgatgcaggaggatgaggctatcccaacggggggggccccaggatcccctggagggctggaagaaatttttggctccctggatagcctgagggaggagatagagcagatgcgccgccctacgggcactcaggatagccccgcccgaacttgccaggacctcaagctctgccaccctgaactgccggacggggaatactgggtggatcctaatcagggctgcgcgagagacgccttccgagtgttctgcaattttactgctggtggtgaaacatgtgtgacccctcgtgatgacgtaacccagttttcctacgtcgactccgaagggtcacccgtcggagtcgtccagctgacctttttgagactactgtccgtttccgcacaccaggacgtgtcttacccctgtagcggggccgcacgcgacggtccactgcggctgagaggcgctaatgaagatgagctgagtccggagacgagcccctacgttaaggagttccgagacggctgccagacacagcaaggcagaactgtgctcgaggtgcgcacacctgttctcgagcagttgcctgtactagacgcctcctttagcgacctgggcgctcctccacgacgaggaggggtgcttcttggtccggtatgtttcatggggtag

SEQ ID NO: 232437 - DNA, 4890 bp, Artificial Sequence
  derived and/or modified sequence
atggagcggtgcagccggtgccaccggctgctgctgctgctgccccttgtgctggggcttagcgctgctcccggatgggctggtgcccctcccgtagacgttcttcgcgctctgcggttcccctccttgcccgacggcgtgagacgcgctaaaggaatctgtcctgctgatgttgcctacagagtggccagacctgcccagcttagtgcaccaactcggcagctttttcccggaggattccccaaggacttctccttactcacagtggtgaggactaggccggggctgcaggctcctctactaactctttatagcgcacagggcgtcagacagttgggactcgagttgggccgacccgtccgattcttgtacgaggaccagactggtcgcccccagcccccttcccagccagtgtttcgcgggctgtccttagctgacggcaagtggcaccgggttgctgtggctgttaaaggccaaagcgtaactcttattgttgattgtaaaaagagggtaacccggcctcttcccagatccgcccggcccgtcctggacacccacggggtgatcatcttcggcgcgagaatcctagatgaggaagtcttcgaaggcgatgtccaggagctggccattgtcccaggggtgcaagccgcatatgaaagttgcgagcagaaggagttggagtgcgagggaggccagagagaaagaccccagaatcagcagcctcatcgcgcccaacgatctccacaacagcagccaagccgactgcatagaccccagaaccaggagccccagtctcaggctgctcatggcccccggggacttaagggcgagaagggagagcccgcagtgttagaaccgggtatgcttgtcgaggggcctccaggtccagagggacctgctggactaattgggcctccgggaattcagggtaatcccgggcctgtgggcgacccaggcgagagaggacccccaggaagggctgggcttccaggatcagacggcgcacctggccccccggggaccagcctgatgctgccattcaggtttggatcggggggcggtgataagggaccggtggttgccgcgcaagaagcccaggctcaagccatccttcagcaggcccgtcttgctctgaggggcccccctggtcccatgggatacaccggccgccccgggccactcggccagccaggcagtccaggactaaagggtgagtctggggacctcggccctcagggcccgcggggtccacagggactaacaggaccacccggcaaagcgggccggcggggacgagctggggcagacggcgcccgcggcatgccaggggatcccggggttaaaggtgaccgaggttttgatgggttgcccggtcttcccggagagaaagggcacaggggagacactggcgcgcaaggcctccctggcccacccggtgaagacggcgagcgaggtgatgacggcgagatcggaccaagagggctcccaggcgagagcggcccacgcgggctgctgggtcctaagggacctcctggcatacctggcccaccaggcgtgcgtgggatggacgggccacagggaccaaaagggtctctgggaccacagggggagcctggacctcctggacagcagggtacacccggaacacaggggttgccggggccacagggggctatcggcccccacggagaaaagggaccccaggggaaaccaggactcccagggatgccgggtagcgatggccccccaggacaccccggaaaggagggaccaccggggacaaagggtaaccaggggccttctggccctcagggacctctgggctaccccggcccacgtggcgtgaagggcgtagatgggatccgcggtcttaaagggcacaaaggggagaagggcgaagatggattcccggggtttaagggagatattggagtcaaaggagacagaggcgaagtgggggtgcctggttcaagaggagaggacgggccagaaggccccaagggacggacagggcccactggtgacccggggccccccggactgatgggagagaagggaaagctcggcgtccctggcctcccaggctaccctggcagacaaggtccaaagggtagtctgggttttcctggattccctggagcctcaggagaaaaaggcgccagaggcctgtccggaaagtctgggccccgaggagaacggggtcctaccggaccaagagggcaaaggggcccccgtggagcaaccggaaagagcggagccaaggggacatctggaggcgacgggcctcatggcccacccggagaaaggggcctccctggccctcagggaccaaacggtttccctggtcccaaagggccgctggggccccccggcaaagacggcttacctggccaccccgggcagcggggggaggtcggctttcagggaaagaccgggccccctggaccccccggtgtcgtcgggcctcagggggctgcgggggagactggaccaatgggagaacggggccatcctggaccccccgggccaccaggtgagcagggtttgccaggaacagccgggaaggaagggactaagggcgatccaggcccccccggggccccaggcaaggatggtcctgccggattgcggggattcccaggcgagcggggcctccctggcacagcaggggggccaggactgaagggcaatgagggcccatccgggccaccaggtccagccggatcacccggggagaggggcgctgctggtagcggagggcctatcggtccgcccgggcgaccgggccctcagggtcctccaggcgccgcaggcgaaaagggcgttcctggcgagaaggggcctataggacctactggcagagacggtgtgcaagggcctgttggcttacccgggcctgcagggcccccaggcgtggctggcgaagatggcgataaaggagaagtaggagatcctggccagaaaggcaccaagggcaacaaaggcgaacacggcccccccgggcctccaggccccattgggcccgtgggacaaccaggggctgccggggcagatggcgaacctggtgccagaggcccacagggccactttggtgctaaaggcgatgagggtacaaggggcttcaatggtccacccgggcctatcgggctgcagggactgccagggccctctggagaaaaaggcgagacaggggatgtgggtcctatgggccctcccggccccccgggtccacgtggcccagctggtcctaacggggccgacggcccacaaggaccacctggcggcgtggggaatctggggcccccaggagaaaaaggggaaccaggtgagtcagggtctcctggaatacagggggaacctggggtcaaggggccccgaggggagagaggagagaaaggcgaatcgggccagcctggtgaacctggtccaccggggcccaagggaccgactggggatgacgggccaaagggcaaccctgggcccgttggtttcccaggggaccccggccctccaggagaggggggtccgagaggccaagatggtgccaaaggggacaggggggaagatggtgaacccggccagcccggtagcccaggcccaaccggagaaaacggtccacccggcccattaggaaagcgcggaccagccggaagcccaggcagcgaaggacgtcaagggggcaagggggcgaagggagacccaggcgccattggagcccctgggaaaaccggtccagttgggccggcgggacctgcaggtaaaccaggccctgacggactccgcggactaccaggtagtgttggccaacagggcaggccgggagctaccggccaagctggccccccagggcctgtgggaccacctggcctgcccgggctccgcggcgatgcaggggccaaaggcgaaaagggacatccaggcttgatcgggctgattggtccacctggcgaacaaggagaaaagggtgaccgggggttgcccggtccccagggctctccaggccagaaaggggagatgggaatacccggcgcctccgggccaatcggccccggcgggccacccggtttacccgggccagcagggcccaagggagcaaaaggtgccacaggcccagggggtccaaagggagagaaaggcgtgcaaggaccgccagggcatccaggtccacccggggaggtgatccaaccgctgcctatacagatgcctaaaaaaacccgacgcagcgtggacgggtcccgactaatgcaagaagatgaagcgattccaacaggcggtgccccggggagtcccggaggcctggaagagattttcggttctctggactcgctcagagaggaaatcgagcagatgcgccgcccgactggtactcaggactctccagcccggacatgccaggacctcaagttatgtcatccagagcttccagatggagagtactgggtggaccctaaccagggctgcgctagagatgctttcagagtcttctgcaacttcactgctgggggggagacgtgtgtcacacctcgcgacgacgtaacgcagttcagctatgtggacagtgaagggagccctgtaggggttgttcagctcacatttcttaggctcctgagcgtaagtgcccatcaagacgtcagctatccgtgctcaggagctgcacgagacggccctcttaggctacgaggggccaatgaggacgagctgtccccagagaccagcccttacgttaaggagtttcgagacgggtgccagactcagcagggcagaaccgttctggaggtgcgcacccctgttctggaacagttacctgttcttgacgcttcattttcggatttaggtgcacctccacgcaggggaggcgtgttattggggccggtgtgtttcatgggctag

SEQ ID NO: 232438 - DNA, 4890 bp, Artificial Sequence
  derived and/or modified sequence
atggagcggtgcagccggtgccaccggctgctgctgctgctgcccctcgtcttgggcctgtctgctgccccagggtgggcaggagcaccacctgttgacgtgttacgagccctgagatttccaagcctgccagatggcgttaggagagccaaagggatttgtcccgccgatgtcgcctatcgcgtggctcgcccagctcaattgtcagctcctactcgccaactgtttccaggtggttttcccaaagacttctccctactaaccgtggttcggacccggcccggactgcaagcacctctcctcacgctctactcggcccagggagtgaggcagctgggcttggaactcggacctcctgtccgcttcctgtatgaggaccagaccggccggcctcagccaccctctcagcccgtgttccgcggtttgagtctggctgacggaaaatggcaccgcgttgcggtggcggtaaaaggccagagcgtgaccttgatcgtagactgtaagaagcgggtcacccggcccctcccccggagtgcacgtccggtcttggacacacacggtgtcattatatttggcgcaagaattctcgatgaggaagtatttgagggggatgtgcaggagctcgctatagtacccggagtgcaagcagcgtacgaaagctgcgagcaaaaagaacttgaatgcgaagggggtcagcgggagcgcccacagaaccagcagccccatagagctcagagaagtcctcagcaacaaccgtcgagactccatagaccacaaaaccaggagcctcagtcgcaggccgctcacggcccacgagggctgaaaggcgaaaaaggagaacctgctgtactagaaccggggatgcttgtggaaggcccgcctggccctgagggtcctgctggattgatcggtccccctggcattcaagggaaccctggtccggtgggagatccaggcgagcgcggtccaccagggagggccgggctaccaggttctgacggcgcacccggaccccccggaacatctctcatgctgccatttcgtttcggatcaggaggcggggataaaggacctgttgtggccgcacaggaggcgcaggcccaagcgatccttcagcaagcccgactcgctctcagaggtccaccgggccccatggggtacacagggaggcctggcccacttggccaacctggcagccccgggttgaaaggcgaaagtggagacttgggcccacaggggcccaggggcccacaggggttgaccggcccccctggtaaagccggcaggcgcgggagagccggagccgacggagccaggggaatgcccggggatcccggagtcaaaggcgacagaggattcgacggcttaccggggttgcccggcgaaaaaggacaccgcggtgatactggcgcacagggccttcccggcccaccaggagaggacggagaaagaggagatgacggagaaatcgggccgcggggacttcccggcgagtctggcccacggggtctgttggggccgaagggcccacctgggattcctgggcctcctggggttcgggggatggacggtcctcaaggcccaaaaggcagtcttgggccccaaggtgagccaggtccgcccggccagcagggtacaccgggaactcagggcctgcccggaccccagggggcaattgggccccatggcgagaagggcccgcagggcaaacccggtctgccaggcatgccaggttctgatggtccacctggacatcccggcaaggagggaccccctggaacaaaggggaaccagggcccaagcggccctcagggccccttgggctaccctggaccaagaggggttaaaggcgtggacggaatacgtggcttaaaaggccacaagggggagaagggcgaggatgggtttcctggattcaaaggagatatcggcgtgaaaggcgacagaggtgaggtcggagtgcctggtagcaggggcgaggatggccccgagggccccaaaggtaggacgggacccactggcgatccagggccaccgggactaatgggcgaaaaaggtaaacttggcgtacctggcctgcctggatatccgggtcgacagggtcccaaagggtccctaggctttcctggattcccgggtgcaagcggagaaaaaggcgctagaggtttgtctggcaaatccggacctaggggtgagagggggcctaccggcccccggggacagcggggtccacgaggtgccacaggaaagtctggcgccaagggcacctcggggggggacggacctcatggcccaccaggagagcgggggctgccagggccccagggccccaatggctttcctggaccaaaggggcctcctgggccccctggcaaggatgggctccctgggcatccaggacagcggggcgaggtcggattccagggcaagactggccctcccggtccacccggcgtggtgggaccgcagggcgctgccggcgagaccgggccaatgggtgagcgcggccacccagggccgccaggccctcccggagagcaagggctgccaggcaccgccggaaaagaagggactaagggagaccctggcccgcctggcgcccctggtaaagatggacctgcaggactccggggattccccggcgaacgtggtctgcccgggactgcgggcggcccgggcctgaaaggcaacgagggacccagcggcccacccgggcctgctggttctcccggggaaaggggggcagccggaagtgggggcccaattggaccccctggtaggcccgggccccagggaccacccggagccgctggggagaaaggagtacctggcgagaaaggtcccatcggtccaacggggagagatggtgtccagggtccagtaggactgcccggtccagcagggcctcccggggtcgctggcgaggacggggataaaggagaggtaggcgatcccggccaaaaagggacaaagggtaacaagggggagcatggccccccggggccgcctgggcccatcggtccagtaggccaacccggggccgctggggcagacggcgagcccggggcaagaggcccacaaggccatttcggcgccaaaggcgacgagggtactcgtggctttaatggcccgcctggccccatcggcctgcaagggctgcctggtccaagcggcgagaaaggagaaaccggggatgttggcccgatgggaccccctggaccccccggaccccgagggcccgcaggccctaatggcgcagatgggccccaggggccacccggtggagtgggaaacctcggaccaccaggcgaaaagggggagccgggagagagcgggagcccaggaatccaaggtgaacctggtgtcaaagggccacggggggagcgtggtgaaaagggggagtcaggtcagcctggggagcccggcccccctggacctaagggaccaaccggcgacgatgggccaaagggcaatccggggcctgttggattccccggggatcccggccctcccggggaggggggcccccgcggacaggatggagctaaaggtgaccgtggggaggatggcgagccaggtcagccaggttccccggggcctactggggaaaacggcccacccgggcctctaggcaagcgggggccagccggtagtccaggaagcgaagggaggcaaggaggaaaaggagctaaaggcgaccccggggctattggggcgcccggtaaaactggtcctgttggacccgctggcccagctggcaagcccggccctgacggtttgagaggcttgccgggaagcgtcggacagcaggggcggcccggggccactggccaggccggaccacctggacccgtcggccctccaggtctccccgggttacgcggcgacgccggtgccaagggggagaagggacacccgggattgatcggtctgataggcccccctggagagcagggggagaagggagatcgtggcctgcctgggccgcagggctcaccaggacaaaagggtgagatggggattcccggcgctagcggcccaatcggcccaggcggacccccgggtctgcctggcccagcaggcccaaagggagctaaaggcgctacaggacctgggggtcctaaaggcgagaaaggtgtgcagggtcctccagggcacccaggacctcctggcgaggtgatccagccacttcctatccaaatgcccaaaaaaacaagacgctctgttgatggcagtcgccttatgcaggaagacgaggcaatccccactgggggagcaccaggctcaccgggtggcctggaggaaattttcggatccctggactcccttagggaggaaatcgaacaaatgagaagaccgaccgggacacaggattcacccgccaggacatgccaagaccttaagctatgccaccccgagctcccagacggggagtattgggtggacccaaaccagggttgtgctcgagacgcttttcgagttttctgcaactttaccgccgggggcgaaacgtgcgtcacacccagagacgatgttacccagttctcatatgtggactccgagggatcccctgtgggggtggtacaactgacctttctgagactgttgagcgtctcagcacaccaagacgtgtcctatccatgttccggtgctgcgagagacggaccgctgcgcctgaggggggctaatgaagacgagctttcacccgaaacgagcccctatgtcaaggagttccgcgatggctgccagacacagcagggaaggacagtcctggaggtacggacccctgtattggagcagctaccggttctcgacgcgagcttcagcgacctaggagcccccccacgtcgaggaggggtcctcctcggccctgtgtgcttcatggggtag

SEQ ID NO: 232439 - DNA, 4890 bp, Artificial Sequence
  derived and/or modified sequence
atggagcggtgcagccggtgccaccggctgctgctgctgctgcccctggtacttgggttgtccgcagctcccggatgggcaggcgctccccctgtggatgttcttcgcgcccttagattcccatcattgcctgatggagtcagaagggcgaagggcatttgccccgccgacgtggcttacagagttgcgaggcctgcccagcttagcgctcctacacgccaattattccctggtggattccctaaggacttttcactgctcacggtggtccgcacccgcccagggctgcaagccccgctgttgaccttgtattcagctcagggcgttcgtcagttgggattggagctcggcaggcctgtccggtttctctatgaggaccagactggccggccgcagccaccttcacagccagtctttcgagggctctccctagcagatggtaagtggcaccgcgtggctgtggcagtcaagggccagtctgtcaccctcatcgtggactgcaaaaagcgggtgacccgtccgctcccccggagtgcccggccggtgctggacacccacggagtgattatttttggggcccgtattctggatgaggaggtgtttgagggcgacgtgcaggaactggccatcgtgccaggcgtgcaggcggcatatgaatcttgcgagcagaaggagctggagtgcgagggcggccagagagaacggccacagaaccagcaaccgcacagagcccagcgctcgcctcagcagcaaccttctcgcctgcaccgtcctcagaaccaggagccccagagtcaagccgctcacgggcctaggggactgaaaggcgaaaaaggtgaacctgccgtgcttgagcctggcatgctggtggaaggtcctcctgggcctgagggccctgcaggcctgatcggaccgccaggtatccagggaaatccgggcccagtcggggatcctggagagagaggacccccgggtagggcaggactgcccggcagcgacggggcaccaggtccgcctggaactagtctcatgcttccctttcgttttggctctggcggaggagataagggtccggtcgtagccgcccaagaagcgcaggcccaagcgatcctccagcaggcccggctcgccctcaggggacccccaggacccatgggatataccggccgccccgggcccctgggccagcccggatctcctgggttgaaaggcgagtcaggggacctgggaccccagggccctcggggaccccagggccttacagggcccccaggcaaagctgggagacgtggcagggcaggcgccgatggcgcaagaggcatgcctggagaccccggcgtcaagggtgaccgtggcttcgatggcctccccggacttcccggcgagaagggccatcgaggggacaccggcgcccagggccttcccggcccgccaggagaagatggggaacgcggggacgatggagagataggacctcgcggactgcccggagaatctggtccacgcggcctgctcgggcctaaggggccaccaggcatccctggccctcccggggtccgggggatggacgggccccaggggcctaaaggatctctgggtccacagggcgagcctgggccacctggccagcaaggcacaccagggacacaagggctgccaggtccccagggcgccattgggcctcacggtgagaagggcccacaaggtaagcccggactgcccggcatgcctggatctgatggacccccagggcaccccggcaaggaggggcctcctggaacaaaggggaatcagggccccagcggaccgcaagggcctctggggtatccaggtccgagaggagtcaagggggttgacgggatccgtggcctcaaaggacataagggggaaaagggagaagacggcttccctggtttcaagggggacatcggagtgaagggagaccgcggggaggttggagtccccggctctagaggggaggacgggccagagggtccgaagggtcgcacaggaccaacaggcgatcctggtcctcccgggctgatgggggagaaagggaagctgggggtccctggactgccaggctatcccggtaggcagggtcctaagggttcgctggggttcccagggttccctggcgcctccggcgagaaaggcgctcggggcctatcaggtaagagtggccctaggggtgagagagggccaactggaccgcgaggccagagaggcccgaggggagcaacaggaaagtctggggccaagggaacaagcggcggcgacgggcctcacggccctccaggcgagagggggctgcccggtccccagggtcccaatggatttcctggtcctaaaggcccacctggtcctcccggaaaggatggacttccaggccatcccggccagcgtggagaggtaggatttcaggggaaaaccgggcctccggggcctcctggcgtcgtgggaccccaaggcgcagcgggagaaacagggccaatgggcgagcgcgggcatccaggaccccctggcccgcccggggaacagggcctacccgggactgctggaaaagagggtaccaaaggggacccaggccctcccggcgcccctggtaaggacggcccagctggactccgtggatttcccggcgagcggggactgcctggcaccgctggcgggccaggccttaagggtaacgaggggccaagcgggccgcccggtccagcaggcagcccaggagaaagaggcgccgctgggagcgggggacctattgggccgcctggtaggccaggtccgcaaggaccccccggcgcggctggagaaaagggcgtgcctggcgagaaaggcccaatcgggccaaccggccgcgatggagtacaggggcccgtcggtctacccggtcccgccgggcctcccggggtggctggcgaggacggtgataagggagaggtgggcgacccaggacagaaaggcaccaagggaaacaagggcgaacacggaccacccggtcctccaggcccaatcggacctgtgggtcagcccggcgctgccggggccgacggtgagcctggcgcccgcggaccccaaggacacttcggggcaaaaggagacgaaggaacacgggggttcaatgggccccccggccccattggcctgcagggcctcccgggcccctctggcgagaagggggagaccggggatgttggccctatgggtccgcctgggcctcctggtccaaggggccctgcgggtcctaacggggccgatggaccccagggcccgcctgggggtgtaggaaatctcggcccaccgggggagaaaggagagcccggtgagagcggctctcccggcatccagggtgagccaggggtcaaagggccacggggcgagaggggggagaagggtgagagcgggcaacccggggagcctggaccacctggtcccaagggcccgacgggcgatgacggcccaaaggggaatccagggcccgttggcttccctggcgaccccggccctccaggggagggcgggcccagaggacaggacggagcgaaaggggatagaggcgaggacggggaacccggccagcccggcagtcctggtcccaccggtgaaaacggcccccccgggccgctcggtaagcgcgggccggccgggtcacctggcagtgaggggcggcaaggaggcaagggcgccaagggcgatcccggggctatcggggcacccgggaaaactggtcctgtcggacctgccggcccagctggcaagcccggacctgatggtctgaggggcctgcctggctccgttggccagcaaggaaggcccggcgccacaggccaggcaggcccaccagggcctgttggacctcctgggctacccggcttgcggggtgacgccggggccaagggcgagaagggtcatcccgggctgatcggtttaatcgggccccccggggaacaaggcgaaaaaggtgataggggcttgcctggacctcaaggcagccccgggcagaagggggaaatgggaatccccggggcttcgggacccatcggtcccgggggccctcctggtctccccgggcccgccggtcccaagggggcgaagggtgccaccggtccaggtggccccaaaggggaaaaaggggtgcagggtcctcctggtcaccccggcccccccggcgaggtgatccagccacttcctattcagatgcctaagaagacccgccggtccgtggacggctccaggctgatgcaggaagacgaagccatacctaccgggggcgctcctgggtctcccggaggactggaagagatctttgggtctctggatagcctgcgcgaggagattgaacagatgcgccggccgacggggacacaggatagccccgcaagaacttgccaggatctcaagctgtgccaccctgagttgccagatggggagtattgggtggatcccaaccaagggtgtgcacgcgacgcctttagggtgttttgcaatttcactgcgggtggagagacatgtgtaactcccagagacgatgtcacccagttttcatacgtagattctgaggggagtcccgtaggggttgtgcagcttacttttttgcgactcctctctgtcagcgcccatcaggacgtgagctacccatgttcaggagctgcgagagatggacctctgcgactccgaggtgccaatgaggatgaactctcccctgaaacttctccatatgtgaaggaattccgggatgggtgccaaacacagcagggacgcacagtgctggaggtgcggactcccgtcctagagcagttacctgtactcgatgcatcgttctcggacctaggggcccctcctcgccgtgggggcgtgttgctaggtcctgtgtgttttatggggtag

SEQ ID NO: 232440 - DNA, 6104 bp, Artificial Sequence
  derived and/or modified sequence
cacacagaagcggcagccaccgaggagggagcagtgccgggagccccgacggcgccttgctgcatggagctgggccgctgacagctgtcgctgcccgcagcctctgacctccctgggaccccggcgtctgaggctcatagtctgctccctgtcttctgtcagcctcagggcatccagcgtctcaggccgacctgggtccctgggacccggcgtttcggcttctcagccatggagcggtgcagccgctgccatcgcctcctcctcctcctacctctggtgctggggctgagcgcggccccaggctgggcaggtgcaccccctgtggatgtgctccgggccctgaggttcccctccctccctgatggtgtccggagagcgaaaggcatctgtccagctgatgtggcctaccgagtggcacgacctgcccagctcagtgcacccactcgccagcttttcccaggaggatttcccaaagatttctctctgctgactgttgtccggacccgccctggtctccaagctcccctcctgactctctacagtgcccagggtgtccgacagctgggcctggagctgggccgacctgtccgcttcctgtatgaagaccagactgggcggcctcaacctccctctcagccagtcttccgaggcctcagcctagcagatggcaagtggcaccgtgtggctgtggctgtgaagggccagtctgtcaccctcattgttgactgcaagaagcgagtcacccggcctctcccccgaagtgctcgtccagtattggacacccatggagtgatcatctttggtgcccgtattctggatgaagaagtctttgagggtgatgtccaggagctggccattgtcccaggggtccaggcagcctatgaatcatgtgaacagaaggagctggaatgcgaggggggccagagggaaagaccccaaaaccaacagcctcacagagcccagagatctccacagcagcaaccatcaagacttcacaggccacaaaatcaggaaccccagagccaggctgcccatggaccccgagggctgaagggagagaaaggagagcctgcagtgttggaacctggtatgctcgtggaggggccccctggcccagaaggccctgcgggattgattggtccccctggcatccaggggaacccaggcccagttggagaccctggagagaggggcccccctggccgagcagggctccctggatcagatggggctcctggtcctcctggcacatctctcatgctcccattccggtttggcagtggtgggggtgacaagggccctgtggtggcggcccaggaggctcaggcccaggcgatcctgcagcaggcgaggctggcgctccgtggaccccctggccccatgggatacacagggcgccctggacccttgggccaacctgggagccctggcctgaaaggagagtctggagacttaggacctcagggccccagaggacctcagggcctcacaggccctcctggcaaggctgggcgaaggggccgggcaggtgctgatggagcccgagggatgcctggagatcctggagtgaagggtgaccgaggttttgatggactcccagggctccctggagagaagggccataggggtgatactggtgcccagggccttcctggtccccctggtgaggatggagagaggggagatgacggggagattgggcctcgagggctgcctggagagtcgggacctcgaggtctccttggccccaaaggcccacctggtattcctggaccccctggcgtccgaggcatggatggtccccagggccccaaagggagcttgggaccccagggagagccaggacctcctggacaacagggcacccctgggacccagggtcttcccgggccccagggtgccatcggccctcatggagagaagggtcctcaagggaagccagggctccccggcatgcctggctcagacggacccccgggtcacccagggaaggaaggtccccctggaaccaaaggaaaccagggtccctctggacctcagggacctctaggatacccaggacctcgaggggtcaagggtgtggacggaattcggggtctgaagggtcataagggtgagaagggtgaggatggctttcctgggttcaaaggtgacataggcgtgaaaggtgacaggggcgaagttggagtccctggttccaggggagaggatggtcctgaggggccaaagggacgcactggaccgactggagaccctgggcccccagggctcatgggcgagaagggcaagctgggtgttcctggtctgcctggctatcctggacgtcagggacccaaggggtccctaggatttcctggctttcctggtgccagtggagagaagggagcccggggcctgtcggggaagtcagggcctcggggagaacggggccccacgggtccacggggtcagcggggaccccgaggtgccactgggaagtctggagctaagggaacatctggtggtgatggcccccatgggccccctggagagaggggcctccctggacctcagggtcccaacgggtttcctggaccgaaaggacccccgggcccccctgggaaggacgggctgccgggacacccaggccaaagaggagaagtgggtttccaagggaagaccggcccccctggtcctccaggagtggtgggacctcagggagcagcaggagaaaccggccctatgggggagagaggtcacccaggccccccggggccccctggagagcagggactacctgggacagctggaaaagaaggaacaaagggtgaccctggtccccctggggccccagggaaggatggtcctgctggtctgaggggattcccaggagagagaggcctcccaggcactgctggtggacctggtttgaaggggaatgaaggtccgtctggcccccctggccctgcaggctcccctggggaacgaggtgcagcaggatcagggggacccattggtccgccagggcgcccaggcccgcagggtccccctggagcagcaggagagaaaggtgtcccaggtgagaagggccccattggcccaactggccgagatggagtgcagggtcctgtggggcttcctggtcctgctgggcctccaggtgtggctggagaggatggagacaagggtgaggtgggggaccccggacagaagggcaccaaagggaacaagggtgaacatggccctcctggaccccctggacccattggtcctgtggggcagcctggagcagcgggagcagatggggagcctggagctcggggaccccagggacactttggagccaaaggtgatgaaggaacaagaggattcaatgggcccccaggacccattggcctacagggtttgccaggcccctctggggagaagggagaaacaggagatgtgggtcctatgggaccacctggccccccaggacctcgaggtccagctggacccaatggcgctgatggcccacaaggtcccccaggaggtgttgggaacctgggtccccctggagagaagggggaaccaggagagtcaggatctccagggatccagggcgagccaggtgtcaagggtccacgcggggaacgtggagagaaaggagagtcggggcagccaggagagccagggccaccagggcctaaaggccccacaggcgatgatggccccaaagggaaccctggtcctgttggttttcctggtgaccctggcccccctggagaaggtggccctcggggccaggatggtgctaagggtgaccgaggcgaggatggtgagccaggacagcctggatcccctggtcccaccggggagaatggacccccagggccacttggaaagcgaggtcctgctggctcgcctggttccgaggggcgacaaggagggaagggagccaagggagatcctggcgctataggtgccccggggaagacaggcccggtgggtcctgcaggcccagcagggaaacctggccctgatggtctgagggggctcccaggctcagtgggtcagcaaggccgacctggagctacaggccaggctgggcccccaggtcctgtgggacccccagggctgcctggtctccggggcgatgctggagccaagggagagaagggccacccaggtctcattggactgattgggcccccgggtgagcagggagagaagggagatcggggacttcctgggcctcagggctcccctgggcagaagggtgagatgggtatcccaggagcatccggccccattggtcctggaggtccccccggcctccccggacctgctggccccaaaggagccaaaggagccacaggcccaggcggacccaagggagagaagggtgtgcagggccctccaggacacccgggtcccccaggcgaggtgatccagccactgcccattcagatgcccaagaagactcggcgctcggtggatggaagccgtctgatgcaggaagatgaggccataccgaccgggggagcccccggcagtcctggggggctggaggagatctttggctcactcgactccctgcgggaggagatcgagcagatgaggcggccaacagggacccaggacagccctgctcgcacctgccaggacctgaagctgtgccacccagagcttcccgatggagagtactgggtcgaccccaaccagggctgtgctcgggatgccttccgagttttctgcaacttcacagcagggggtgagacctgtgtgacgcctagggatgacgtcacgcagttctcttacgtggactcagagggctccccagtgggtgtggtccagctcaccttcctgcggctgctcagcgtctcagcccaccaggacgtctcctacccctgctctggagcagcccgtgacggtcccctgagactccgtggggccaatgaggatgagctgagcccggagactagcccctatgtcaaagaattcagagatggctgccagacacagcaaggccggacggtgctggaggtgcgaacgcctgtgctggagcagctgccagtgctggatgcctccttctcagacctgggagccccaccgaggcggggaggggtgctgctggggcctgtctgcttcatgggataggaccgtctctgtctgatcctgtccattcggaaccaggcccacctggaatcccacaacatcagctctgtgccacctcccaagagggctcctcactatctagggagccctgggccagggcgtggagagccctcagtcggggcaggccaggggaggggtgaagtggttgcctggacaccccacgggaggagtggcatctggggctcttggccctcccacctggagcctgttacccgttagagagctgagacccttatttaaaactcacctcccaatcaccccaaacaaatggaagagaagagaaaggacatggcgtattttgtatttaaaagtaattgtattaattatttaaagtgtggaaagcaaaataacaaaaaagagaaacgccaacaaaaatcagcagatgttgaagacaggggtctcgggggtgggctccggcacccacatcctggagtcaggactttcctcagtgactgtgtgtaggggggtttcagggctgaaccccacctccctcccaccttcctcccacctcacctgtcgcacccactgtgaaagttggaatatgtggtctccctggcctcagggctctgactctgccagggtggggctctctaacccacaggtgttggctgcctggcccatgtgcccactgtctcttccacttggtctgggtttggcaggcactgcctgctacttgagggccaggatgctcccccagggaagaaacggaatagtgtggggtgtgtgcagggctgcatcccgcagatggctggaatattaaaattcttctatattggctggtaaattgccatggccctgagccactgagtatgttcattgccacccctgtccctcccctgggcacccctcactttccctgatcctgcaattaaagggttaatgtgtggcatatggaagggactcccaggaccctgtgcccagcttccatgctgactgatggttaaataatgtgattgtctcctcccagg

SEQ ID NO: 232441 - DNA, 6104 bp, Artificial Sequence
  derived and/or modified sequence
cacacagaagcggcagccaccgaggagggagcagtgccgggagccccgacggcgccttgctgcatggagctgggccgctgacagctgtcgctgcccgcagcctctgacctccctgggaccccggcgtctgaggctcatagtctgctccctgtcttctgtcagcctcagggcatccagcgtctcaggccgacctgggtccctgggacccggcgtttcggcttctcagccatggagcggtgcagccgctgccatcgcctcctcctcctcctacctctggtgctggggctgagcgcggccccaggctgggcaggtgcaccccctgtggatgtgctccgggccctgaggttcccctccctccctgatggtgtccggagagcgaaaggcatctgtccagctgatgtggcctaccgagtggcacgacctgcccagctcagtgcacccactcgccagcttttcccaggaggatttcccaaagatttctctctgctgactgttgtccggacccgccctggtctccaagctcccctcctgactctctacagtgcccagggtgtccgacagctgggcctggagctgggccgacctgtccgcttcctgtatgaagaccagactgggcggcctcaacctccctctcagccagtcttccgaggcctcagcctagcagatggcaagtggcaccgtgtggctgtggctgtgaagggccagtctgtcaccctcattgttgactgcaagaagcgagtcacccggcctctcccccgaagtgctcgtccagtattggacacccatggagtgatcatctttggtgcccgtattctggatgaagaagtctttgagggtgatgtccaggagctggccattgtcccaggggtccaggcagcctatgaatcatgtgaacagaaggagctggaatgcgaggggggccagagggaaagaccccaaaaccaacagcctcacagagcccagagatctccacagcagcaaccatcaagacttcacaggccacaaaatcaggaaccccagagccaggctgcccatggaccccgagggctgaagggagagaaaggagagcctgcagtgttggaacctggtatgctcgtggaggggccccctggcccagaaggccctgcgggattgattggtccccctggcatccaggggaacccaggcccagttggagaccctggagagaggggcccccctggccgagcagggctccctggatcagatggggctcctggtcctcctggcacatctctcatgctcccattccggtttggcagtggtgggggtgacaagggccctgtggtggcggcccaggaggctcaggcccaggcgatcctgcagcaggcgaggctggcgctccgtggaccccctggccccatgggatacacagggcgccctggacccttgggccaacctgggagccctggcctgaaaggagagtctggagacttaggacctcagggccccagaggacctcagggcctcacaggccctcctggcaaggctgggcgaaggggccgggcaggtgctgatggagcccgagggatgcctggagatcctggagtgaagggtgaccgaggttttgatggactcccagggctccctggagagaagggccataggggtgatactggtgcccagggccttcctggtccccctggtgaggatggagagaggggagatgacggggagattgggcctcgagggctgcctggagagtcgggacctcgaggtctccttggccccaaaggcccacctggtattcctggaccccctggcgtccgaggcatggatggtccccagggccccaaagggagcttgggaccccagggagagccaggacctcctggacaacagggcacccctgggacccagggtcttcccgggccccagggtgccatcggccctcatggagagaagggtcctcaagggaagccagggctccccggcatgcctggctcagacggacccccgggtcacccagggaaggaaggtccccctggaaccaaaggaaaccagggtccctctggacctcagggtcctctaggatacccaggacctcgaggggtcaagggtgtggacggaattcggggtctgaagggtcataagggtgagaagggtgaggatggctttcctgggttcaaaggtgacataggcgtgaaaggtgacaggggcgaagttggagtccctggttccaggggagaggatggtcctgaggggccaaagggacgcactggaccgactggagaccctgggcccccagggctcatgggcgagaagggcaagctgggtgttcctggtctgcctggctatcctggacgtcagggacccaaggggtccctaggatttcctggctttcctggtgccagtggagagaagggagcccggggcctgtcggggaagtcagggcctcggggagaacggggccccacgggtccacggggtcagcggggaccccgaggtgccactgggaagtctggagctaagggaacatctggtggtgatggcccccatgggccccctggagagaggggcctccctggacctcagggtcccaacgggtttcctggaccgaaaggacccctgggcccccctgggaaggacgggctgccgggacacccaggccaaagaggagaagtgggtttccaagggaagaccggcccccctggtcctccaggagtggtgggacctcagggagcagcaggagaaaccggccctatgggggagagaggtcacccaggccccccggggccccctggagagcagggactacctgggacagctggaaaagaaggaacaaagggtgaccctggtccccctggggccccagggaaggatggtcctgctggtctgaggggattcccaggagagagaggcctcccaggcactgctggtggacctggtttgaaggggaatgaaggtccgtctggcccccctggccctgcaggctcccctggggaacgaggtgcagcaggatcagggggacccattggtccgccagggcgcccaggcccgcagggtccccctggagcagcaggagagaaaggtgtcccaggtgagaagggccccattggcccaactggccgagatggagtgcagggtcctgtggggcttcctggtcctgctgggcctccaggtgtggctggagaggatggagacaagggtgaggtgggggaccccggacagaagggcaccaaagggaacaagggtgaacatggccctcctggaccccctggacccattggtcctgtggggcagcctggagcagcgggagcagatggggagcccggagctcggggaccccagggacactttggagccaaaggtgatgaaggaacaagaggattcaatgggcccccaggacccattggcctacagggtttgccaggcccctctggggagaagggagaaacaggagatgtgggtcctatgggaccacctggccccccaggacctcgaggtccagctggacccaatggcgctgatggcccacaaggtcccccaggaggtgttgggaacctgggtccccctggagagaagggggaaccaggagagtcaggatctccagggatccagggcgagccaggtgtcaagggtccacgcggggaacgtggagagaaaggagagtcggggcagccaggagagccagggccaccagggcctaaaggccccacaggcgatgatggccccaaagggaaccctggtcctgttggttttcctggtgaccctggcccccctggagaaggtggccctcggggccaggatggtgctaagggtgaccgaggcgaggatggtgagccaggacagcctggatcccctggtcccaccggggagaatggacccccagggccacttggaaagcgaggtcctgctggctcgcctggttccgaggggcgacaaggagggaagggagccaagggagatcctggcgctataggtgccccggggaagacaggcccggtgggtcctgcaggcccagcagggaaacctggccctgatggtctgagggggctcccaggctcagtgggtcagcaaggccgacctggagctacaggccaggctgggcccccaggtcctgtgggacccccagggctgcctggtctccggggcgatgctggagccaagggagagaagggccacccaggtctcattggactgattgggcccccgggtgagcagggagagaagggagatcggggacttcctgggcctcagggctcccctgggcagaagggtgagatgggtatcccaggagcatccggccccattggtcctggaggtccccccggcctccccggacctgctggccccaaaggagccaaaggagccacaggcccaggcggacccaagggagagaagggtgtgcagggccctccaggacacccgggtcccccaggcgaggtgatccagccactgcccattcagatgcccaagaagactcggcgctcggtggatggaagccgtctgatgcaggaagatgaggccataccgaccgggggagcccccggcagtcctggggggctggaggagatctttggctcactcgactccctgcgggaggagatcgagcagatgaggcggccaacagggacccaggacagccctgctcgcacctgccaggacctgaagctgtgccacccagagcttcccgatggagagtactgggtcgaccccaaccagggctgtgctcgggatgccttccgagttttctgcaacttcacagcagggggtgagacctgtgtgacgcctagggatgacgtcacgcagttctcttacgtggactcagagggctccccagtgggtgtggtccagctcaccttcctgcggctgctcagcgtctcagcccaccaggacgtctcctacccctgctctggagcagcccgtgacggtcccctgagactccgtggggccaatgaggatgagctgagcccggagactagcccctatgtcaaagaattcagagatggctgccagacacagcaaggccggacggtgctggaggtgcgaacgcctgtgctggagcagctgccagtgctggatgcctccttctcagacctgggagccccaccgaggcggggaggggtgctgctggggcctgtctgcttcatgggataggaccgtctctgtctgatcctgtccattcggaaccaggcccacctggaatcccacaacatcagctctgtgccacctcccaagagggctcctcactatctagggagccctgggccagggcgtggagagccctcagtcggggcaggccaggggaggggtgaagtggttgcctggacaccccacgggaggagtggcatctggggctcttggccctcccacctggagcctgttacccgttagagagctgagacccttatttaaaactcacctcccaatcaccccaaacaaatggaagagaagagaaaggacatggcgtattttgtatttaaaagtaattgtattaattatttaaagtgtggaaagcaaaataacaaaaaagagaaacgccaacaaaaatcagcagatgttgaagacaggggtctcgggggtgggctccggcacccacatcctggagtcaggactttcctcagtgactgtgtgtaggggggtttcagggctgaaccccacctccctcccaccttcctcccacctcacctgtcgcacccactgtgaaagttggaatatgtggtctccctggcctcagggctctgactctgccagggtggggctctctaacccacaggtgttggctgcctggcccatgtgcccactgtctcttccacttggtctgggtttggcaggcactgcctgctacttgagggccaggatgctcccccagggaagaaacggaatagtgtggggtgtgtgcagggctgcatcccgcagatggctggaatattaaaattcttctatattggctggtaaattgccatggccctgagccactgagtatgttcattgccacccctgtccctcccctgggcacccctcactttccctgatcctgcaattaaagggttaatgtgtggcatatggaagggactcccaggaccctgtgcccagcttccatgctgactgatggttaaataatgtgattgtctcctcccagg

SEQ ID NO: 232442 - DNA, 6104 bp, Artificial Sequence
  derived and/or modified sequence
cacacagaagcggcagccaccgaggagggagcagtgccgggagccccgacggcgccttgctgcatggagctgggccgctgacagctgtcgctgcccgcagcctctgacctccctgggaccccggcgtctgaggctcatagtctgctccctgtcttctgtcagcctcagggcatccagcgtctcaggccgacctgggtccctgggacccggcgtttcggcttctcagccatggagcggtgcagccgctgccatcgcctcctcctcctcctacctctggtgctggggctgagcgcggccccaggctgggcaggtgcaccccctgtggatgtgctccgggccctgaggttcccctccctccctgatggtgtccggagagcgaaaggcatctgtccagctgatgtggcctaccgagtggcacgacctgcccagctcagtgcacccactcgccagcttttcccaggaggatttcccaaagatttctctctgctgactgttgtccggacccgccctggtctccaagctcccctcctgactctctacagtgcccagggtgtccgacagctgggcctggagctgggcccacctgtccgcttcctgtatgaagaccagactgggcggcctcaacctccctctcagccagtcttccgaggcctcagcctagcagatggcaagtggcaccgtgtggctgtggctgtgaagggccagtctgtcaccctcattgttgactgcaagaagcgagtcacccggcctctcccccgaagtgctcgtccagtattggacacccatggagtgatcatctttggtgcccgtattctggatgaagaagtctttgagggtgatgtccaggagctggccattgtcccaggggtccaggcagcctatgaatcatgtgaacagaaggagctggaatgcgaggggggccagagggaaagaccccaaaaccaacagcctcacagagcccagagatctccacagcagcaaccatcaagacttcacaggccacaaaatcaggaaccccagagccaggctgcccatggaccccgagggctgaagggagagaaaggagagcctgcagtgttggaacctggtatgctcgtggaggggccccctggcccagaaggccctgcgggattgattggtccccctggcatccaggggaacccaggcccagttggagaccctggagagaggggcccccctggccgagcagggctccctggatcagatggggctcctggtcctcctggcacatctctcatgctcccattccggtttggcagtggtgggggtgacaagggccctgtggtggcggcccaggaggctcaggcccaggcgatcctgcagcaggcgaggctggcgctccgtggaccccctggccccatgggatacacagggcgccctggacccttgggccaacctgggagccctggcctgaaaggagagtctggagacttaggacctcagggccccagaggacctcagggcctcacaggccctcctggcaaggctgggcgaaggggccgggcaggtgctgatggagcccgagggatgcctggagatcctggagtgaagggtgaccgaggttttgatggactcccagggctccctggagagaagggccataggggtgatactggtgcccagggccttcctggtccccctggtgaggatggagagaggggagatgacggggagattgggcctcgagggctgcctggagagtcgggacctcgaggtctccttggccccaaaggcccacctggtattcctggaccccctggcgtccgaggcatggatggtccccagggccccaaagggagcttgggaccccagggagagccaggacctcctggacaacagggcacccctgggacccagggtcttcccgggccccagggtgccatcggccctcatggagagaagggtcctcaagggaagccagggctccccggcatgcctggctcagacggacccccgggtcacccagggaaggaaggtccccctggaaccaaaggaaaccagggtccctctggacctcagggacctctaggatacccaggacctcgaggggtcaagggtgtggacggaattcggggtctgaagggtcataagggtgagaagggtgaggatggctttcctgggttcaaaggtgacataggcgtgaaaggtgacaggggcgaagttggagtccctggttccaggggagaggatggtcctgaggggccaaagggacgcactggaccgactggagaccctgggcccccagggctcatgggcgagaagggcaagctgggtgttcctggtctgcctggctatcctggacgtcagggacccaaggggtccctaggatttcctggctttcctggtgccagtggagagaagggagcccggggcctgtcggggaagtcagggcctcggggagaacggggccccacgggtccacggggtcagcggggaccccgaggtgccactgggaagtctggagctaagggaacatctggtggtgatggcccccatgggccccctggagagaggggcctccctggacctcagggtcccaacgggtttcctggaccgaaaggacccccgggcccccctgggaaggacgggctgccgggacacccaggccaaagaggagaagtgggtttccaagggaagaccggcccccctggtcctccaggagtggtgggacctcagggagcagcaggagaaaccggccctatgggggagagaggtcacccaggccccccggggccccctggagagcagggactacctgggacagctggaaaagaaggaacaaagggtgaccctggtccccctggggccccagggaaggatggtcctgctggtctgaggggattcccaggagagagaggcctcccaggcactgctggtggacctggtttgaaggggaatgaaggtccgtctggcccccctggccctgcaggctcccctggggaacgaggtgcagcaggatcagggggacccattggtccgccagggcgcccaggcccgcagggtccccctggagcagcaggagagaaaggtgtcccaggtgagaagggccccattggcccaactggccgagatggagtgcagggtcctgtggggcttcctggtcctgctgggcctccaggtgtggctggagaggatggagacaagggtgaggtgggggaccccggacagaagggcaccaaagggaacaagggtgaacatggccctcctggaccccctggacccattggtcctgtggggcagcctggagcagcgggagcagatggggagcctggagctcggggaccccagggacactttggagccaaaggtgatgaaggaacaagaggattcaatgggcccccaggacccattggcctacagggtttgccaggcccctctggggagaagggagaaacaggagatgtgggtcctatgggaccacctggccccccaggacctcgaggtccagctggacccaatggcgctgatggcccacaaggtcccccaggaggtgttgggaacctgggtccccctggagagaagggggaaccaggagagtcaggatctccagggatccagggcgagccaggtgtcaagggtccacgcggggaacgtggagagaaaggagagtcggggcagccaggagagccagggccaccagggcctaaaggccccacaggcgatgatggccccaaagggaaccctggtcctgttggttttcctggtgaccctggcccccctggagaaggtggccctcggggccaggatggtgctaagggtgaccgaggcgaggatggtgagccaggacagcctggatcccctggtcccaccggggagaatggacccccagggccacttggaaagcgaggtcctgctggctcgcctggttccgaggggcgacaaggagggaagggagccaagggagatcctggcgctataggtgccccggggaagacaggcccggtgggtcctgcaggcccagcagggaaacctggccctgatggtctgagggggctcccaggctcagtgggtcagcaaggccgacctggagctacaggccaggctgggcccccaggtcctgtgggacccccagggctgcctggtctccggggcgatgctggagccaagggagagaagggccacccaggtctcattggactgattgggcccccgggtgagcagggagagaagggagatcggggacttcctgggcctcagggctcccctgggcagaagggtgagatgggtatcccaggagcatccggccccattggtcctggaggtccccccggcctccccggacctgctggccccaaaggagccaaaggagccacaggcccaggcggacccaagggagagaagggtgtgcagggccctccaggacacccgggtcccccaggcgaggtgatccagccactgcccattcagatgcccaagaagactcggcgctcggtggatggaagccgtctgatgcaggaagatgaggccataccgaccgggggagcccccggcagtcctggggggctggaggagatctttggctcactcgactccctgcgggaggagatcgagcagatgaggcggccaacagggacccaggacagccctgctcgcacctgccaggacctgaagctgtgccacccagagcttcccgatggagagtactgggtcgaccccaaccagggctgtgctcgggatgccttccgagttttctgcaacttcacagcagggggtgagacctgtgtgacgcctagggatgacgtcacgcagttctcttacgtggactcagagggctccccagtgggtgtggtccagctcaccttcctgcggctgctcagcgtctcagcccaccaggacgtctcctacccctgctctggagcagcccgtgacggtcccctgagactccgtggggccaatgaggatgagctgagcccggagactagcccctatgtcaaagaattcagagatggctgccagacacagcaaggccggacggtgctggaggtgcgaacgcctgtgctggagcagctgccagtgctggatgcctccttctcagacctgggagccccaccgaggcggggaggggtgctgctggggcctgtctgcttcatgggataggaccgtctctgtctgatcctgtccattcggaaccaggcccacctggaatcccacaacatcagctctgtgccacctcccaagagggctcctcactatctagggagccctgggccagggcgtggagagccctcagtcggggcaggccaggggaggggtgaagtggttgcctggacaccccacgggaggagtggcatctggggctcttggccctcccacctggagcctgttacccgttagagagctgagacccttatttaaaactcacctcccaatcaccccaaacaaatggaagagaagagaaaggacatggcgtattttgtatttaaaagtaattgtattaattatttaaagtgtggaaagcaaaataacaaaaaagagaaacgccaacaaaaatcagcagatgttgaagacaggggtctcgggggtgggctccggcacccacatcctggagtcaggactttcctcagtgactgtgtgtaggggggtttcagggctgaaccccacctccctcccaccttcctcccacctcacctgtcgcacccactgtgaaagttggaatatgtggtctccctggcctcagggctctgactctgccagggtggggctctctaacccacaggtgttggctgcctggcccatgtgcccactgtctcttccacttggtctgggtttggcaggcactgcctgctacttgagggccaggatgctcccccagggaagaaacggaatagtgtggggtgtgtgcagggctgcatcccgcagatggctggaatattaaaattcttctatattggctggtaaattgccatggccctgagccactgagtatgttcattgccacccctgtccctcccctgggcacccctcactttccctgatcctgcaattaaagggttaatgtgtggcatatggaagggactcccaggaccctgtgcccagcttccatgctgactgatggttaaataatgtgattgtctcctcccagg

SEQ ID NO: 232443 - DNA, 6104 bp, Artificial Sequence
  derived and/or modified sequence
cacacagaagcggcagccaccgaggagggagcagtgccgggagccccgacggcgccttgctgcatggagctgggccgctgacagctgtcgctgcccgcagcctctgacctccctgggaccccggcgtctgaggctcatagtctgctccctgtcttctgtcagcctcagggcatccagcgtctcaggccgacctgggtccctgggacccggcgtttcggcttctcagccatggagcggtgcagccgctgccatcgcctcctcctcctcctacctctggtgctggggctgagcgcggccccaggctgggcaggtgcaccccctgtggatgtgctccgggccctgaggttcccctccctccctgatggtgtccggagagcgaaaggcatctgtccagctgatgtggcctaccgagtggcacgacctgcccagctcagtgcacccactcgccagcttttcccaggaggatttcccaaagatttctctctgctgactgttgtccggacccgccctggtctccaagctcccctcctgactctctacagtgcccagggtgtccgacagctgggcctggagctgggccgacctgtccgcttcctgtatgaagaccagactgggcggcctcaacctccctctcagccagtcttccgaggcctcagcctagcagatggcaagtggcaccgtgtggctgtggctgtgaagggccagtctgtcaccctcattgttgactgcaagaagcgagtcacccggcctctcccccgaagtgctcgtccagtattggacacccatggagtgatcatctttggtgcccgtattctggatgaagaagtctttgagggtgatgtccaggagctggccattgtcccaggggtccaggcagcctatgaatcatgtgaacagaaggagctggaatgcgaggggggccagagggaaagaccccaaaaccaacagcctcacagagcccagagatctccacagcagcaaccatcaagacttcacaggccacaaaatcaggaaccccagagccaggctgcccatggaccccgagggctgaagggagagaaaggagagcctgcagtgttggaacctggtatgctcgtggaggggccccctggcccagaaggccctgcgggattgattggtccccctggcatccaggggaacccaggcccagttggagaccctggagagaggggcccccctggccgagcagggctccctggatcagatggggctcctggtcctcctggcacatctctcatgctcccattccggtttggcagtggtgggggtgacaagggccctgtggtggcggcccaggaggctcaggcccaggcgatcctgcagcaggcgaggctggcgctccgtggaccccctggccccatgggatacacagggcgccctggacccttgggccaacctgggagccctggcctgaaaggagagtctggagacttaggacctcagggccccagaggacctcagggcctcacaggccctcctggcaaggctgggcgaaggggccgggcaggtgctgatggagcccgagggatgcctggagatcctggagtgaagggtgaccgaggttttgatggactcccagggctccctggagagaagggccataggggtgatactggtgcccagggccttcctggtccccctggtgaggatggagagaggggagatgacggggagattgggcctcgagggctgcctggagagtcgggacctcgaggtctccttggccccaaaggcccacctggtattcctggaccccctggcgtccgaggcatggatggtccccagggccccaaagggagcttgggaccccagggagagccaggacctcctggacaacagggcacccctgggacccagggtcttcccgggccccagggtgccatcggccctcatggagagaagggtcctcaagggaagccagggctccccggcatgcctggctcagacggacccccgggtcacccagggaaggaaggtccccctggaaccaaaggaaaccagggtccctctggacctcagggacctctaggatacccaggacctcgaggggtcaagggtgtggacggaattcggggtctgaagggtcataagggtgagaagggtgaggatggctttcctgggttcaaaggtgacataggcgtgaaaggtgacaggggcgaagttggagtccctggttccaggggagaggatggtcctgaggggccaaagggacgcactggaccgactggagaccctgggcccccagggctcatgggcgagaagggcaagctgggtgttcctggtctgcctggctatcctggacgtcagggacccaaggggtccctaggatttcctggctttcctggtgccagtggagagaagggagcccggggcctgtcggggaagtcagggcctcggggagaacggggccccacgggtccacggggtcagcggggaccccgaggtgccactgggaagtctggagctaagggaacatctggtggtgatggcccccatgggccccctggagagaggggcctccctggacctcagggtcccaacgggtttcctggaccgaaaggacccccgggcccccctgggaaggacgggctgccgggacacccaggccaaagaggagaagtgggtttccaagggaagaccggcccccctggtcctccaggagtggtgggacctcagggagcagcaggagaaaccggccctatgggggagagaggtcacccaggccccccggggccccctggagagcagggactacctgggacagctggaaaagaaggaacaaagggtgaccctggtccccctggggccccagggaaggatggtcctgctggtctgaggggattcccaggagagagaggcctcccaggcactgctggtggacctggtttgaaggggaatgaaggtccgtctggcccccctggccctgcaggctcccctggggaacgaggtgcagcaggatcagggggacccattggtccgccagggcgcccaggcccgcagggtccccctggagcagcaggagagaaaggtgtcccaggtgagaagggccccattggcccaactggccgagatggagtgcagggtcctgtggggcttcctggtcctgctgggcctccaggtgtggctggagaggatggagacaagggtgaggtgggggaccccggacagaagggcaccaaagggaacaagggtgaacatggccctcctggaccccctggacccattggtcctgtggggcagcctggagcagcgggagcagatggggagcccggagctcggggaccccagggacactttggagccaaaggtgatgaaggaacaagaggattcaatgggcccccaggacccattggcctacagggtttgccaggcccctctggggagaagggagaaacaggagatgtgggtcctatgggaccacctggccccccaggacctcgaggtccagctggacccaatggcgctgatggcccacaaggtcccccaggaggtgttgggaacctgggtccccctggagagaagggggaaccaggagagtcaggatctccagggatccagggcgagccaggtgtcaagggtccacgcggggaacgtggagagaaaggagagtcggggcagccaggagagccagggccaccagggcctaaaggccccacaggcgatgatggccccaaagggaaccctggtcctgttggttttcctggtgaccctggcccccctggagaaggtggccctcggggccaggatggtgctaagggtgaccgaggcgaggatggtgagccaggacagcctggatcccctggtcccaccggggagaatggacccccagggccacttggaaagcgaggtcctgctggctcgcctggttccgaggggcgacaaggagggaagggagccaagggagatcctggcgctataggtgccccggggaagacaggcccggtgggtcctgcaggcccagcagggaaacctggccctgatggtctgagggggctcccaggctcagtgggtcagcaaggccgacctggagctacaggccaggctgggcccccaggtcctgtgggacccccagggctgcctggtctccggggcgatgctggagccaagggagagaagggccacccaggtctcattggactgattgggcccccgggtgagcagggagagaagggagatcggggacttcctgggcctcagggctcccctgggcagaagggtgagatgggtatcccaggagcatccggccccattggtcctggaggtccccccggcctccccggacctgctggccccaaaggagccaaaggagccacaggcccaggcggacccaagggagagaagggtgtgcagggccctccaggacacccgggtcccccaggcgaggtgatccagccactgcccattcagatgcccaagaagactcggcgctcggtggatggaagccgtctgatgcaggaagatgaggccataccgaccgggggagcccccggcagtcctggggggctggaggagatctttggctcactcgactccctgcgggaggagatcgagcagatgaggcggccaacagggacccaggacagccctgctcgcacctgccaggacctgaagctgtgccacccagagcttcccgatggagagtactgggtcgaccccaaccagggctgtgctcgggatgccttccgagttttctgcaacttcacagcagggggtgagacctgtgtgacgcctagggatgacgtcacgcagttctcttacgtggactcagagggctccccagtgggtgtggtccagctcaccttcctgcggctgctcagcgtctcagcccaccaggacgtctcctacccctgctctggagcagcccgtgacggtcccctgagactccgtggggccaatgaggatgagctgagcccggagactagcccctatgtcaaagaattcagagatggctgccagacacagcaaggccggacggtgctggaggtgcgaacgcctgtgctggagcagctgccagtgctggatgcctccttctcagacctgggagccccaccgaggcggggaggggtgctgctggggcctgtctgcttcatgggataggaccgtctctgtctgatcctgtccattcggaaccaggcccacctggaatcccacaacatcagctctgtgccacctcccaagagggctcctcactatctagggagccctgggccagggcgtggagagccctcagtcggggcaggccaggggaggggtgaagtggttgcctggacaccccacgggaggagtggcatctggggctcttggccctcccacctggagcctgttacccgttagagagctgagacccttatttaaaactcacctcccaatcaccccaaacaaatggaagagaagagaaaggacatggcgtattttgtatttaaaagtaattgtattaattatttaaagtgtggaaagcaaaataacaaaaaagagaaacgccaacaaaaatcagcagatgttgaagacaggggtctcgggggtgggctccggcacccacatcctggagtcaggactttcctcagtgactgtgtgtaggggggtttcagggctgaaccccacctccctcccaccttcctcccacctcacctgtcgcacccactgtgaaagttggaatatgtggtctccctggcctcagggctctgactctgccagggtggggctctctaacccacaggtgttggctgcctggcccatgtgcccactgtctcttccacttggtctgggtttggcaggcactgcctgctacttgagggccaggatgctcccccagggaagaaacggaatagtgtggggtgtgtgcagggctgcatcccgcagatggctggaatattaaaattcttctatattggctggtaaattgccatggccctgagccactgagtatgttcattgccacccctgtccctcccctgggcacccctcactttccctgatcctgcaattaaagggttaatgtgtggcatatggaagggactcccaggaccctgtgcccagcttccatgctgactgatggttaaataatgtgattgtctcctcccagg

SEQ ID NO: 232444 - DNA, 4890 bp, Artificial Sequence
  derived and/or modified sequence
atggagagatgctcacgatgccacagactgcttctccttctccctttagtgctggggttgtctgctgcccctggatgggccggtgcaccaccggtggacgtcctgcgggctctacgattcccgagcctcccagatggggttaggagagccaaagggatctgtccagctgatgttgcttatcgggtcgctcgacccgctcaactgagcgcccctaccaggcagctattccccggagggttcccaaaagattttagcttgctgacagtcgtccggactcgaccagggttacaggctcctctgctcaccttgtatagcgcccagggggtgcgtcaattagggctggagctggggagaccagttcggtttctctatgaggaccagaccggacgacctcagccaccatctcagccagtctttaggggcctcagcctggctgacggcaagtggcatagagtggccgtggcggtgaagggacagtctgtgactttgattgtggactgtaagaagagagtgactagaccccttcccaggtcagccaggccagtgctcgatacacatggcgtgatcatcttcggagctaggatactggacgaagaagtgttcgagggcgacgtccaggagctcgctatcgtaccgggtgtgcaggctgcctacgaatcctgcgagcaaaaggaactggaatgcgaaggcggacaaagggagcgtccgcagaaccagcaaccccatcgggctcaaaggtcaccacaacagcagccgtctaggctgcatcggccacagaatcaggagccgcagagtcaagctgcgcacgggccacgagggttgaaaggggaaaagggcgaaccagctgtgctcgaaccaggcatgctcgtcgagggtccgcctggaccggaaggcccagccggactgattgggccacccggtatacagggcaacccaggtcctgtaggcgaccccggtgagcgcggtccaccgggacgcgctggcctccccggatccgacggagcacccggtccccctggtactagtttgatgctgcccttccgattcggtagcggcggtggggacaagggccctgttgtggccgctcaggaagctcaggcccaggcgatcttacagcaggcccgattggctttgcgaggtccacctggcccaatgggttacaccgggaggccgggtccacttggccaacccggttccccaggtctgaaaggagaaagcggcgatctcgggccacaaggtcccaggggaccgcagggtcttacaggcccacccggtaaagcaggcaggcgcggaagagcgggagcggacggcgcaagaggaatgcccggtgatcccggagtgaaaggggacaggggtttcgacggcctaccaggactgccgggtgaaaaaggccataggggcgacaccggagcccagggcctaccagggcctcctggggaagatggtgagaggggggatgacggggagatcgggcctaggggactgccaggtgaaagcggacccagggggctactgggaccgaagggtcccccaggcatccccggacctccaggagtacgtggaatggatggcccacagggcccaaagggaagtcttgggcctcagggagagcccggaccacccggacagcagggcaccccgggtacgcaggggttgcccggtccacaaggtgcaattggaccccatggagagaagggcccacagggcaagccagggctgccaggtatgcccggatcggacggcccaccaggacacccaggaaaggaaggacccccaggaactaaggggaaccagggcccaagtgggcctcagggcccacttggttacccaggcccacgcggtgtcaaaggcgttgacggaattaggggactgaaagggcacaagggggaaaagggggaggacggctttccaggtttcaaaggggacataggcgtgaaaggagatcgcggtgaggtgggcgtgccagggtcgagaggagaagacgggccagaggggccaaaggggagaaccggtccaacaggagacccaggtcctccgggactgatgggagagaagggtaagcttggcgttccaggactcccaggatatccagggagacagggaccaaagggatcacttggctttccgggattcccaggcgcatccggcgaaaagggtgcgaggggtttgtcaggcaagtctggtcccaggggtgagcgtgggccaacggggccaagagggcaacgcggaccaagaggggctacgggcaagtcgggggctaaagggaccagcggtggcgacggtcctcacgggccacctggtgaaaggggcctgcccggtcctcaaggcccaaatggatttcccggtcctaaagggccacctggacccccagggaaggatggactccccggtcacccaggccagcgcggtgaagtgggctttcagggcaagacgggccctccaggcccacctggggtggtcggcccacaaggagcagcaggcgaaacaggccctatgggcgaaagaggtcatccaggccctcccggtcctcccggtgagcaggggctgccagggaccgccggtaaagaagggacaaaaggcgatcccggaccccctggagcacctggtaaagacgggccagccggactgcgaggctttcccggtgaaagggggctgccaggtacagctggaggaccagggctgaagggaaatgagggtcctagtggaccgcctggccctgccggtagccctggcgagaggggggcagccggtagcggtgggcctatcgggccaccaggtcgcccagggcctcagggaccacccggagccgcaggcgaaaagggagtccccggagagaagggtccaattggtcctacggggagggacggagtccaaggcccagtgggattgcctggccctgcagggcctcccggagtggcgggtgaggacggagacaaaggcgaagtcggcgatccaggccaaaaaggaaccaagggaaataagggggaacacgggccacccggtcctcctggtcccattggcccagtcggtcagcccggagctgctggagcagatggcgaacctggcgctagagggccacagggtcatttcggagcaaagggggacgagggcacacgaggatttaacggtccacccggacccattggacttcaaggactgcccggaccgtctggagaaaagggggagaccggagacgtcggcccaatgggaccaccgggaccacccggtccgagaggcccagcgggacccaatggtgccgatgggcctcagggccctccaggtggagtcgggaatctcgggccaccgggtgagaaaggggagcccggagagagcggatctccgggtatccaaggagaaccgggagtcaaagggcctcgaggcgagcgcggagaaaaaggagagagtggtcagcccggagagcctgggccaccagggcctaagggccctacaggggatgatgggccaaaaggcaatcctggccctgtggggtttccaggagatcctgggccacctggggagggcggaccacggggacaggacggcgctaagggcgataggggcgaggacggggagcctggccagccaggaagcccagggccaaccggagagaacggaccacccggacctcttggcaagaggggacctgccggaagccctggtagtgagggacgccaaggaggtaagggcgcaaaaggtgaccccggagcaattggagccccagggaagacagggcctgtcggtcccgctggcccagccggaaagccagggccagacgggcttcgaggactacccggtagcgtcggacaacaaggtcgcccaggtgcaactggacaggccggaccaccgggaccagtgggaccccctggtctgcccggattaaggggcgacgctggcgcaaagggagagaaaggacacccaggcctgataggtctcattggaccacccggagagcagggcgaaaagggcgacagagggttgcctggtccacaggggtccccaggccaaaaaggagagatggggattcctggggcttccgggcctatcgggccaggcggtccaccagggctacctggcccagccggacctaagggagctaaaggcgctactggacctgggggaccgaagggagaaaagggggtgcagggaccgccaggccaccccggaccaccaggagaggtgattcagccactccctattcagatgcccaaaaagaccagaagatccgttgacgggtccagactaatgcaggaagacgaggccatccctactggtggggctcctggtagtcctgggggattagaagagatcttcggatctctggactctctccgggaggagatcgagcaaatgaggcgcccaacaggtacccaggactcgccagcgagaacctgtcaagatttgaagttgtgccacccagagttgccagatggggaatactgggtggacccgaatcaaggatgtgcaagagacgccttccgtgtattctgtaatttcacggccggaggcgagacttgcgtgactccgagggatgatgtgacccagttctcatatgtcgactcagaggggagtcccgtgggggtggtgcagctgactttcctgcgattgttgagtgtctcagcacatcaggatgtgtcttatccatgctcaggtgccgcacgcgatgggcctctgcgcctgcggggagccaatgaagatgaactgtcacccgagacaagcccttatgtcaaggagttccgcgatggctgtcagactcaacagggaaggaccgtgttagaagtgaggacacccgtgctggagcagctgccggtcctcgatgctagcttttccgatctgggtgcgcctccccgaagaggaggcgtgcttctgggcccagtgtgcttcatgggttag

SEQ ID NO: 232445 - DNA, 4809 bp, Artificial Sequence
  derived and/or modified sequence
ggtgctccccctgtggacgtgttgcgcgctctgcggtttccaagcctaccggacggggtccggagagctaaaggtatatgtcccgcagacgtagcttaccgggtggcaagaccagcccaactgagcgcgcctactaggcagctttttccaggcggatttcccaaggacttcagcctactcacggtggtcagaacaagacccggtctgcaggcccctttgctcaccctgtattcagctcagggagtccggcagttaggcctggaacttggacgacctgtgcgcttcctgtacgaggatcagacgggcagaccgcagcctccttcccaaccggtcttccgagggctgtccctggccgacggaaagtggcaccgagtggctgttgcggtgaaggggcagagcgtgactcttatagtcgattgcaaaaaaagagtcactcgcccattacctcgaagcgccagaccggtgctcgacacacatggcgtgatcattttcggcgcacgcattcttgacgaagaagtgttcgagggggatgtgcaagagctggccatcgttcccggtgtgcaggcagcatacgaatcatgcgaacagaaggaacttgaatgtgaaggcggacagcgcgaacgcccacagaatcagcagcctcatagagcccagcgaagccctcagcaacaacctagtcggctgcatcggccacaaaatcaggaacctcagagtcaggcggctcacggccctcgagggcttaaaggggaaaagggggaaccggcagttctcgagcccggaatgttggtagaagggcctccagggcctgaaggcccagcaggtttgatcggccctcctggaattcagggaaatccagggcctgtcggtgatcccggtgagagaggacctcccggacgggcaggtctgcccggatctgacggtgcacctggcccaccgggaacatcccttatgctcccgtttcggttcggctccgggggaggtgacaaggggcctgtggtggccgcacaggaagcccaggcccaagctatcctgcagcaagcaaggctggctctccgcggtcctcccggtcctatgggatacaccgggaggcccggaccactgggtcagcctggttccccaggcctgaaaggggaaagcggtgacctggggccacaaggccctcgtggcccacaagggctcactggtccaccgggtaaagccggacgaaggggacgggctggcgctgacggggctagagggatgcctggggatcctggtgttaaaggcgacagaggatttgatggtctcccaggccttcctggcgagaagggtcataggggcgacactggggctcaaggcctgcccggaccgccaggcgaggacggagagcgaggagatgatggcgagatcggcccacggggtctccccggtgagtcaggcccacgtggattactcggtcctaagggccctcctggcattcctggcccacccggtgtgcgcggtatggacgggcctcagggtccgaagggctccctcggtccacagggtgaaccaggccctcctggtcagcaggggacacccggaacccagggactgccagggccacagggagcaattggtccccatggcgagaagggaccacagggtaagcccggactgcctggcatgccaggctcagacggtcctccaggtcaccccggtaaagaaggccctcccggaactaaggggaatcagggcccaagcgggcctcagggacccctcggatatcccggtccgagaggtgtgaagggagtggatggcattaggggtctaaagggacacaaaggtgagaaaggagaagacgggtttccaggattcaagggtgacataggggttaagggagaccgtggcgaagtgggggtgcctggcagccgcggtgaagacggcccagaaggccctaaggggagaactgggccaactggcgatccagggcctcctgggctcatgggcgaaaaaggcaagctgggagtcccaggtttgcctggttacccaggacggcagggacccaagggaagccttggctttcccggatttcctggtgcctctggtgagaagggggctcgcggactaagcgggaaaagcggcccacgcggagagcggggtcccacgggccctagagggcagcgaggccctcggggagccacagggaagtccggagcaaagggaacttccggcggtgacggcccacacggacccccaggcgagcgtggcctcccgggtcctcagggacccaatggatttccagggcctaagggccctccaggacctccaggaaaggacggtcttcccggacaccctgggcagcgcggtgaggtgggctttcagggaaagaccgggcctccagggcctcctggagtggtaggcccacagggagcagcaggagagacagggccaatgggcgagcgagggcaccctggaccccctgggccacccggtgagcagggtctccctgggacagcaggaaaagaaggcactaaaggggatcctggacccccaggcgctcccggaaaagacggcccagctggcttaagaggattccccggtgagaggggcctgccaggcacggctggaggccctggactcaaaggaaacgagggcccatcgggaccaccaggccctgccggatcacctggggaacgtggcgctgctgggagtggcggacctattggcccaccagggagaccgggtcctcagggtccacctggggctgcgggtgagaagggggtgcccggagaaaaaggcccaattggaccaactggccgtgacggtgtccaaggcccagtcggcctgccgggtccagcaggccctccaggagtcgccggtgaggacggggataagggcgaggttggagatccgggtcagaagggaacaaagggcaataaaggagagcacggaccgcctggtccaccgggtcctatcgggcctgtgggacaacctggcgcagctggcgctgacggtgagccgggtgctagaggtccgcaggggcacttcggtgctaagggagatgagggcaccagggggtttaacggtcctccgggacctattggacttcaaggcctgcctggaccgagcggagagaaaggcgaaacaggagatgtggggcctatgggcccacctggtcccccaggcccaagagggcctgcagggccaaacggcgcagatgggcctcaagggccacccggaggggtgggcaatctgggaccacctggggaaaaaggagagccaggagaatccggttcccccggtatccagggtgagcccggagtgaaggggccacgcggtgagcggggtgagaagggcgaatccggacagccgggagaacctggccctcctgggcctaaaggacccacaggcgacgatgggcctaaaggaaatcctggcccagtagggtttcctggcgaccctggcccaccaggcgagggcggtccgagaggtcaggacggagctaagggcgacaggggagaggatggagagccgggtcagccaggctcccccggtcctaccggggaaaacggtcctccaggaccgttgggcaaaagagggcctgcaggatcaccgggatccgagggaaggcagggcggtaagggagccaagggggatcctggggcaattggggctcctggcaaaactggccctgtgggacccgctgggcctgccggaaaaccaggacctgatgggttacggggattacctgggtccgtaggccagcaggggcgaccaggcgctacaggtcaggccggaccgcctggtccagtgggcccacccggactgccagggctccggggagacgccggagcgaaaggagaaaaagggcatcccggacttataggactgatcggaccaccaggtgaacagggggaaaaaggcgaccgcggactgcccggaccccaggggtcacccggacaaaagggtgaaatgggtataccaggcgcatctgggcctatcggccctgggggaccaccaggcttacccggaccggctggaccaaagggcgctaagggtgctaccggtcccggaggcccaaaaggcgagaaaggggtccagggccctccaggtcaccccggtccccctggagaggtgattcagcctttaccaattcagatgcctaagaaaacccggcgatccgttgacggctcccgtctgatgcaggaggacgaagccattcccactggaggagctcctgggagccctggcggtttagaggaaatctttggctccctcgattcactgcgagaagagattgagcaaatgcggaggcctacgggaacccaagacagcccagccagaacgtgtcaggacctcaaattatgtcacccagaactgcccgacggggagtattgggttgatccaaatcaggggtgcgcgagggacgccttcagagttttctgtaatttcacagctggtggggaaacgtgcgtgacacctagggatgatgtgacccagttttcttatgtagattcagaaggatcacccgtgggtgttgtgcagctgactttcctacggctgctctctgtttcagcacaccaagatgtcagctatccttgcagtggtgcagcgagagacggacccctgcggctaagaggcgcaaatgaggatgaactgtcccccgagactagcccatatgtaaaggagtttagggatggctgtcagacacaacaaggtaggaccgtgctggaagttcggactcctgtgctcgagcagctcccagtattggacgcaagcttcagtgaccttggcgctcctccacgcagaggtggggttctgttgggcccagtctgtttcatgggatag

SEQ ID NO: 232446 - DNA, 4890 bp, Artificial Sequence
  derived and/or modified sequence
atggaacgatgctctaggtgccatcgcctacttcttttgctccccctggtactcgggctcagtgctgcccctggctgggctggcgcacccccagtcgatgtccttcgggcattgagattcccgagtctccccgatggagtgcggagggccaaggggatttgtcccgcagatgtggcctaccgggtggcaaggcctgcacagctgtcggctccaaccagacaactgtttcctgggggtttcccaaaggatttttcactgttaaccgtggttcggacaaggccaggattacaggcccctcttctaacgctatatagcgcacaaggcgtcaggcagttaggcctggagcttggcaggcccgtgcgctttctatatgaggatcagaccggcagaccacagcccccatctcaacccgtgttccgaggactatcactggccgatggaaagtggcaccgggtggccgtcgccgtgaagggacagtcagtcactttgatcgtggactgtaaaaagagggtgacccggccacttcccaggtccgcacgcccagtcctcgacacacacggagtgattattttcggtgcgagaatcctggacgaggaggtgtttgagggggacgtgcaggagctggcaattgtacctggcgtgcaggcagcctacgagtcatgcgaacagaaggagcttgaatgcgagggaggccaaagagagcgccctcaaaaccagcaaccccatcgggcacagcgcagcccacagcagcagccctcgcgcctccataggccacagaaccaggaaccacaatctcaagccgctcatggcccacgcggtttgaagggggaaaagggggagcccgctgttctggaacccggtatgctggtagaaggcccaccgggtccggagggacccgctggactcataggtccacctggcatccaagggaatccaggacccgtgggcgacccaggtgaaaggggccctccaggccgtgcaggcctgcccggatccgatggcgctcctggtcctccaggaaccagtctgatgctcccattcaggtttggttctggaggcggtgacaaaggacctgtggtggctgcccaagaggcacaagcgcaggccattctgcaacaagccagactggcactccgtggacctcccggacccatgggctacactgggcgtcccggacctcttgggcagccaggaagtcctggactcaagggagagtccggggacttaggccctcagggcccaagaggtccacagggcctgacaggacccccagggaaggccggaaggcgcggtcgggcaggcgcagatggcgctcggggaatgccgggagatccaggggtgaagggagatcggggttttgatggactgcctggcctccccggtgagaagggtcatcgcggagatacaggtgcccagggccttcctgggccacctggtgaagatggagagcgcggtgacgacggtgaaattggtcctagaggactgcctggagagagtggtcctcggggactccttggtcctaaggggccacctggcattcctggcccaccaggggtgcgaggtatggacgggccacagggacccaaggggagcctggggcctcagggcgagcccggtccccctggccaacagggcacaccaggaacacaaggcctgcctgggccacaaggcgcaattggtccccatggagagaagggccctcaaggaaaacccggtctgcctggaatgcccggaagtgatggccctcccggtcaccccggtaaggaaggcccaccgggaactaagggcaaccaaggcccatcagggcctcaagggccactagggtatccaggcccacggggagtaaagggagtggatggcattagagggctcaagggccacaagggcgagaaaggcgaagatgggttcccagggttcaaaggcgacattggagtcaagggggatcgtggggaagtcggagtacctggttccagaggcgaggacgggcctgagggacccaaaggcaggaccggtcctaccggggatccaggccctccaggactgatgggggaaaagggaaagctgggagtcccgggactccctggctatcccggtcgtcagggtccaaaaggcagcctggggtttcctggctttcccggagcctcaggcgagaagggggctcggggactgtctgggaaatcagggccacgcggagagcgagggcctacagggccacgaggccaacgcggtcctcgaggagccacggggaagagcggggcaaaaggcactagcggaggagacgggcctcatgggccacccggtgagcgcggactccccggaccccagggacccaatggtttccctggtcctaaaggtcctcccggaccccctggtaaggatgggctccccggacaccctggccagaggggggaggtaggttttcagggtaagactgggccaccaggccctcctggagtggtggggcctcaaggggcagccggagagacgggacccatgggcgagagagggcatcctggtccacctggccctccgggagagcagggcctgcctggtaccgccggtaaggagggcacaaagggcgacccaggaccccctggggcacctggtaaagacggcccagccggtctcagaggattccctggggagcgtgggctgcctgggaccgcaggaggccctgggctgaagggcaacgaaggtccatcgggtccaccgggaccggctggctcaccgggagagaggggcgcagctgggtcgggagggcctattggtcctccaggacgacctggtccccagggacctccaggggctgccggagagaaaggtgttccgggtgagaagggaccgattggcccaactggccgtgacggtgtccagggcccagttgggttgcccggtccagcgggaccccctggggtggctggagaggatggagataaaggagaggtcggagaccccggtcaaaaaggaaccaaggggaacaaaggtgaacacggtccaccgggtcctcccggaccaatcgggcctgtcggacaacctggtgccgctggcgctgacggggagccaggagcccgaggccctcaggggcattttggggctaaaggggacgagggcacccgaggttttaacggtccacctggcccaattggcttacagggccttcccggaccctctggggaaaagggcgagaccggcgatgttgggccaatgggacccccaggtccgcctgggcctagggggccagctggaccaaacggcgcagatggacctcaggggcctccgggaggtgtagggaacttgggacctcctggcgagaagggagagcccggagagagcggttctcctggaatccagggcgagcctggagtaaaagggcctcggggtgagcgaggtgagaagggcgaaagcggccaacccggagaacccggtccacccggacccaaagggccaacaggggacgacggccctaaaggcaatcccggaccagtgggatttcccggtgacccaggcccacccggtgaaggaggccctcgaggccaggatggggcaaagggagacagaggcgaagatggcgaacctggccagccagggtcccccggacccaccggggaaaacggtccacctggacctctgggaaaaagaggaccagccggatcacccggaagcgagggcagacaaggaggcaagggcgcaaaaggagatcctggggctatcggggctcccggaaaaaccggtcctgtgggacctgcaggaccggcaggtaagcctggcccagacggactccgaggtctccctggaagcgttggccagcaaggtaggcccggtgcaactggtcaagcaggaccccctggcccagttggaccacccggtcttcccggattaaggggtgacgcaggcgcaaagggcgagaagggtcatcctggactgattggattgatcggaccacctggggagcaaggagagaaaggtgataggggattgccaggccctcaggggagccccggtcagaagggcgagatggggatcccaggcgcaagcggcccaattggtcctgggggtcccccaggactccctggcccagcaggaccaaagggcgctaaaggagctaccggaccaggagggccaaagggcgagaagggtgttcaggggccacctggccacccaggacctccgggagaagtcatacagccgctcccaattcagatgcccaagaagaccaggcggtccgtggacgggtcccggctgatgcaagaggacgaggccatacctacagggggtgcacctggctcccccggaggcctcgaggagatctttgggagtctggacagcctgagagaagagattgagcagatgcgcaggccaaccggaacccaggactcccctgctagaacctgtcaagacctgaaactgtgtcaccccgagttgcccgatggtgagtactgggtcgaccctaatcaaggctgtgctagagatgccttccgggttttttgcaatttcacagcgggtggagagacttgcgtgacgcccagagatgacgttactcaattcagctatgtggattctgagggttcgcctgtcggcgtcgtgcagctaacattcctgcgtctgctgagtgtgagcgcacaccaggacgttagctacccttgctcaggagcagcaagagatgggccactacgtctacgaggagctaacgaagacgagcttagtccagagacatccccctacgtgaaggaatttcgtgatgggtgtcagacacaacaaggaaggaccgtgttggaagtgaggacccccgtgctggagcaactgcccgtgctcgacgcttctttctctgatctgggagccccacctaggcggggtggcgtgctgctggggcctgtgtgctttatggggtag

SEQ ID NO: 232447 - DNA, 4890 bp, Artificial Sequence
  derived and/or modified sequence
atggaaagatgcagtaggtgccaccgcttactactcctcttgcccctcgtgctgggactgagtgcggctcccggatgggccggagctcctcctgtagacgtgcttcgagctctccggtttccatccctcccggacggagtaaggcgcgcaaaggggatttgtcccgctgacgtggcctatcgggtggccaggccggctcagctgtccgcgccaacgaggcagcttttccccggtggcttccccaaagacttctccttgctcactgtggttcgtacccgcccaggactgcaggcgcctctcttgaccttatattcagctcaaggggtccgccagctgggactggagctgggacggccagttcgcttcctctacgaagatcaaaccggacgccctcagcccccaagccagcccgtgtttcgcggtctgtcattagctgacggtaagtggcacagggtcgctgtggccgtgaaaggccagtctgtaactctcattgttgattgcaaaaaaagggtgactcggccacttccgaggtctgcccgacctgtcctggacacccatggcgtgatcatttttggcgctcgaatccttgacgaagaggtcttcgagggagacgtgcaagaactcgccattgtgcctggcgttcaggccgcatacgaatcctgcgaacagaaggagctagaatgcgagggcggacagagggagcgccctcagaatcaacagccccatagggcacaacgctccccccagcagcaaccttcaagactccatagaccccaaaatcaagaacctcagtctcaagctgcccacggaccaagaggtctcaagggggagaagggagaacctgccgtgctggagcctggtatgctggtggagggccctcctgggcctgagggcccagcaggcttgatcggacccccaggcatccaagggaatccaggccctgtgggggaccctggtgaacgaggacctccgggacgggcaggtctcccaggtagcgatggcgctcctgggccacccggtaccagcctcatgcttccctttcgcttcggaagcggcggaggcgacaaaggtccagtcgttgcagcccaagaggcacaggctcaggctattctgcagcaggctagactggcgttgagaggccctccagggcctatgggctacacgggacgccctggccctctcgggcagcccggatctccgggattgaaaggcgaatctggggatctgggaccacagggacccagaggccctcaggggctcactggaccgccaggaaaagcgggaaggagaggtagagccggagcagacggggcaagaggaatgcctggcgatccaggcgtgaaaggcgacaggggattcgatggcttgccagggcttccaggcgaaaaaggacaccggggagatacaggggctcagggcttacctggacctcctggagaggacggagagcgcggagacgatggcgagatagggccaaggggcttgcccggtgagagcggccctcggggactgctggggcctaagggtccacccggaatccccggaccccctggtgttcgcggaatggacggcccacagggacctaaaggatccttaggccctcagggggaacctgggcctccaggccaacaaggcaccccaggcactcagggcctccccggtccacagggcgcaatcgggccacatggggagaaggggccacagggcaagcccggtctgcccggaatgcctggctctgacggtccccctggccatccgggaaaggagggcccacccggaaccaagggcaaccaaggacccagcggtccacagggaccccttggctaccctggcccacggggtgtgaagggggttgatgggatcagaggccttaaaggtcacaagggtgaaaagggggaggatggattcccagggttcaaaggcgatataggggtcaagggagataggggcgaggtcggagtcccagggtcgagaggcgaggacggaccggaagggccaaaggggaggactggacccaccggtgatccaggcccacctgggcttatgggggaaaaaggtaaactcggtgtgccaggactgcctggctatcccggaagacagggtccgaagggcagtttgggtttcccaggctttccaggagcctcaggggaaaagggtgcgaggggactgtctgggaaaagcgggcctcgcggagagcggggacccacaggaccaagggggcagagaggcccaagaggcgcaacaggaaagtccggtgccaagggtacttcaggaggtgatggacctcatggccctccaggcgaacggggacttccgggtccacaggggccaaacggatttcccggtccaaagggaccaccaggcccacccggaaaggatggactgcccggtcaccccggacagaggggcgaggtggggttccagggcaagacaggcccaccgggtcccccaggtgttgtgggtcctcaaggcgcagcaggggaaactggaccgatgggcgaacgaggccatccgggaccacccggaccgccaggggaacaagggctacccggaaccgcgggaaaagaagggaccaaaggcgaccccggtcctccaggtgcccctggaaaagacggtcccgcaggcctgagaggatttcccggagaaaggggtctaccaggcactgcaggaggtccaggtctcaaggggaatgagggaccgagcggaccgcctgggccagcgggatctccaggcgagagaggtgccgcagggtccgggggacctatcggcccacccggtcgccctggaccacaaggacctcctggcgctgccggtgaaaagggggttcctggagagaaaggccctattggcccaactgggcgtgacggggttcaggggccagttggactccccggtccagccggaccacctggtgtggctggggaagatggggataagggcgaagtgggcgaccctggtcagaaaggcactaagggcaacaagggggaacacggacccccagggcctcccggacctatcggcccagttggacagccgggagcggctggggctgatggagaacccggagctcggggacctcaggggcacttcggcgcaaaaggtgatgagggcactagggggttcaatggacctcccggtccaattggtttgcagggactgcctgggccaagtggcgaaaagggggagaccggcgacgtaggacctatggggcctcctggaccgcctggcccacggggtcctgctggccctaacggagctgatggccctcaaggcccaccaggaggggttgggaatctgggacctccaggagaaaaaggagagcctggggaatctggtagccccggaattcagggagagcccggtgttaaaggccctcggggtgagagaggcgagaaaggtgagtctggccagcctggagaacccggacctccgggaccaaagggcccaactggggatgatggcccaaaggggaatcccggtcccgtaggctttcctggtgaccctggaccaccaggggaaggcggtccaaggggtcaagatggagccaagggagaccgcggagaggatggcgaaccgggacagcccggttctccgggaccaaccggggaaaacggacctcccggtcctttagggaagcgaggcccagcaggatcaccaggctcggaaggcaggcaaggcggaaagggagctaagggtgatcctggagcgatcggcgctccaggcaagacaggacccgtgggcccagctggaccagcagggaagccaggccctgatgggctgcgaggccttccagggtcagtcggacagcagggcaggcctggagctacaggacaagcagggccaccagggcctgtggggcctcctggcctccctggtttgagaggcgacgccggtgctaaaggtgagaaaggccacccaggtcttatcggtttgatcggcccaccaggcgagcagggggagaagggtgacaggggcttgcccggaccacagggaagtcccggtcagaaaggtgaaatgggaattcctggagcgtctggccctattggacctggaggtccacccggtttaccagggccagcgggacccaaaggcgcaaaaggagcgacagggccaggcggacccaagggagagaaaggcgtgcaggggccaccaggtcaccccggtcccccaggcgaggttattcagcccctgcctatccaaatgcctaaaaagacgcgcagaagtgtggacgggtctcggcttatgcaggaggacgaggcaatccctacagggggagctccgggttccccaggcggacttgaagagattttcgggagtctggacagcttgcgggaggagatcgaacagatgcgaaggcccaccgggactcaggattcgcccgctcggacttgccaagacctgaagctgtgccaccctgagctgcctgatggggagtattgggtggatcctaaccagggttgcgccagggatgctttcagagtgttttgcaacttcaccgctggcggtgagacctgtgtgacccccagagacgatgttacacaattttcttacgttgacagtgagggctcacctgtcggggtcgttcagctcacgtttctaagacttctttccgtgagcgctcaccaagatgtcagctacccttgttctggagccgcacgagacggcccactcagattaaggggcgctaacgaagacgagctgtctcccgaaacatctccctacgttaaagaatttcgtgatggctgtcagacgcaacaagggcgtaccgtcttagaggtccggactcccgtactcgaacaattgcccgtgttggatgcatcatttagcgaccttggggcaccaccaagacggggaggagtactgctggggcctgtgtgtttcatggggtag

SEQ ID NO: 232448 - DNA, 4890 bp, Artificial Sequence
  derived and/or modified sequence
atggagaggtgttcccggtgtcaccgattgcttttactgctgccgctggtgcttggcctctcggccgcacctggatgggccggagcaccacctgtggatgttctgagggctcttcgcttccccagcctgcccgacggggtgcggagggccaagggcatttgccctgcagatgttgcctatcgcgtggctaggcctgcacagctctccgcacctacgcggcaactctttcccggaggcttccccaaggacttctcacttctgaccgttgtgagaacgagaccgggactacaggctccacttcttacactgtattccgctcagggggtccggcagttgggcctcgaactcggcagaccagttcggttcttgtacgaagaccagaccggacggcctcagccaccttcacagcccgtgtttagaggactttctttggcggatggaaagtggcaccgggtcgctgttgcagttaaggggcagtccgtgacattgattgtggattgcaagaaaagagtgacccgcccattgccgagatctgcccgtcctgtgctcgatactcatggtgtgatcatctttggtgcccgtattctggacgaggaagtgttcgaaggcgacgtgcaagagttggctattgtgcctggggttcaagcagcctacgagtcttgtgaacagaaggaattagagtgtgaggggggacaaagagagcgccctcagaaccagcagccccaccgtgcccaacgttctccccaacagcagccgtctcgccttcataggcctcagaatcaagaaccgcaaagccaggcggcacatggaccacgcggtctgaaaggggaaaagggagaacctgccgtgctggagccgggtatgcttgttgaggggcctccaggtcctgagggaccggcagggcttatcgggccacccggaatacaaggaaacccgggtccagtcggggatcccggtgaaagaggtcctcccggacgcgcaggcctccccggaagcgacggggctcccggaccccctgggacatcgctcatgctcccctttaggtttggctccggcggaggagataaaggacctgtagtagctgcccaggaagcccaggcacaagcgatcctgcagcaggcaagactggccctgcgtgggcctcctgggcctatggggtacactggcaggcctggtcccctaggccagcccggaagccctgggctgaagggggagagcggggatctgggcccacaagggcctagggggcctcagggtcttactggccctcccggaaaagccggtcgtcggggacgggctggagccgacggtgccagaggcatgcctggagaccctggagttaagggagaccggggattcgatgggcttcctgggctgcccggtgagaagggccatagaggagataccggcgcacaggggctcccaggacccccaggagaggacggagaacgcggagacgacggagagattggccctagagggctgcctggggagtcgggcccacgcggtttactgggaccgaaagggccacccggaatccccggaccccctggcgtgagaggcatggacggtccccaggggcctaagggatctctcggaccccagggagagccgggaccacccggacagcaggggacacccggtactcaagggctgccagggccacagggcgctattggccctcatggggaaaaaggacctcaggggaagcctgggctaccaggcatgccgggaagcgacggccctcccggtcatccgggaaaagaaggcccaccaggcacgaaagggaaccaggggccttccgggcctcagggcccattgggctacccaggaccccgtggggtcaaaggcgtggacgggattagaggcttaaaaggccataagggtgaaaagggcgaagatgggtttcccggattcaagggagacataggggttaagggagaccggggtgaggtcggggtccccggaagtcgcggagaggatgggccagaaggccctaagggaagaaccggcccaaccggcgatccaggccctcctggcttgatgggagagaagggcaagttaggcgttccgggactgccaggctacccgggtcgccaggggccaaaaggttccctggggttccctggtttccccggagctagcggcgaaaagggcgctagggggttatcaggaaaaagcggacctcgcggtgagaggggaccaacgggcccacggggtcagagaggccctcgcggagcgaccggcaagtctggcgctaaaggaacctccggaggcgatgggcctcacggacctcctggggagcggggactgcctggaccacaggggccaaatggcttccccggaccaaaggggccattgggccctcccggaaaggacggactgcctggtcaccctgggcaacgaggtgaagtcggattccagggaaagacgggccctccaggccctccaggcgtagtggggccacagggagcagccggagagactgggccaatgggcgaacggggacaccccggtccacctggtccgccaggggagcagggcttgcccggaactgcgggaaaagaggggacaaaaggtgaccctggccctcctggagctcccggtaaagacggacctgccggtctgcgcggtttccctggggagagggggttgccaggaactgccggaggcccaggcttaaaggggaatgaaggcccatccgggcctccaggccctgccggatcccctggagagaggggagccgcagggtcaggaggacccattggcccacccggacggccagggccacaggggcctccaggggcagcgggtgagaagggagtccccggagaaaaagggcctatcggaccaaccggtcgcgacggtgtccaaggaccagtgggccttcctggcccagctggaccacccggagtggccggagaggacggcgataaaggagaggttggcgacccagggcagaaaggcacgaaagggaacaagggcgagcatggccctccaggacccccaggacctatcggacccgttggacaacccggagctgctggagctgatggtgagcccggagccagagggccacaaggccatttcggagcgaagggcgacgaggggactcgcggattcaacggccctcctggcccaattggcctccaggggctccccggaccgtccggtgagaagggcgaaaccggggacgtggggcctatgggcccaccgggtcccccaggaccacggggtccagctggcccaaatggggctgatggacctcaggggcctcctggcggagttggaaatttaggtccaccaggcgaaaaaggggagcccggagaaagtgggtctcctggcattcagggcgaaccaggcgtaaagggcccaagaggcgagcgaggggaaaaaggagaatccgggcaacctggtgaaccaggtcctcctggccctaaaggacctactggtgatgacgggcctaagggtaatcccggtcctgtcgggttccccggtgacccaggacccccaggcgagggagggcctagggggcaggatggcgcaaagggggatcgaggagaagatggcgagcccggtcagcccggaagccctggtcccacaggagaaaatggcccaccaggaccgctcggcaagcgtgggccagccggatcaccagggagcgaaggtagacaaggaggaaagggagcgaaaggtgacccaggcgcaataggagcaccaggaaaaacgggaccggtaggccctgcgggacccgcaggtaaacctggccctgatggtctgagggggctccccggatcagtcggacagcaggggcgacctggcgctaccggccaggctggaccccctggcccagttgggcctcctggcctcccaggactaagaggagacgctggggctaagggcgagaagggccacccaggacttattggactcatcggacctccgggtgaacagggggagaagggcgataggggcttgccaggccctcagggaagcccgggacaaaaaggagagatggggattccaggcgcttcaggcccaattggtcccggagggcctccagggcttcctggcccagccggtccaaagggggctaaaggagccaccggacccggaggccctaagggcgagaaaggagtccagggccctccgggacatcccggtcccccaggtgaggtcattcagcccctccccatccagatgcccaagaaaactcgccgttccgtcgacggatctcgactaatgcaggaggatgaggcgattccaacaggtggcgctccaggatcaccagggggattagaggaaatctttggctctctggacagcctgagagaagaaatcgaacagatgaggaggcccaccggcacgcaggatagccctgctaggacatgtcaggatctcaaactgtgtcatccggagctgccggacggcgagtactgggtcgaccctaatcaggggtgtgctcgcgatgctttccgagtgttctgcaacttcaccgctgggggagagacctgtgttacccccagagatgacgtgactcaatttagctacgttgatagtgaggggtctccagttggagtggtgcagttaacctttctgcgcctcctgtctgtcagtgcccatcaggatgtgtcctacccttgttccggtgcagctagggatggacctctgagactgcggggtgcaaacgaagacgagctcagccctgaaactagcccctatgtgaaggagtttcgagatggttgccagactcagcagggcaggactgtgcttgaagtgaggacccccgtgttggaacaactgccagttctagatgcaagtttttcggatcttggagctccaccccgtagaggaggggtgctgctgggccctgtatgttttatggggtag

SEQ ID NO: 232449 - DNA, 4890 bp, Artificial Sequence
  derived and/or modified sequence
atggagagatgctcccgctgtcaccgtctgctcttgctgttgcccttagtgctgggactgtccgcggcacccggatgggcgggagcccctcctgtggatgtactaagggccctcagatttccctctctcccagatggcgtgaggcgggctaaaggaatctgtcccgctgacgtggcctaccgggtcgccagacctgcacaactctccgccccaacccggcagctgtttcctggaggattccccaaggattttagcctgttgaccgtcgtcaggacccgccctggcctgcaagcaccactactcaccctctatagtgcacagggggtgagacagcttgggctggagcttgggcctcccgtccggtttctctacgaggatcagacgggcagaccccagcctccgtcacagccagtttttagagggttgtcactggccgacggcaagtggcaccgcgtggcagtcgctgtgaaaggtcagtctgtgaccctgatcgtcgattgcaagaagagagtaacacggcctcttcctcggtcggccagacctgtcctggacacccatggcgtcattatcttcggtgccagaatcctcgacgaagaggtatttgaaggtgatgtccaggagctggctattgtgccaggcgtgcaggccgcatatgaaagttgtgaacaaaaagaactagaatgcgaggggggacagcgggaacgaccccagaaccagcagcctcaccgggctcagagatctcctcagcagcagccaagcaggctccatcgcccacagaaccaggagcctcaaagccaggctgctcatggtccaagaggactgaaaggcgaaaagggggaaccggcagtgctagagcctggtatgctagtggaggggccaccgggacccgagggccctgcgggactcatcggaccccctgggattcagggcaacccagggccagtgggtgatcccggagaacggggtccaccgggacgcgctggtttgcccggatcggatggggcaccgggacctcccggaacgagtcttatgttaccattccgcttcggttccgggggaggcgataaaggaccggtggtggccgcacaggaagcccaggcccaagctatcctgcaacaggctcgcctcgctctgaggggcccacctggacccatggggtatactggacggccaggccctcttggccagccgggtagtcctgggctgaaaggtgaaagtggagatctggggccacagggtcctcgtggacctcaaggtctgactggcccacccggtaaagctggtcgccgaggtagggcaggggctgatggtgcacgaggaatgccaggtgacccaggagtaaaaggtgaccgcggattcgacggcctgccaggactacctggggaaaagggacaccggggtgatacaggggcacaggggctgcccggtccccctggggaggatggggaacgcggagatgatggcgagattgggccacgcggactgcctggagagagcggaccgaggggacttctgggccctaagggtccacctggcatacctggaccccctggagtccgaggcatggatgggccacaaggaccgaagggctcactaggccctcagggggaacctgggccacctggccagcagggcaccccgggaacacagggactccccggtccccagggcgctattgggccacacggcgagaagggaccccaagggaaacccggtcttcccggtatgcctggctcagatggaccccctgggcacccgggaaaagagggccctccaggcacgaaaggcaaccagggtcccagcggccctcagggtccactgggctatcccggtcctaggggagtcaaaggcgtcgacggaattaggggtcttaaaggccacaagggtgagaagggtgaggacggcttccctggatttaagggcgacattggtgtgaaaggggataggggcgaagtaggagttccgggaagcagaggagaggatgggcctgaaggacccaagggcagaacagggcctacgggggatcctggcccaccaggtttgatgggcgaaaagggcaagctcggagtgcccggtctaccaggttacccgggtcggcagggcccaaaaggcagcctgggctttccaggatttccaggagcttccggcgagaaaggtgcccgtgggctgagtggcaagagtggtcccaggggcgaacgcggtccaacaggacccaggggtcagcggggtcctcgcggtgctactggaaagtctggagccaaagggacctcagggggagatgggcctcatggacctccaggagaacgcggtttgcccggaccccagggccctaacgggttccctggacctaaaggacccccaggacctccaggcaaagatggcctacccggacatcccggacaacgcggtgaagtaggcttccagggtaagaccggacccccaggaccaccaggggtggtgggtccacagggtgccgcaggagagaccgggcctatgggcgagagagggcaccccggacccccaggaccacctggagagcagggcctccctggaaccgcaggaaaagagggtacaaaaggagacccgggaccccctggagcgcctgggaaagatggtccggctggactgcggggatttcccggagagagaggactcccaggcacggctggcggtcccggactaaaggggaacgaaggaccatcaggccctccaggacccgctggctctccaggcgaaagaggagcggctggctccggtggaccaatagggcctcctggcagacctggccctcagggcccacccggagccgctggagaaaaaggtgttcctggggaaaaggggccaatcggccctacaggcagggacggagtgcagggccctgttggcctgccaggaccagccggtcccccaggagtcgctggtgaggacggggacaagggagaggtgggtgatcccggtcaaaaaggaaccaagggaaataaaggagaacacggccctccaggccctcctggtccaattgggccagttggacagcctggcgcagccggagcagacggggaacccggagctaggggtccgcaaggtcatttcggagccaagggggatgagggcactaggggcttcaacgggccacccggacctatcggactacagggtctgcccggaccctccggggagaaaggtgagactggggacgttgggcctatggggcctccagggcctccagggcctcggggtcctgctgggccaaacggtgccgacggaccacaaggtcctcccggaggcgtcggcaatctcggccctcccggagaaaagggtgaaccaggcgaatcaggctcccctggtattcagggggagcccggagtgaaggggccacgaggggaacgcggtgaaaaaggggaaagcggccagccaggcgagccaggccctcctggaccgaaaggccctaccggagacgatgggcctaagggcaatcccggaccagtgggttttccaggtgaccctggacctcccggagaagggggacccaggggccaggatggagccaagggagaccgtggggaagatggcgagcccggacagcctgggagtccaggtccgaccggagaaaatggacctccgggtcccttgggtaaaagggggccagccggatcccctggatcagagggtagacaagggggaaaaggggcaaagggtgacccaggtgcaataggtgctcctgggaaaaccggacccgtggggccagcaggtcccgctggcaaacccggtcctgacgggctgcgcggactgcccggaagcgtgggccagcagggccgtccgggagctactggccaggcagggcctccaggccctgtgggaccgcctggcctgccagggctgaggggtgatgccggtgccaaaggagagaaggggcaccccggacttataggacttattggtcccccaggcgagcaaggagagaaaggcgacaggggactccctgggccacaaggaagcccgggtcaaaaaggagagatggggattcctggagcgagcgggccaatcggtccgggtgggccacccggactgccgggacctgctggaccaaagggcgctaagggcgctactggcccaggcggtccgaagggggaaaagggagtccagggaccacccggtcatccgggacctcctggcgaagttattcagcccttacccattcaaatgcctaaaaaaactcgaagatccgtggatggatctaggctcatgcaggaagatgaggcaatccctacgggtggagcccctggcagccccggtggtctggaggaaattttcggttcactggattccttaagagaggaaattgagcaaatgcggaggcccacagggacccaggacagtcccgcacggacttgtcaggacctcaaactctgtcacccagagctgcctgatggggagtactgggtggacccaaaccaggggtgcgctagagatgcttttcgagttttttgcaacttcacagcgggaggagagacatgcgtgaccccgagagacgacgttactcagttctcgtacgttgattctgaagggagcccggtgggcgttgtgcagctgacatttctgagactcctctcggtctccgcccaccaagatgtttcttatccgtgttctggcgcagcgagagatggtccacttcggctgcgaggtgccaatgaggacgaattgagccccgagacatctccatatgtgaaggagtttagggacgggtgccagactcagcaggggcgaaccgtcctggaagtgagaaccccggtccttgaacagttacccgtgctggatgcttccttcagcgacctgggtgcccctccacgacggggtggagtgttactcggtcccgtatgttttatggggtag

SEQ ID NO: 232450 - DNA, 4890 bp, Artificial Sequence
  derived and/or modified sequence
atggagcgttgttcccgttgtcaccggctcttgttgcttttacccctcgtccttggtttaagcgctgcgccagggtgggctggcgctcccccagttgacgtcctcagggcgctgagatttccttctctgcccgatggcgtgcgacgcgctaagggcatttgccctgcagacgttgcctatagggttgcgaggcccgcacaactttctgccccaacccgccagctctttcctggagggttccccaaggacttttcgctcctgactgtggtgcgaacaagaccagggcttcaagcgcctctgctcaccctatattccgctcagggggtccgacagctggggcttgagctgggcagacccgtaaggtttctgtacgaggaccagactggaaggccccaacctccgagccagcccgtgtttcggggtcttagtcttgccgatggaaagtggcaccgtgtcgctgtggctgtgaaggggcagagcgtgactttgatcgttgattgcaaaaagcgagtaactcggccattaccaagaagcgcgaggccggtgctggacactcatggcgtgatcatcttcggcgctaggatcctcgacgaggaagtatttgaaggagacgttcaggagctggctatcgtccccggagtccaggctgcgtacgagtcatgtgagcagaaagagctggaatgtgaaggcggtcaacgcgaacgaccgcagaaccagcagccgcaccgagcccagaggtccccacagcagcagccctcacgtctgcaccgtccacaaaatcaagagccccagtctcaggccgcacacggtccacgcggtctaaagggagaaaaaggggaacctgctgtgctggagcccggaatgctagtggagggccctcccggacctgaaggccctgccggactgattggtcccccaggcatccagggcaacccaggcccagtcggagatcccggagagcgcggtccaccagggagggctggtctgccagggagcgatggtgcaccaggcccacctggaacatctctgatgctgcccttcaggttcggctccggcggaggggataaagggccagtggtggctgctcaagaagcccaagcccaggcaatcctccagcaggcacggctcgcacttcgcggtccccctggacccatgggttatactggcagacctggacccctgggccagccaggcagtcctggactaaaaggagagagtggagatctgggcccacaagggccaagggggccacagggtctcacagggcctcctggaaaagccggtcgacgtggaagagctggagctgatggggctcggggaatgcccggagatcccggagtgaagggcgaccgcggtttcgatgggttgcctggcctccctggagagaagggccaccgtggggataccggggctcaggggctcccaggacctcctggtgaggacggtgaaagaggagacgacggtgagatcgggcctcgcggactgccaggggagtccggcccaagagggttgctgggcccaaaagggcctcctgggattcctgggccacccggagtccgcggaatggatggtcctcaaggcccaaagggctccttaggccctcagggtgagccaggaccgccaggccaacagggcacacccggaacacaaggcctcccgggtccgcaaggagctattggtcctcacggagagaaagggccacagggtaagccaggcttacccggtatgcccggatcggacgggcctcccggacacccaggcaaagagggaccccctggcacgaaaggaaaccagggaccttccggaccccagggtccactggggtaccccggaccccgaggcgtaaaaggcgtcgacgggattcgtggcctgaaaggtcataaaggcgagaagggtgaagacggctttccaggttttaagggagatatcggtgtcaagggtgatagaggggaagttggcgtgcctggctcccgaggggaggatgggccagaagggccaaagggtcgaaccggaccaacaggtgaccctggcccaccaggactcatgggagagaaaggcaagttgggcgttcctgggctgcccggttatcccggacggcaaggccctaagggctcgctgggcttcccaggtttccctggggcttcaggggaaaaaggggctcgcggactgagcggtaaaagcggcccacggggagaaagaggtccaactggtcccagaggacagcggggaccgcgtggcgcaactgggaaaagcggggcaaaggggacctctgggggagatgggcctcacgggccaccaggggagcggggtttacccggtcctcagggtccaaacgggtttccaggccctaaaggaccccctgggccaccaggaaaggatggcttgcctggacatcccggtcagagaggagaggtcgggttccaggggaagaccggcccaccgggtcctcccggagtggtggggccacagggcgcagctggcgagaccggcccaatgggagagaggggccatcccggaccccctggacccccaggcgagcaggggttgcccggaacagcgggtaaagagggaaccaagggcgaccccggaccaccgggagctccaggcaaggatggccctgcaggccttcgaggttttcccggtgagcgagggctgcccggaacggctggcggtcctggactgaagggcaacgaaggcccttcaggccctcccggacctgccggttccccaggcgagcgcggtgccgcagggtctgggggaccaatcggacctcctggaaggcccggaccccaagggccacccggtgccgctggagaaaagggggtgcctggcgagaaaggccctatcgggccaacaggacgcgacggtgtgcaggggccagtgggactgcccggtcctgcaggccctccaggggtcgcgggagaagatggtgataaaggggaagttggggatccgggacagaaaggtactaaaggtaacaaaggagaacacgggccacctggcccacccggtccaattggcccagtgggacagcccggagcggcaggggcagacggcgagcccggtgcaaggggccctcaagggcacttcggagccaagggagacgaaggcaccaggggttttaatggccctcccggtccaatcggcttgcagggcctgcccggaccttctggcgagaagggcgagactggcgatgttggccctatggggcctccagggcctcccggaccacgtggacccgctgggccaaacggagctgatggtccgcagggaccaccgggaggcgttgggaatttaggcccaccaggggaaaaaggggagccaggcgaaagtggctcccctggcatacagggcgagcccggagtaaagggtcctaggggagagcggggtgagaagggggagtccggacagcccggagaacctggacccccagggcctaaaggacctacaggggacgacggcccaaagggtaaccctggccctgtcggttttcctggggaccctgggccacctggagaggggggaccccgaggtcaggacggcgcaaagggcgatcgaggagaagacggggaacccggacaaccgggaagtcctggtccgacaggggagaacggacctcccggaccactgggtaagcggggtcccgcaggcagcccgggatcagagggtagacagggaggaaaaggagccaagggcgaccctggggcaatcggtgcccctgggaaaacagggcctgtcggaccggctgggcctgccggaaaaccgggaccagacggcctgagaggcctgcctggctcagtgggccagcagggacgaccaggcgcaacggggcaagctggcccaccaggacctgtggggcctcccggtttgccgggactgcgcggtgacgctggcgcaaagggtgaaaagggacacccaggactgattggtctcataggtcctcccggtgaacagggcgaaaagggggacagggggctcccagggccacagggctctcccggacaaaaaggcgaaatgggcattccaggagccagcggcccaatcggccctggcggacctcccggacttcctggccctgcaggacctaaaggagctaaaggcgctactggtcccggaggcccaaaaggagaaaaaggcgttcagggaccaccaggacatcctggaccacccggtgaagtgatccagccattgccgatccaaatgcccaagaagaccaggaggtccgtggatggatcgaggctcatgcaggaggacgaggccatacctacagggggagcccctggttcccctgggggattggaggaaattttcgggtcactggatagcctacgtgaggagattgagcagatgaggagacccaccggaacacaggatagccccgctaggacctgccaagatctaaagctgtgccacccggaactccctgatggggagtactgggtagatcccaaccagggctgcgctcgggacgctttccgtgtattttgtaatttcaccgcagggggagaaacctgcgtgaccccacgcgatgacgttacccaattttcctatgtggatagtgagggatcacccgtaggtgttgtgcaacttacctttttacggttgctttctgttagcgcccaccaggacgtgagctacccttgctccggcgcagccagagacgggccacttaggctgcgaggggctaacgaagacgaactgtcccccgaaactagtccatatgttaaggaatttcgggacggatgccaaacccagcaaggccgaacggtattagaggtacggactcctgtgcttgaacagctgcccgtgctggatgccagtttcagcgacctgggagcgcctcctagaaggggtggcgtgctcctgggaccagtgtgttttatgggatag

SEQ ID NO: 232451 - DNA, 4890 bp, Artificial Sequence
  derived and/or modified sequence
atggagagatgctctcggtgtcatcgactcttgcttctgctgccgttggttttaggattgtcagctgcgcccggctgggcaggtgccccgccggttgacgttttgcgggctctcaggttcccatcactgcctgatggggtgaggcgcgccaagggtatttgtccagccgacgtggcatatagggtggcacgccctgcacagctatcagccccaacacgtcagttgttcccaggtggctttccaaaagatttctccctgcttacagttgtgagaacccggccaggactgcaggccccacttttaaccctgtatagtgcccagggcgtgcgtcagctagggctcgagcttggtcggcctgttagattcttatatgaggaccagaccggccggccccaacctccatcacagccagtgttccgtggcctatcactggccgacgggaagtggcacagggttgctgtggctgtgaaagggcagagtgtgacgctcatcgttgactgcaaaaagagagtgacgcggccacttcctcgatctgctcgcccagtgcttgacacacacggggtgattatcttcggagctcggatcttagatgaggaagtgtttgagggggatgtccaggaacttgcaattgtgccgggggttcaggccgcgtacgagtcttgtgaacagaaggagctcgagtgtgaaggcgggcaacgggaaagaccacagaaccagcagccgcatcgtgcacaacgatcaccacagcaacagcctagccgcctccacagaccgcaaaaccaggaacctcaatctcaggcagcccatggcccccgcggactgaagggcgagaaaggcgaaccggccgtgctcgaacctggcatgttggtagagggccccccaggtccagaggggcctgctggtttgatcgggccgccaggcatacaaggtaaccccggccccgttggtgatcccggagaaaggggtcccccaggccgcgcaggacttcccggaagcgatggcgccccaggcccaccaggcacaagtcttatgctgcctttcaggttcgggtccggcggcggcgacaaggggcccgtggtcgctgcacaggaggcgcaggcccaggccattctccagcaggccaggctggcactgaggggaccccctggccctatgggatacactggtcggcccggtcctttgggtcagcctgggtcgcctggcctcaaaggggaaagtggagacctcgggccacaggggccaaggggtccccagggactgacaggccctccgggcaaagcagggcggcgcgggcgcgccggagccgacggggctcggggtatgcccggggatcccggtgtcaagggggatcgaggctttgacgggcttccaggtttgccgggagaaaagggacacagaggggacaccggtgcacagggcctccccggaccacccggtgaagatggagagcgaggcgacgacggggagatcggtccgagaggcctgccgggggaatccggccctcgcggcctgcttggtcctaagggacccccaggcatcccaggtccccccggcgtgaggggcatggacggaccgcagggccctaaagggtccctgggacctcagggagagcctggccctccaggccagcaggggaccccaggcactcaaggactccccggtccacagggagccattggcccacacggggaaaaggggcctcaggggaagcccggtctacctggcatgccaggctctgacggaccaccaggccaccccggaaaggaggggccccccggcactaagggaaatcaggggccaagcggaccgcaggggccacttggttacccagggccccggggcgtgaagggcgtcgacgggatcagaggcctgaaaggccacaagggcgaaaagggcgaagacgggtttcctggctttaagggcgatattggcgtaaaaggagatagaggagaggtcggagtgcctggttctaggggagaggacggaccagagggccccaaaggccgaacaggccctacaggcgacccaggcccccccgggctcatgggcgaaaaaggcaaactgggggtccccggccttcccgggtacccaggtcgccagggcccaaaaggtagcctgggcttccccgggttcccaggtgccagcggagagaaaggagccagaggactgtcaggcaaaagtgggcctagaggcgaacgcggtccaaccggaccacgcgggcagcgaggcccacggggagccactggtaagtccggcgcaaagggaacgagcggtggtgacggaccacacgggcccccgggcgagagagggctcccaggacctcagggaccgaatggttttcccggacctaaaggaccaccaggaccccccggcaaagacggccttcctggacatcccgggcagcgcggcgaagtgggtttccaaggcaagaccggtccgccaggcccgccaggagtcgtaggcccccaaggagccgcgggcgagacaggaccgatgggggaacgtggccatccaggcccgcccggacctcctggagagcagggcctcccgggcaccgcaggaaaggagggtactaagggagatccaggtcctcccggcgcacctggaaaggatggacctgctgggctacgtggattcccgggcgaacgtggactgcctggtacagccggcggcccgggactgaaaggtaacgaaggacccagtggaccgcccggtcccgccggttcccccggagagcgcggtgccgccggatcaggaggacctattggccctcctggccggcctggcccacagggtccacccggagcagcaggcgagaagggcgtgcccggagagaaagggccaattggtcccactggcagggacggcgtgcagggccccgttggtctgcccggtccggcaggcccacctggcgtggcgggagaggatggtgataaaggagaggtaggagaccctggacaaaaagggacaaaagggaacaagggcgaacatgggcctccaggacctccggggcctatcgggccggtaggtcagcccggagcagctggcgcagacggggagcctggggccagggggccacaggggcatttcggtgccaagggagatgaaggtactcgcgggtttaacgggcccccgggcccaataggtctccagggactgccaggtccgagtggtgaaaagggtgagacaggtgacgtggggcccatgggcccaccaggtcctcccggcccccggggaccggccggccccaatggggccgacggcccgcaaggcccccctggaggtgttggcaatctgggtcctccaggcgaaaagggcgagcccggtgagtctgggtcgcccggcattcagggtgaacccggtgttaaggggccacgaggtgaacggggagagaagggcgaaagcgggcagccaggagagccaggcccccccggccctaaaggccctaccggcgacgacggtcccaagggcaacccaggccccgtgggatttcccggagacccaggacccccgggtgaaggggggcccagagggcaagatggtgccaaaggtgatcgtggcgaggatggcgaacctggccagcccggtagccctggcccaacaggcgaaaacggtccacccggtccactcggtaagagaggaccggccggatctcctggttctgagggccgacagggaggtaagggagccaaaggcgaccccggggctatcggtgctcctggaaagacagggcccgtcggtccagctggccctgcaggcaaacccggtcctgatggccttaggggactacctggatccgtagggcagcagggacggcctggagccacaggccaggctggtcctccgggaccagtcggtccaccgggcctacccggcctgaggggggacgctggcgccaaaggtgagaagggccaccctgggctcattggccttatagggccaccaggggaacagggtgagaaaggggaccggggacttccggggccacaggggagtcctgggcagaagggggagatgggtattcctggggcaagtgggccaatcggacccggggggccaccgggccttccagggccggcagggccgaagggggcgaaaggagctacggggccaggcgggcccaaaggcgagaaaggcgtacaggggcctccagggcacccagggccaccaggcgaagtaatccaaccactccctatacagatgcccaagaagacaagaaggagtgtggacggcagcagactcatgcaggaggatgaagcaattcccacagggggggccccagggtcaccgggcggcctagaggaaatatttggttccctcgatagcctgagagaggaaattgagcaaatgagacgcccgactggaacgcaggactcccctgctcggacctgtcaagatcttaagctgtgtcatcctgagctccctgacggtgaatactgggtggaccccaaccaggggtgcgcgagggacgctttcagggttttttgcaactttacagctggaggcgagacttgcgtgactccccgcgatgatgtcacacagttctcctacgtggactccgaaggttccccagtcggcgtcgttcagctgactttcctcaggctgctgagtgttagtgcccaccaggacgtgagctacccctgtagcggagccgctcgagacggccctctgaggctgcggggggctaatgaagatgaattaagcccggagacttctccctatgtcaaggaattcagagatggatgtcaaactcagcagggaaggactgtgctggaggtccgaaccccagtcttggaacagctccctgttttggacgcaagtttctccgatttgggggcccccccaagacgcggtggcgtgcttctgggccctgtatgtttcatgggctag

SEQ ID NO: 232452 - DNA, 4890 bp, Artificial Sequence
  derived and/or modified sequence
atggagaggtgttctcggtgtcacagactcctcttactgttgccattagtgttgggattgtcagcagcccctggctgggcaggcgcccctcctgtggatgtgcttcgtgcccttcggtttcccagccttcctgatggagtgagaagagctaaaggcatatgtccagccgacgtggcgtatcgtgttgccagacccgcccagctgagcgctccgacccggcaactgttcccaggaggttttcccaaggacttcagcttgctgactgtggtaagaactcggccagggctgcaagccccactgttgaccctgtacagcgcccagggcgtaaggcaactgggcctcgagttagggcgacccgtcagatttctgtatgaggatcagactggcagaccgcaacctccatcacagcccgtttttcgtggcctatcacttgctgacgggaaatggcatcgggtcgcagtcgcggtgaaaggacagtccgtcaccctgatcgttgattgcaaaaaacgggtgaccaggcccctgcctagaagcgcccggccagtgctggacacacacggagtcatcatattcggagcaaggatccttgatgaagaggtcttcgagggcgatgtgcaggagcttgcaatagtgcctggggtgcaggccgcatacgagtcatgtgagcagaaggagttggaatgtgagggaggacagagagaacgaccccagaatcagcaaccacatcgcgcacagcgaagtccccagcaacaaccctcccgcctgcacagaccacagaatcaagagcctcagtcacaagctgctcacggtcctcgaggcttgaagggagagaaaggggagcccgcagtcctggaacccggaatgttggttgagggtccccccggccccgaaggccccgcagggctcatcggtccaccaggaattcaaggcaaccccggccctgtcggtgaccctggagaaaggggaccacccgggcgcgcaggacttcccgggtccgatggggctcccggtcctccgggaacctcacttatgttgccattccgatttgggagtggagggggcgataaggggcctgtcgttgccgcgcaggaagcgcaggcccaagccatcctccaacaggctcgcttggccctgcggggcccgcctggccccatgggatatactggacggcccggacccctgggccagccaggtagtccgggcctgaagggggaatccggtgatctcggcccccagggtccccgtgggccccagggactgacaggaccaccaggtaaagccgggcgcaggggtagggccggagccgacggagcacgggggatgcccggcgaccccggggttaaaggagaccgcggtttcgatggccttcccggacttcccggtgaaaagggccacaggggcgatactggcgcccagggtctgccgggaccacctggggaggacggagagagaggcgatgacggtgagattgggccacggggtctaccaggcgagtctgggcctcgggggctcctcggtcccaaagggccccctggaattcctggacctccaggtgttcgcggcatggatgggccccaggggcccaaaggaagtctgggaccacaaggcgaaccaggacctcccggccagcagggaacccctggaactcagggtttacctggcccacagggggcaatcggtcctcacggcgagaaaggccctcaaggaaaacctgggctgcccggcatgccaggaagcgacggcccgccaggtcacccaggaaaagaaggccctcccggcaccaagggaaaccagggcccctccggccctcagggcccactggggtaccccggtccacggggcgtgaagggagtggacggcatcagggggttaaagggtcataaaggcgaaaagggcgaagacggctttccaggctttaaaggcgacataggtgttaaaggcgatagaggcgaggtgggcgtgcctggcagcagaggcgaggacggacctgaaggacctaagggaagaacaggaccaactggtgatcccggccccccgggcctcatgggcgagaaaggcaagctgggggttcccggtttacctggttatcccggtcgtcagggtcccaagggcagcctggggttccccggattcccaggtgcctccggtgaaaaaggcgcacgcgggctgagcggaaaatctggcccacggggggagagaggtcctaccggaccaagaggccaacgtggcccacgcggggctaccgggaagtcaggcgcaaaggggacttctggcggagacgggccccatggcccaccgggcgaaagaggactccctggccctcagggccccaatgggtttcctggacctaaaggtcccccaggaccacctggaaaggatggccttcccggacaccccggtcagcggggcgaagttgggttccagggcaagacagggccccctggaccccctggtgtggttgggccacagggcgctgcaggagaaaccggccctatgggggagcgtgggcaccctggtccccctgggccacctggagaacagggcctgccgggaacagctggcaaagagggaacaaaaggggacccgggccccccaggagctccgggcaaagatgggccggccggtctcagaggttttccgggggaacggggccttcccggcaccgccgggggacccggcctcaagggcaatgaagggccctcaggaccacccgggcccgcaggttctcctggcgaaaggggagcagctggctccgggggacccatcggcccgccagggaggcccggtccgcagggaccaccaggagccgcaggcgagaaaggagtccctggcgagaaaggaccgattggacccaccggaagagacggcgttcagggccccgttggactaccgggaccagccgggccccccggcgtggctggcgaagacggcgataaaggggaggtgggagacccaggccaaaagggcactaaaggaaacaaaggcgagcatgggccacccgggcctcccggacctattggccctgttggccagcctggggccgccggtgccgatggagagcctggagcacgaggtccacagggacactttggtgccaagggagacgagggcacccgtggcttcaatggaccccctgggccaatcggtctgcaggggctgcccggtccatctggtgagaaaggcgaaactggagacgttgggccaatgggtccaccagggcctccaggaccaagggggcccgcaggtcctaacggcgcagacggccctcagggcccccctgggggcgttgggaatcttgggccacctggggaaaagggcgaaccaggcgagagcggctcaccaggaatacagggagaacctggcgtgaaaggaccccgcggcgagcggggggaaaagggtgaatctggccagccgggagagccaggaccacccggaccaaaaggtccaaccggagacgacggccccaagggcaatccaggtccagttgggtttccgggagatcctggcccaccgggggaaggcgggccccgtggccaagatggggcaaaaggagatcgaggggaggacggggagcccgggcaacccggatcacctggcccaactggcgaaaacgggcccccagggcctctgggcaaacgagggccggctggcagccccgggagtgaagggcggcaagggggtaagggcgcaaagggcgatcctggtgcaataggcgctcctggaaaaaccggtcccgtcggccccgccggaccagctggcaagccgggaccagacggactgcggggcctcccaggctcagtcggtcaacaggggcgaccgggcgcaacgggtcaagccggcccacctggaccggttggtccacccggcctcccggggctgaggggcgacgcaggcgcaaagggagagaagggccatcctggacttatcggcttgattggacctccaggtgaacagggagagaagggggacagaggtctacccggccctcagggaagtcccggtcagaagggtgaaatgggaatccctggggccagcggcccgattgggccaggtggaccccctggactcccaggcccagccggcccaaagggggcaaagggagccaccggtcccggtggcccaaagggagagaaaggagttcaggggcccccaggtcaccctggacctccaggcgaggtgatccagcctctgccaattcagatgcccaagaagacccgccggagtgtggacggatctcgtctgatgcaggaagatgaggcaatacctacgggcggcgcccccgggagtccaggaggacttgaggagatttttggcagcttggacagcctgcgcgaggagattgagcagatgcggagacctactggaactcaggatagccccgctcgcacttgtcaggacctcaagctctgccacccagaactaccggatggcgagtattgggtggatcccaatcagggatgcgcccgggatgccttcagagttttttgtaattttacggccggcggtgagacttgcgtaactccccgcgatgatgttacccaattctcttacgtcgatagcgaggggagtccagtaggagttgtgcagctgacatttctgcgcctccttagcgtatctgctcaccaggatgttagctacccttgcagcggtgccgctagggacggcccgttacgtctgaggggggcaaacgaagatgaactcagccctgaaacatccccttatgtgaaagagtttcgcgacggctgccagacacagcagggaaggactgtgctggaagtaaggactcctgtgctggaacagttgccagtccttgacgcctccttttccgatcttggagccccacctcgcagaggcggcgtattgcttgggcccgtttgttttatgggatag

SEQ ID NO: 232453 - DNA, 4890 bp, Artificial Sequence
  derived and/or modified sequence
atggaacgctgctcgagatgccaccgcctcttacttcttctgccactggtgttgggcttgtcagcagcaccaggatgggctggcgcccctccggtagacgtccttagggcactgcggtttccttctttgccagatggagttcgaagggccaaaggtatctgtcccgccgatgttgcataccgagtggcgagaccagcgcagctgagtgctccgacaagacagcttttcccaggaggattcccaaaggacttttcattactcactgtcgttcgcaccagaccgggacttcaggcccccttgctgactctgtatagcgcccagggagttagacagctcggacttgaacttggacgtcccgtgcgattcctatatgaggatcagacgggcaggcctcagccccctagtcaaccagtcttccgaggattgtcattggccgacggtaaatggcaccgagttgctgtggcagtgaaaggtcagagcgtgaccctaatcgtagattgtaaaaagcgcgttacccgccctctgccacgtagcgccagacctgttctcgacacacatggcgtcatcatcttcggcgccaggattctggacgaggaagtcttcgagggagatgtgcaggaacttgcaatagtgccaggcgttcaggcagcgtacgaatcgtgtgagcagaaggaactggagtgtgaaggtggacagagagaacggccacagaaccaacaacctcaccgagcacagagatccccccagcaacagcccagccgcctccatcggccccagaaccaagaacctcagagtcaggccgcccacggccccagaggcctgaagggcgagaagggagagccagcagtgctggaacccgggatgcttgtggaagggcctccaggaccagaagggcctgccggtttgataggtccccctgggattcagggcaatcccggacccgtgggcgaccccggcgaaagaggacctcccggacgcgctggtcttccaggatctgatggggcccccggtccacccggcacttcactcatgctcccgtttagattcggaagcggagggggagataaaggacccgtggttgccgctcaggaagcccaggctcaagcgattctccagcaagctagactagctctgagaggcccacccggccctatgggttatactggacgacctggtcccttgggccagcctgggtcccccgggctaaagggcgagagcggcgatctcggtcctcagggaccccgcggaccacaaggactgactggtccaccaggaaaagcgggacgccgaggccgcgcgggagccgacggcgctcgcggaatgccaggggatccaggagtgaagggtgatagggggtttgatggattacccggactgccaggtgagaagggacatcggggagatacaggggcccaggggctgccaggaccgccaggcgaggatggcgaaaggggggacgacggagaaatcggacctaggggtctgccaggcgagtcaggcccaagaggtctgttaggcccgaagggccctccagggattcctggcccaccaggcgtgcgaggaatggacgggcctcagggtcccaaaggtagtctgggcccccagggagagcccggtcctcctggccagcagggtaccccgggaactcaaggcctgcctggtccacaaggcgccatcggccctcacggcgagaaaggaccccagggaaaacccggtctgcccggtatgccagggtccgatggaccacccggccacccgggaaaggaagggcccccaggcacgaagggcaaccagggtcctagtggaccccagggccccttaggctatccagggccaagaggtgtgaaaggtgtagatgggatcaggggattaaaaggacacaagggcgaaaagggggaggacggcttcccaggcttcaaaggtgatataggtgtgaagggagatagaggcgaggttggcgtcccaggctctagaggagaggacggacccgagggaccaaaaggtaggaccggaccgacgggggatccaggaccacccggcttgatgggtgaaaagggcaagctgggcgtgcctggattgccaggctatcccggccgacagggcccaaaaggtagcctgggcttccccgggttcccaggtgccagcggagagaaaggagccagaggactgtcaggcaaaagtgggcctagaggcgaacgcggtccaaccggaccacgcgggcagcgaggcccacggggagccactggtaagtccggcgcaaagggaacgagcggtggtgacggaccacacgggcccccgggcgagagagggctcccaggacctcagggaccgaatggttttcccggacctaaaggaccaccaggaccccccggcaaagacggccttcctggacatcccgggcagagaggagaggttggatttcagggcaagacgggtccccccggcccaccaggtgtcgttgggccccagggggcagcaggagaaaccggacccatgggagagaggggccaccccggacccccaggccctccaggcgaacagggactacccggcaccgctggcaaagaggggacaaaaggcgatcctggcccgcccggggcaccaggaaaagacggcccagcaggactcagaggattcccaggggagaggggcttgcctggaacagccgggggcccaggacttaaaggaaatgagggaccttctggtccccctggtccagcgggtagcccaggggagagaggcgccgcgggcagcggcggtccgatcgggccccctggaagaccggggccacaaggaccacctggggcggcaggcgaaaaaggggtgccgggagagaaaggcccaatcggcccgactggaagagatggggtgcagggcccagtgggtcttcctggtcccgcgggaccaccgggagtcgccggcgaagatggagataagggcgaagtgggggacccaggacagaagggcaccaaggggaacaaaggcgagcacggaccacccggcccaccgggacctataggacctgtcgggcaacccggcgctgccggggcagacggagagccgggcgcacgaggtccccaaggacatttcggggcaaagggggacgagggaacacgcggttttaatggcccccccgggcccattggactgcagggcttaccagggccatcaggtgagaaaggggaaaccggagatgtggggcccatgggaccgcccggacccccaggtcctcgcgggcctgctggaccaaacggagcagacggaccccagggtcctcccggaggcgtcggaaacctgggaccacctggggagaaaggagaacctggagaatctggttccccaggaattcaaggagaacctggcgttaaaggaccgagaggcgagaggggagagaaaggcgaatctgggcagcccggcgaacctgggccccccggaccaaagggtcccacaggtgatgatggccccaagggaaatcccggccccgtgggattccccggggaccccggcccaccaggtgagggtggtccaagaggccaagacggggcgaagggagatcgaggcgaggacggggagccagggcagcccggaagccccggaccaacaggcgaaaacggaccaccaggtccactaggcaaaagaggcccagcaggtagccccggaagtgaaggacgacagggagggaaaggagctaagggggatccgggagcaatcggggcccctggaaagacgggtccagtgggaccggccggacctgcaggtaaacccggaccagacgggctccgtggactgcccggaagtgtcggccagcaagggcgccccggcgccaccggacaggcaggcccgccaggtcccgtgggaccccctggcctgccagggcttagaggggatgccggcgctaagggcgagaaaggccatcctggtctgatcggtttaatcgggcctcccggcgagcagggtgaaaagggcgatcgcgggctaccaggacctcaaggaagccctgggcagaagggtgagatgggcattcccggagcctcaggacccatcggaccaggcggaccccctggtctccctggcccagcaggacctaagggtgctaagggagccacaggaccaggcggtccaaagggggaaaaaggcgtgcagggcccacctggccaccctgggcccccaggagaggtcatccaacccttaccgatccagatgcctaagaagaccagaagatccgttgacggctcacggctcatgcaagaagacgaggctattccaacaggaggggctcccggctctcctggcgggcttgaagaaatctttggcagcttggactcgctacgcgaagaaattgagcaaatgcgcaggcctactggcacgcaagactctcccgctagaacatgccaagacctgaagctctgccaccccgagctacctgatggagaatattgggttgaccccaaccagggctgcgctcgcgatgcctttcgcgtattctgcaactttacagccgggggcgagacctgtgtgacgcctcgggatgatgtgacacagttctcttacgtcgatagcgagggctcccccgtcggtgtggttcagctcacctttctgaggctattatccgttagtgcccaccaagacgtctcctatccctgcagtggggcagccagagatggccccctgagactgagaggcgccaacgaagatgaactaagccccgagacttccccttacgtgaaggaattcagagatgggtgccaaacgcagcaaggacgtacagtactggaagtgagaacgccggttttagagcaattaccagtacttgatgcttctttcagcgaccttggagccccgccaaggagaggaggtgtacttttggggcccgtgtgttttatggggtag

SEQ ID NO: 232454 - DNA, 4890 bp, Artificial Sequence
  derived and/or modified sequence
atggagagatgttcccgatgccacaggctcctcctgcttcttccactcgttcttggactcagtgctgcaccgggatgggccggtgcgccccccgtggacgttctcagagctctgagattcccatctctgcccgacggagttagacgggctaaaggcatttgtcctgctgacgtcgcttatcgcgtggctaggcccgcccagctttccgcaccaactcgccagctatttcctggcggatttccaaaagattttagtctgctcactgtcgtccgaacacgacctggcctgcaagccccactgctgacactgtattctgcacaaggagtcagacaactgggcctggagctgggtcggcccgtgagatttctgtacgaagaccaaaccgggcgcccccaaccaccttcccaacctgtgttccggggtctgtccttggcggatggaaaatggcacagggtggcagtggctgttaaagggcaatctgttacactcattgtcgactgcaaaaaacgggttactcggcctctcccaagatcagcccggccagtactggacactcacggggtaattatcttcggagctcgcatcctggatgaagaagtttttgagggcgatgtgcaagaattggccatcgtaccaggcgtccaagcagcctatgagagttgtgaacaaaaggaactggagtgtgaaggtgggcagcgggagagaccgcagaatcaacagcctcacagggcacagaggtcccctcaacagcagccatcacgcctgcatcggccacagaatcaagagccgcagtcacaagcagcacacggaccaaggggcctgaagggggagaagggtgagccagccgtactagaaccaggcatgttagtggaaggaccaccaggcccggagggacccgcgggcctgatcgggccacctggcattcaagggaatcctgggcctgtgggggatcccggtgagagaggaccacctgggcgagcaggcctgccaggttccgatggtgcccccggtcctcctggtactagtctgatgctgccgttcagattcggatccggagggggtgataaaggacccgttgtcgcagcccaggaagcacaggctcaagcaattctccagcaggcccgactagcacttagaggtcccccgggaccaatgggttatactggtcgtcctggccctctcggacagcccggttcccccggcttaaaaggggaatccggcgatctaggaccccagggccccaggggaccgcaggggttgaccggtccccccggaaaggctgggcgtagaggcagagccggagctgatggagcaagaggtatgcccggcgacccgggagtaaaaggcgataggggtttcgatggtctgcctggccttcctggcgaaaagggacacaggggggatactggagctcaggggctacccggcccacctggcgaggatggagaaagaggagacgatggagagatcggcccaagagggttgccaggagagtcgggcccccgaggattattaggaccaaagggaccaccagggattccaggacccccaggagtgagaggaatggacgggccacagggacctaaagggagtctggggcctcagggcgaaccgggccctcccggccaacagggaacacccgggacacaaggtctgcctggaccccagggagcaattggcccacatggtgagaaaggcccacaaggcaagcctggcctgccagggatgccaggatcagatggcccgccaggccatcctggtaaagagggccctccaggaaccaaagggaatcaagggccctcagggcctcaaggcccccttggctacccggggccacgcggcgtgaaaggggtggacggaattaggggtttaaaggggcacaaaggggagaagggagaagatgggtttcctggatttaagggggatattggtgtcaaaggcgacaggggggaagttggcgtgcccgggagtaggggagaggacggccccgaaggacctaagggaagaaccggtcccactggggaccctgggcccccagggctgatgggggagaaagggaaactgggagttcctgggcttcccgggtatccaggacgacagggccccaaaggttcgttaggatttcccggttttcctggtgccagcggtgagaagggtgcgcgtggcctgtcagggaaaagcggaccaagaggagagagaggtccaacaggacctagggggcaacgcggaccgcggggcgccacagggaagtctggtgcgaagggaacaagtggcggagacggcccccacggaccaccaggtgaaagaggcctcccaggccctcagggccccaatggcttccccgggccgaagggaccacccgggccaccaggcaaagatgggctgcctggacaccccggccaaagaggcgaggtcggcttccaaggcaagacaggccctcccggcccgcccggggtggtaggcccccagggggctgcaggtgagacgggacctatgggcgagcgagggcaccccggacccccgggaccaccaggcgaacagggactgccagggactgccggaaaagagggcacaaaaggagatcctgggccccctggcgccccaggcaaggatgggccggcaggactgagaggattccccggtgaaagaggactcccgggaacagccgggggacctggactaaaagggaacgaaggaccctccggccctcccggacccgctggctcacccggggaacgaggggctgcagggtccggcggacccattggacctcctggcagacccgggcctcagggaccacccggcgcagcgggagagaagggagtgcctggggagaaaggaccaataggaccaacgggacgggatggtgtccagggacccgtgggactgccggggcctgccggcccccccggcgtcgcaggagaggacggcgataaaggcgaggtgggtgatcccggccaaaagggtacaaaaggtaacaaaggcgaacatgggcctccaggccctcctggacctataggaccagtgggacaaccaggagctgctggggcagatggagagcccggcgctcggggtccacaaggacattttggcgccaagggtgatgaagggacacgaggcttcaacgggcctcctggacctatcgggttacagggacttcccggcccatcaggcgagaaaggtgaaacaggcgacgtgggccccatgggtccccctggccctcccgggccccgcgggcctgccggaccaaatggagctgatggcccccaaggccctccaggtggggtggggaaccttggacctcctggcgaaaagggggaacctggtgagtcaggcagcccaggcattcaaggggagcccggggttaaaggccctagaggcgaacgtggggagaaaggtgagagcggacagcctggagaacccgggcctcccggtccgaagggcccaacaggcgatgatggacccaaaggcaatcctggcccggtgggctttcctggcgatcccggcccacctggagaaggcggacccagaggccaagacggcgctaagggtgatcgcggcgaggatggggaaccaggacagccgggtagtcctgggccaactggtgagaacgggccacctggacctttaggtaagcgggggccagctggtagccccgggagcgaaggcagacagggggggaaaggcgctaagggagaccccggggccatcggggccccgggtaagaccggtccagttggacctgcaggacctgcgggaaagccagggcctgatgggctgcggggccttccaggtagcgtggggcaacagggacgaccaggagcaactgggcaggcaggaccacctgggccagtcgggccacctggcttgcccggtctgaggggggatgcaggtgctaagggagagaaggggcatccaggcttgatcgggctgatagggccgcctggcgaacagggagaaaaaggcgacagaggcttgcccggcccgcaggggtcgcccgggcaaaagggcgagatgggcataccaggagcatcgggacctatcggaccgggcggaccaccagggctccccggacccgccggccctaaaggagctaagggcgcaacaggccccggtggcccaaagggggagaagggcgtgcaaggaccacctggacacccaggaccacccggagaggtgatccagcccctcccgattcaaatgcctaaaaagacaagaagatctgtcgatggttctcggctgatgcaagaagacgaggctatccccacaggcggcgcacccggaagtcccggcggcttggaagaaatctttggatctctcgacagcctcagagaggaaatcgaacaaatgcgtagacccaccggcacacaggattctcccgcccgaacctgccaggatttaaaattgtgccaccccgagctcccagatggggaatactgggttgatccaaaccagggctgcgcaagagatgcattcagagttttctgtaatttcacagcagggggagagacatgtgtgaccccccgcgacgatgtcacccaatttagttacgtggattccgagggctcacctgtgggcgtcgtgcaacttacatttctcaggcttctcagtgtgagcgctcaccaagacgtgtcatacccatgcagtggcgccgcaagagacgggcctcttcgtttaagaggggctaacgaagatgaactgtcacctgaaacctccccttacgtgaaagaatttagagatggatgtcaaacacaacagggccgaaccgtactcgaagttaggaccccggtcctggaacagctgcctgtgctcgatgcaagcttctcagacctgggtgctcctccaagaagaggcggtgttttactgggaccagtctgttttatgggttag

SEQ ID NO: 232455 - RNA, 4890 nt, Artificial Sequence
  derived and/or modified sequence
auggagagaugcucucggugucaucgacucuugcuucugcugccguugguuuuaggauugucagcugcgcccggcugggcaggugccccgccgguugacguuuugcgggcucucagguucccaucacugccugauggggugaggcgcgccaaggguauuuguccagccgacguggcauauaggguggcacgcccugcacagcuaucagccccaacacgucaguuguucccagguggcuuuccaaaagauuucucccugcuuacaguugugagaacccggccaggacugcaggccccacuuuuaacccuguauagugcccagggcgugcgucagcuagggcucgagcuuggucggccuguuagauucuuauaugaggaccagaccggccggccccaaccuccaucacagccaguguuccguggccuaucacuggccgacgggaaguggcacaggguugcuguggcugugaaagggcagagugugacgcucaucguugacugcaaaaagagagugacgcggccacuuccucgaucugcucgcccagugcuugacacacacggggugauuaucuucggagcucggaucuuagaugaggaaguguuugagggggauguccaggaacuugcaauugugccggggguucaggccgcguacgagucuugugaacagaaggagcucgagugugaaggcgggcaacgggaaagaccacagaaccagcagccgcaucgugcacaacgaucaccacagcaacagccuagccgccuccacagaccgcaaaaccaggaaccucaaucucaggcagcccauggcccccgcggacugaagggcgagaaaggcgaaccggccgugcucgaaccuggcauguugguagagggccccccagguccagaggggccugcugguuugaucgggccgccaggcauacaagguaaccccggccccguuggugaucccggagaaaggggucccccaggccgcgcaggacuucccggaagcgauggcgccccaggcccaccaggcacaagucuuaugcugccuuucagguucggguccggcggcggcgacaaggggcccguggucgcugcacaggaggcgcaggcccaggccauucuccagcaggccaggcuggcacugaggggacccccuggcccuaugggauacacuggucggcccgguccuuugggucagccugggucgccuggccucaaaggggaaaguggagaccucgggccacaggggccaagggguccccagggacugacaggcccuccgggcaaagcagggcggcgcgggcgcgccggagccgacggggcucgggguaugcccggggaucccggugucaagggggaucgaggcuuugacgggcuuccagguuugccgggagaaaagggacacagaggggacaccggugcacagggccuccccggaccacccggugaagauggagagcgaggcgacgacggggagaucgguccgagaggccugccgggggaauccggcccucgcggccugcuugguccuaagggacccccaggcaucccagguccccccggcgugaggggcauggacggaccgcagggcccuaaagggucccugggaccucagggagagccuggcccuccaggccagcaggggaccccaggcacucaaggacuccccgguccacagggagccauuggcccacacggggaaaaggggccucaggggaagcccggucuaccuggcaugccaggcucugacggaccaccaggccaccccggaaaggaggggccccccggcacuaagggaaaucaggggccaagcggaccgcaggggccacuugguuacccagggccccggggcgugaagggcgucgacgggaucagaggccugaaaggccacaagggcgaaaagggcgaagacggguuuccuggcuuuaagggcgauauuggcguaaaaggagauagaggagaggucggagugccugguucuaggggagaggacggaccagagggccccaaaggccgaacaggcccuacaggcgacccaggcccccccgggcucaugggcgaaaaaggcaaacuggggguccccggccuucccggguacccaggucgccagggcccaaaagguagccugggcuuccccggguucccaggugccagcggagagaaaggagccagaggacugucaggcaaaagugggccuagaggcgaacgcgguccaaccggaccacgcgggcagcgaggcccacggggagccacugguaaguccggcgcaaagggaacgagcgguggugacggaccacacgggcccccgggcgagagagggcucccaggaccucagggaccgaaugguuuucccggaccuaaaggaccaccaggaccccccggcaaagacggccuuccuggacaucccgggcagcgcggcgaaguggguuuccaaggcaagaccgguccgccaggcccgccaggagucguaggcccccaaggagccgcgggcgagacaggaccgaugggggaacguggccauccaggcccgcccggaccuccuggagagcagggccucccgggcaccgcaggaaaggaggguacuaagggagauccagguccucccggcgcaccuggaaaggauggaccugcugggcuacguggauucccgggcgaacguggacugccugguacagccggcggcccgggacugaaagguaacgaaggacccaguggaccgcccggucccgccgguucccccggagagcgcggugccgccggaucaggaggaccuauuggcccuccuggccggccuggcccacaggguccacccggagcagcaggcgagaagggcgugcccggagagaaagggccaauuggucccacuggcagggacggcgugcagggccccguuggucugcccgguccggcaggcccaccuggcguggcgggagaggauggugauaaaggagagguaggagacccuggacaaaaagggacaaaagggaacaagggcgaacaugggccuccaggaccuccggggccuaucgggccgguaggucagcccggagcagcuggcgcagacggggagccuggggccagggggccacaggggcauuucggugccaagggagaugaagguacucgcggguuuaacgggcccccgggcccaauaggucuccagggacugccagguccgaguggugaaaagggugagacaggugacguggggcccaugggcccaccagguccucccggcccccggggaccggccggccccaauggggccgacggcccgcaaggccccccuggagguguuggcaaucuggguccuccaggcgaaaagggcgagcccggugagucugggucgcccggcauucagggugaacccgguguuaaggggccacgaggugaacggggagagaagggcgaaagcgggcagccaggagagccaggcccccccggcccuaaaggcccuaccggcgacgacggucccaagggcaacccaggccccgugggauuucccggagacccaggacccccgggugaaggggggcccagagggcaagauggugccaaaggugaucguggcgaggauggcgaaccuggccagcccgguagcccuggcccaacaggcgaaaacgguccacccgguccacucgguaagagaggaccggccggaucuccugguucugagggccgacagggagguaagggagccaaaggcgaccccggggcuaucggugcuccuggaaagacagggcccgucgguccagcuggcccugcaggcaaacccgguccugauggccuuaggggacuaccuggauccguagggcagcagggacggccuggagccacaggccaggcugguccuccgggaccagucgguccaccgggccuacccggccugaggggggacgcuggcgccaaaggugagaagggccacccugggcucauuggccuuauagggccaccaggggaacagggugagaaaggggaccggggacuuccggggccacaggggaguccugggcagaagggggagauggguauuccuggggcaagugggccaaucggacccggggggccaccgggccuuccagggccggcagggccgaagggggcgaaaggagcuacggggccaggcgggcccaaaggcgagaaaggcguacaggggccuccagggcacccagggccaccaggcgaaguaauccaaccacucccuauacagaugcccaagaagacaagaaggaguguggacggcagcagacucaugcaggaggaugaagcaauucccacagggggggccccagggucaccgggcggccuagaggaaauauuugguucccucgauagccugagagaggaaauugagcaaaugagacgcccgacuggaacgcaggacuccccugcucggaccugucaagaucuuaagcugugucauccugagcucccugacggugaauacuggguggaccccaaccaggggugcgcgagggacgcuuucaggguuuuuugcaacuuuacagcuggaggcgagacuugcgugacuccccgcgaugaugucacacaguucuccuacguggacuccgaagguuccccagucggcgucguucagcugacuuuccucaggcugcugaguguuagugcccaccaggacgugagcuaccccuguagcggagccgcucgagacggcccucugaggcugcggggggcuaaugaagaugaauuaagcccggagacuucucccuaugucaaggaauucagagauggaugucaaacucagcagggaaggacugugcuggagguccgaaccccagucuuggaacagcucccuguuuuggacgcaaguuucuccgauuugggggcccccccaagacgcgguggcgugcuucugggcccuguauguuucaugggcuag

SEQ ID NO: 232456 - RNA, 4890 nt, Artificial Sequence
  derived and/or modified sequence
auggagagguguucucggugucacagacuccucuuacuguugccauuaguguugggauugucagcagccccuggcugggcaggcgccccuccuguggaugugcuucgugcccuucgguuucccagccuuccugauggagugagaagagcuaaaggcauauguccagccgacguggcguaucguguugccagacccgcccagcugagcgcuccgacccggcaacuguucccaggagguuuucccaaggacuucagcuugcugacugugguaagaacucggccagggcugcaagccccacuguugacccuguacagcgcccagggcguaaggcaacugggccucgaguuagggcgacccgucagauuucuguaugaggaucagacuggcagaccgcaaccuccaucacagcccguuuuucguggccuaucacuugcugacgggaaauggcaucgggucgcagucgcggugaaaggacaguccgucacccugaucguugauugcaaaaaacgggugaccaggccccugccuagaagcgcccggccagugcuggacacacacggagucaucauauucggagcaaggauccuugaugaagaggucuucgagggcgaugugcaggagcuugcaauagugccuggggugcaggccgcauacgagucaugugagcagaaggaguuggaaugugagggaggacagagagaacgaccccagaaucagcaaccacaucgcgcacagcgaaguccccagcaacaacccucccgccugcacagaccacagaaucaagagccucagucacaagcugcucacgguccucgaggcuugaagggagagaaaggggagcccgcaguccuggaacccggaauguugguugaggguccccccggccccgaaggccccgcagggcucaucgguccaccaggaauucaaggcaaccccggcccugucggugacccuggagaaaggggaccacccgggcgcgcaggacuucccggguccgauggggcucccgguccuccgggaaccucacuuauguugccauuccgauuugggaguggagggggcgauaaggggccugucguugccgcgcaggaagcgcaggcccaagccauccuccaacaggcucgcuuggcccugcggggcccgccuggccccaugggauauacuggacggcccggaccccugggccagccagguaguccgggccugaagggggaauccggugaucucggcccccaggguccccgugggccccagggacugacaggaccaccagguaaagccgggcgcagggguagggccggagccgacggagcacgggggaugcccggcgaccccgggguuaaaggagaccgcgguuucgauggccuucccggacuucccggugaaaagggccacaggggcgauacuggcgcccagggucugccgggaccaccuggggaggacggagagagaggcgaugacggugagauugggccacggggucuaccaggcgagucugggccucgggggcuccucggucccaaagggcccccuggaauuccuggaccuccagguguucgcggcauggaugggccccaggggcccaaaggaagucugggaccacaaggcgaaccaggaccucccggccagcagggaaccccuggaacucaggguuuaccuggcccacagggggcaaucgguccucacggcgagaaaggcccucaaggaaaaccugggcugcccggcaugccaggaagcgacggcccgccaggucacccaggaaaagaaggcccucccggcaccaagggaaaccagggccccuccggcccucagggcccacugggguaccccgguccacggggcgugaagggaguggacggcaucaggggguuaaagggucauaaaggcgaaaagggcgaagacggcuuuccaggcuuuaaaggcgacauagguguuaaaggcgauagaggcgaggugggcgugccuggcagcagaggcgaggacggaccugaaggaccuaagggaagaacaggaccaacuggugaucccggccccccgggccucaugggcgagaaaggcaagcuggggguucccgguuuaccugguuaucccggucgucagggucccaagggcagccugggguuccccggauucccaggugccuccggugaaaaaggcgcacgcgggcugagcggaaaaucuggcccacggggggagagagguccuaccggaccaagaggccaacguggcccacgcggggcuaccgggaagucaggcgcaaaggggacuucuggcggagacgggccccauggcccaccgggcgaaagaggacucccuggcccucagggccccaauggguuuccuggaccuaaaggucccccaggaccaccuggaaaggauggccuucccggacaccccggucagcggggcgaaguuggguuccagggcaagacagggcccccuggacccccuggugugguugggccacagggcgcugcaggagaaaccggcccuaugggggagcgugggcacccuggucccccugggccaccuggagaacagggccugccgggaacagcuggcaaagagggaacaaaaggggacccgggccccccaggagcuccgggcaaagaugggccggccggucucagagguuuuccgggggaacggggccuucccggcaccgccgggggacccggccucaagggcaaugaagggcccucaggaccacccgggcccgcagguucuccuggcgaaaggggagcagcuggcuccgggggacccaucggcccgccagggaggcccgguccgcagggaccaccaggagccgcaggcgagaaaggagucccuggcgagaaaggaccgauuggacccaccggaagagacggcguucagggccccguuggacuaccgggaccagccgggccccccggcguggcuggcgaagacggcgauaaaggggaggugggagacccaggccaaaagggcacuaaaggaaacaaaggcgagcaugggccacccgggccucccggaccuauuggcccuguuggccagccuggggccgccggugccgauggagagccuggagcacgagguccacagggacacuuuggugccaagggagacgagggcacccguggcuucaauggacccccugggccaaucggucugcaggggcugcccgguccaucuggugagaaaggcgaaacuggagacguugggccaauggguccaccagggccuccaggaccaagggggcccgcagguccuaacggcgcagacggcccucagggccccccugggggcguugggaaucuugggccaccuggggaaaagggcgaaccaggcgagagcggcucaccaggaauacagggagaaccuggcgugaaaggaccccgcggcgagcggggggaaaagggugaaucuggccagccgggagagccaggaccacccggaccaaaagguccaaccggagacgacggccccaagggcaauccagguccaguuggguuuccgggagauccuggcccaccgggggaaggcgggccccguggccaagauggggcaaaaggagaucgaggggaggacggggagcccgggcaacccggaucaccuggcccaacuggcgaaaacgggcccccagggccucugggcaaacgagggccggcuggcagccccgggagugaagggcggcaaggggguaagggcgcaaagggcgauccuggugcaauaggcgcuccuggaaaaaccggucccgucggccccgccggaccagcuggcaagccgggaccagacggacugcggggccucccaggcucagucggucaacaggggcgaccgggcgcaacgggucaagccggcccaccuggaccgguugguccacccggccucccggggcugaggggcgacgcaggcgcaaagggagagaagggccauccuggacuuaucggcuugauuggaccuccaggugaacagggagagaagggggacagaggucuacccggcccucagggaagucccggucagaagggugaaaugggaaucccuggggccagcggcccgauugggccagguggacccccuggacucccaggcccagccggcccaaagggggcaaagggagccaccggucccgguggcccaaagggagagaaaggaguucaggggcccccaggucacccuggaccuccaggcgaggugauccagccucugccaauucagaugcccaagaagacccgccggaguguggacggaucucgucugaugcaggaagaugaggcaauaccuacgggcggcgcccccgggaguccaggaggacuugaggagauuuuuggcagcuuggacagccugcgcgaggagauugagcagaugcggagaccuacuggaacucaggauagccccgcucgcacuugucaggaccucaagcucugccacccagaacuaccggauggcgaguauuggguggaucccaaucagggaugcgcccgggaugccuucagaguuuuuuguaauuuuacggccggcggugagacuugcguaacuccccgcgaugauguuacccaauucucuuacgucgauagcgaggggaguccaguaggaguugugcagcugacauuucugcgccuccuuagcguaucugcucaccaggauguuagcuacccuugcagcggugccgcuagggacggcccguuacgucugaggggggcaaacgaagaugaacucagcccugaaacauccccuuaugugaaagaguuucgcgacggcugccagacacagcagggaaggacugugcuggaaguaaggacuccugugcuggaacaguugccaguccuugacgccuccuuuuccgaucuuggagccccaccucgcagaggcggcguauugcuugggcccguuuguuuuaugggauag

SEQ ID NO: 232457 - RNA, 4890 nt, Artificial Sequence
  derived and/or modified sequence
auggaacgcugcucgagaugccaccgccucuuacuucuucugccacugguguugggcuugucagcagcaccaggaugggcuggcgccccuccgguagacguccuuagggcacugcgguuuccuucuuugccagauggaguucgaagggccaaagguaucugucccgccgauguugcauaccgaguggcgagaccagcgcagcugagugcuccgacaagacagcuuuucccaggaggauucccaaaggacuuuucauuacucacugucguucgcaccagaccgggacuucaggcccccuugcugacucuguauagcgcccagggaguuagacagcucggacuugaacuuggacgucccgugcgauuccuauaugaggaucagacgggcaggccucagcccccuagucaaccagucuuccgaggauugucauuggccgacgguaaauggcaccgaguugcuguggcagugaaaggucagagcgugacccuaaucguagauuguaaaaagcgcguuacccgcccucugccacguagcgccagaccuguucucgacacacauggcgucaucaucuucggcgccaggauucuggacgaggaagucuucgagggagaugugcaggaacuugcaauagugccaggcguucaggcagcguacgaaucgugugagcagaaggaacuggagugugaagguggacagagagaacggccacagaaccaacaaccucaccgagcacagagauccccccagcaacagcccagccgccuccaucggccccagaaccaagaaccucagagucaggccgcccacggccccagaggccugaagggcgagaagggagagccagcagugcuggaacccgggaugcuuguggaagggccuccaggaccagaagggccugccgguuugauaggucccccugggauucagggcaaucccggacccgugggcgaccccggcgaaagaggaccucccggacgcgcuggucuuccaggaucugauggggcccccgguccacccggcacuucacucaugcucccguuuagauucggaagcggagggggagauaaaggacccgugguugccgcucaggaagcccaggcucaagcgauucuccagcaagcuagacuagcucugagaggcccacccggcccuauggguuauacuggacgaccuggucccuugggccagccugggucccccgggcuaaagggcgagagcggcgaucucgguccucagggaccccgcggaccacaaggacugacugguccaccaggaaaagcgggacgccgaggccgcgcgggagccgacggcgcucgcggaaugccaggggauccaggagugaagggugauaggggguuugauggauuacccggacugccaggugagaagggacaucggggagauacaggggcccaggggcugccaggaccgccaggcgaggauggcgaaaggggggacgacggagaaaucggaccuaggggucugccaggcgagucaggcccaagaggucuguuaggcccgaagggcccuccagggauuccuggcccaccaggcgugcgaggaauggacgggccucagggucccaaagguagucugggcccccagggagagcccgguccuccuggccagcaggguaccccgggaacucaaggccugccugguccacaaggcgccaucggcccucacggcgagaaaggaccccagggaaaacccggucugcccgguaugccaggguccgauggaccacccggccacccgggaaaggaagggcccccaggcacgaagggcaaccaggguccuaguggaccccagggccccuuaggcuauccagggccaagaggugugaaagguguagaugggaucaggggauuaaaaggacacaagggcgaaaagggggaggacggcuucccaggcuucaaaggugauauaggugugaagggagauagaggcgagguuggcgucccaggcucuagaggagaggacggacccgagggaccaaaagguaggaccggaccgacgggggauccaggaccacccggcuugaugggugaaaagggcaagcugggcgugccuggauugccaggcuaucccggccgacagggcccaaaagguagccugggcuuccccggguucccaggugccagcggagagaaaggagccagaggacugucaggcaaaagugggccuagaggcgaacgcgguccaaccggaccacgcgggcagcgaggcccacggggagccacugguaaguccggcgcaaagggaacgagcgguggugacggaccacacgggcccccgggcgagagagggcucccaggaccucagggaccgaaugguuuucccggaccuaaaggaccaccaggaccccccggcaaagacggccuuccuggacaucccgggcagagaggagagguuggauuucagggcaagacggguccccccggcccaccaggugucguugggccccagggggcagcaggagaaaccggacccaugggagagaggggccaccccggacccccaggcccuccaggcgaacagggacuacccggcaccgcuggcaaagaggggacaaaaggcgauccuggcccgcccggggcaccaggaaaagacggcccagcaggacucagaggauucccaggggagaggggcuugccuggaacagccgggggcccaggacuuaaaggaaaugagggaccuucuggucccccugguccagcggguagcccaggggagagaggcgccgcgggcagcggcgguccgaucgggcccccuggaagaccggggccacaaggaccaccuggggcggcaggcgaaaaaggggugccgggagagaaaggcccaaucggcccgacuggaagagauggggugcagggcccagugggucuuccuggucccgcgggaccaccgggagucgccggcgaagauggagauaagggcgaagugggggacccaggacagaagggcaccaaggggaacaaaggcgagcacggaccacccggcccaccgggaccuauaggaccugucgggcaacccggcgcugccggggcagacggagagccgggcgcacgagguccccaaggacauuucggggcaaagggggacgagggaacacgcgguuuuaauggcccccccgggcccauuggacugcagggcuuaccagggccaucaggugagaaaggggaaaccggagauguggggcccaugggaccgcccggacccccagguccucgcgggccugcuggaccaaacggagcagacggaccccaggguccucccggaggcgucggaaaccugggaccaccuggggagaaaggagaaccuggagaaucugguuccccaggaauucaaggagaaccuggcguuaaaggaccgagaggcgagaggggagagaaaggcgaaucugggcagcccggcgaaccugggccccccggaccaaagggucccacaggugaugauggccccaagggaaaucccggccccgugggauuccccggggaccccggcccaccaggugagggugguccaagaggccaagacggggcgaagggagaucgaggcgaggacggggagccagggcagcccggaagccccggaccaacaggcgaaaacggaccaccagguccacuaggcaaaagaggcccagcagguagccccggaagugaaggacgacagggagggaaaggagcuaagggggauccgggagcaaucggggccccuggaaagacggguccagugggaccggccggaccugcagguaaacccggaccagacgggcuccguggacugcccggaagugucggccagcaagggcgccccggcgccaccggacaggcaggcccgccaggucccgugggacccccuggccugccagggcuuagaggggaugccggcgcuaagggcgagaaaggccauccuggucugaucgguuuaaucgggccucccggcgagcagggugaaaagggcgaucgcgggcuaccaggaccucaaggaagcccugggcagaagggugagaugggcauucccggagccucaggacccaucggaccaggcggacccccuggucucccuggcccagcaggaccuaagggugcuaagggagccacaggaccaggcgguccaaagggggaaaaaggcgugcagggcccaccuggccacccugggcccccaggagaggucauccaacccuuaccgauccagaugccuaagaagaccagaagauccguugacggcucacggcucaugcaagaagacgaggcuauuccaacaggaggggcucccggcucuccuggcgggcuugaagaaaucuuuggcagcuuggacucgcuacgcgaagaaauugagcaaaugcgcaggccuacuggcacgcaagacucucccgcuagaacaugccaagaccugaagcucugccaccccgagcuaccugauggagaauauuggguugaccccaaccagggcugcgcucgcgaugccuuucgcguauucugcaacuuuacagccgggggcgagaccugugugacgccucgggaugaugugacacaguucucuuacgucgauagcgagggcucccccgucggugugguucagcucaccuuucugaggcuauuauccguuagugcccaccaagacgucuccuaucccugcaguggggcagccagagauggcccccugagacugagaggcgccaacgaagaugaacuaagccccgagacuuccccuuacgugaaggaauucagagaugggugccaaacgcagcaaggacguacaguacuggaagugagaacgccgguuuuagagcaauuaccaguacuugaugcuucuuucagcgaccuuggagccccgccaaggagaggagguguacuuuuggggcccguguguuuuaugggguag

SEQ ID NO: 232458 - RNA, 4890 nt, Artificial Sequence
  derived and/or modified sequence
auggagagauguucccgaugccacaggcuccuccugcuucuuccacucguucuuggacucagugcugcaccgggaugggccggugcgccccccguggacguucucagagcucugagauucccaucucugcccgacggaguuagacgggcuaaaggcauuuguccugcugacgucgcuuaucgcguggcuaggcccgcccagcuuuccgcaccaacucgccagcuauuuccuggcggauuuccaaaagauuuuagucugcucacugucguccgaacacgaccuggccugcaagccccacugcugacacuguauucugcacaaggagucagacaacugggccuggagcugggucggcccgugagauuucuguacgaagaccaaaccgggcgcccccaaccaccuucccaaccuguguuccggggucuguccuuggcggauggaaaauggcacaggguggcaguggcuguuaaagggcaaucuguuacacucauugucgacugcaaaaaacggguuacucggccucucccaagaucagcccggccaguacuggacacucacgggguaauuaucuucggagcucgcauccuggaugaagaaguuuuugagggcgaugugcaagaauuggccaucguaccaggcguccaagcagccuaugagaguugugaacaaaaggaacuggagugugaaggugggcagcgggagagaccgcagaaucaacagccucacagggcacagagguccccucaacagcagccaucacgccugcaucggccacagaaucaagagccgcagucacaagcagcacacggaccaaggggccugaagggggagaagggugagccagccguacuagaaccaggcauguuaguggaaggaccaccaggcccggagggacccgcgggccugaucgggccaccuggcauucaagggaauccugggccugugggggaucccggugagagaggaccaccugggcgagcaggccugccagguuccgauggugcccccgguccuccugguacuagucugaugcugccguucagauucggauccggagggggugauaaaggacccguugucgcagcccaggaagcacaggcucaagcaauucuccagcaggcccgacuagcacuuagaggucccccgggaccaauggguuauacuggucguccuggcccucucggacagcccgguucccccggcuuaaaaggggaauccggcgaucuaggaccccagggccccaggggaccgcagggguugaccgguccccccggaaaggcugggcguagaggcagagccggagcugauggagcaagagguaugcccggcgacccgggaguaaaaggcgauagggguuucgauggucugccuggccuuccuggcgaaaagggacacaggggggauacuggagcucaggggcuacccggcccaccuggcgaggauggagaaagaggagacgauggagagaucggcccaagaggguugccaggagagucgggcccccgaggauuauuaggaccaaagggaccaccagggauuccaggacccccaggagugagaggaauggacgggccacagggaccuaaagggagucuggggccucagggcgaaccgggcccucccggccaacagggaacacccgggacacaaggucugccuggaccccagggagcaauuggcccacauggugagaaaggcccacaaggcaagccuggccugccagggaugccaggaucagauggcccgccaggccauccugguaaagagggcccuccaggaaccaaagggaaucaagggcccucagggccucaaggcccccuuggcuacccggggccacgcggcgugaaagggguggacggaauuagggguuuaaaggggcacaaaggggagaagggagaagauggguuuccuggauuuaagggggauauuggugucaaaggcgacaggggggaaguuggcgugcccgggaguaggggagaggacggccccgaaggaccuaagggaagaaccggucccacuggggacccugggcccccagggcugaugggggagaaagggaaacugggaguuccugggcuucccggguauccaggacgacagggccccaaagguucguuaggauuucccgguuuuccuggugccagcggugagaagggugcgcguggccugucagggaaaagcggaccaagaggagagagagguccaacaggaccuagggggcaacgcggaccgcggggcgccacagggaagucuggugcgaagggaacaaguggcggagacggcccccacggaccaccaggugaaagaggccucccaggcccucagggccccaauggcuuccccgggccgaagggaccacccgggccaccaggcaaagaugggcugccuggacaccccggccaaagaggcgaggucggcuuccaaggcaagacaggcccucccggcccgcccggggugguaggcccccagggggcugcaggugagacgggaccuaugggcgagcgagggcaccccggacccccgggaccaccaggcgaacagggacugccagggacugccggaaaagagggcacaaaaggagauccugggcccccuggcgccccaggcaaggaugggccggcaggacugagaggauuccccggugaaagaggacucccgggaacagccgggggaccuggacuaaaagggaacgaaggacccuccggcccucccggacccgcuggcucacccggggaacgaggggcugcaggguccggcggacccauuggaccuccuggcagacccgggccucagggaccacccggcgcagcgggagagaagggagugccuggggagaaaggaccaauaggaccaacgggacgggaugguguccagggacccgugggacugccggggccugccggcccccccggcgucgcaggagaggacggcgauaaaggcgaggugggugaucccggccaaaaggguacaaaagguaacaaaggcgaacaugggccuccaggcccuccuggaccuauaggaccagugggacaaccaggagcugcuggggcagauggagagcccggcgcucgggguccacaaggacauuuuggcgccaagggugaugaagggacacgaggcuucaacgggccuccuggaccuaucggguuacagggacuucccggcccaucaggcgagaaaggugaaacaggcgacgugggccccaugggucccccuggcccucccgggccccgcgggccugccggaccaaauggagcugauggcccccaaggcccuccaggugggguggggaaccuuggaccuccuggcgaaaagggggaaccuggugagucaggcagcccaggcauucaaggggagcccgggguuaaaggcccuagaggcgaacguggggagaaaggugagagcggacagccuggagaacccgggccucccgguccgaagggcccaacaggcgaugauggacccaaaggcaauccuggcccggugggcuuuccuggcgaucccggcccaccuggagaaggcggacccagaggccaagacggcgcuaagggugaucgcggcgaggauggggaaccaggacagccggguaguccugggccaacuggugagaacgggccaccuggaccuuuagguaagcgggggccagcugguagccccgggagcgaaggcagacagggggggaaaggcgcuaagggagaccccggggccaucggggccccggguaagaccgguccaguuggaccugcaggaccugcgggaaagccagggccugaugggcugcggggccuuccagguagcguggggcaacagggacgaccaggagcaacugggcaggcaggaccaccugggccagucgggccaccuggcuugcccggucugaggggggaugcaggugcuaagggagagaaggggcauccaggcuugaucgggcugauagggccgccuggcgaacagggagaaaaaggcgacagaggcuugcccggcccgcaggggucgcccgggcaaaagggcgagaugggcauaccaggagcaucgggaccuaucggaccgggcggaccaccagggcuccccggacccgccggcccuaaaggagcuaagggcgcaacaggccccgguggcccaaagggggagaagggcgugcaaggaccaccuggacacccaggaccacccggagaggugauccagccccucccgauucaaaugccuaaaaagacaagaagaucugucgaugguucucggcugaugcaagaagacgaggcuauccccacaggcggcgcacccggaagucccggcggcuuggaagaaaucuuuggaucucucgacagccucagagaggaaaucgaacaaaugcguagacccaccggcacacaggauucucccgcccgaaccugccaggauuuaaaauugugccaccccgagcucccagauggggaauacuggguugauccaaaccagggcugcgcaagagaugcauucagaguuuucuguaauuucacagcagggggagagacaugugugaccccccgcgacgaugucacccaauuuaguuacguggauuccgagggcucaccugugggcgucgugcaacuuacauuucucaggcuucucagugugagcgcucaccaagacgugucauacccaugcaguggcgccgcaagagacgggccucuucguuuaagaggggcuaacgaagaugaacugucaccugaaaccuccccuuacgugaaagaauuuagagauggaugucaaacacaacagggccgaaccguacucgaaguuaggaccccgguccuggaacagcugccugugcucgaugcaagcuucucagaccugggugcuccuccaagaagaggcgguguuuuacugggaccagucuguuuuauggguuag

SEQ ID NO: 232459 - protein, 1736 aa, Artificial Sequence
  derived and/or modified sequence
MERCSRCHRLLLLLPLVLGLSAAPGWAGAPPVDVLRALRFPSLPDGVRRAKGICPADVAYRVARPAQLSAPTRQLFPGGFPKDFSLLTVVRTRPGLQAPLLTLYSAQGVRQLGLELGRPVRFLYEDQTGRPQPPSQPVFRGLSLADGKWHRVAVAVKGQSVTLIVDCKKRVTRPLPRSARPVLDTHGVIIFGARILDEEVFEGDVQELAIVPGVQAAYESCEQKELECEGGQRERPQNQQPHRAQRSPQQQPSRLHRPQNQEPQSQPTESLYYDYEPPYYDVMTTGTTPDYQDPTPGEEEEILESSLLPPLEEEQTDLQVPPTADRFQAEEYGEGGTDPPEGPYDYTYGYGDDYREETELGPALSAETAHSGAAAHGPRGLKGEKGEPAVLEPGMLVEGPPGPEGPAGLIGPPGIQGNPGPVGDPGERGPPGRAGLPGSDGAPGPPGTSLMLPFRFGSGGGDKGPVVAAQEAQAQAILQQARLALRGPPGPMGYTGRPGPLGQPGSPGLKGESGDLGPQGPRGPQGLTGPPGKAGRRGRAGADGARGMPGDPGVKGDRGFDGLPGLPGEKGHRGDTGAQGLPGPPGEDGERGDDGEIGPRGLPGESGPRGLLGPKGPPGIPGPPGVRGMDGPQGPKGSLGPQGEPGPPGQQGTPGTQGLPGPQGAIGPHGEKGPQGKPGLPGMPGSDGPPGHPGKEGPPGTKGNQGPSGPQGPLGYPGPRGVKGVDGIRGLKGHKGEKGEDGFPGFKGDIGVKGDRGEVGVPGSRGEDGPEGPKGRTGPTGDPGPPGLMGEKGKLGVPGLPGYPGRQGPKGSLGFPGFPGASGEKGARGLSGKSGPRGERGPTGPRGQRGPRGATGKSGAKGTSGGDGPHGPPGERGLPGPQGPNGFPGPKGPPGPPGKDGLPGHPGQRGEVGFQGKTGPPGPPGVVGPQGAAGETGPMGERGHPGPPGPPGEQGLPGTAGKEGTKGDPGPPGAPGKDGPAGLRGFPGERGLPGTAGGPGLKGNEGPSGPPGPAGSPGERGAAGSGGPIGPPGRPGPQGPPGAAGEKGVPGEKGPIGPTGRDGVQGPVGLPGPAGPPGVAGEDGDKGEVGDPGQKGTKGNKGEHGPPGPPGPIGPVGQPGAAGADGEPGARGPQGHFGAKGDEGTRGFNGPPGPIGLQGLPGPSGEKGETGDVGPMGPPGPPGPRGPAGPNGADGPQGPPGGVGNLGPPGEKGEPGESGSPGIQGEPGVKGPRGERGEKGESGQPGEPGPPGPKGPTGDDGPKGNPGPVGFPGDPGPPGEGGPRGQDGAKGDRGEDGEPGQPGSPGPTGENGPPGPLGKRGPAGSPGSEGRQGGKGAKGDPGAIGAPGKTGPVGPAGPAGKPGPDGLRGLPGSVGQQGRPGATGQAGPPGPVGPPGLPGLRGDAGAKGEKGHPGLIGLIGPPGEQGEKGDRGLPGPQGSPGQKGEMGIPGASGPIGPGGPPGLPGPAGPKGAKGATGPGGPKGEKGVQGPPGHPGPPGEVIQPLPIQMPKKTRRSVDGSRLMQEDEAIPTGGAPGSPGGLEEIFGSLDSLREEIEQMRRPTGTQDSPARTCQDLKLCHPELPDGEYWVDPNQGCARDAFRVFCNFTAGGETCVTPRDDVTQFSYVDSEGSPVGVVQLTFLRLLSVSAHQDVSYPCSGAARDGPLRLRGANEDELSPETSPYVKEFRDGCQTQQGRTVLEVRTPVLEQLPVLDASFSDLGAPPRRGGVLLGPVCFMG

SEQ ID NO: 232460 - protein, 1715 aa, Artificial Sequence
  derived and/or modified sequence
MERCSRCHRLLLLLPLVLGLSAAPGWAGAPPVDVLRALRFPSLPDGVRRAKGICPADVAYRVARPAQLSAPTRQLFPGGFPKDFSLLTVVRTRPGLQAPLLTLYSAQGVRQLGLELGRPVRFLYEDQTGRPQPPSQPVFRGLSLADGKWHRVAVAVKGQSVTLIVDCKKRVTRPLPRSARPVLDTHGVIIFGARILDEEVFEGDVQELAIVPGVQAAYESCEQKELECEGGQRERPQNQQPHRAQRSPQQQPSRLHRPQNQEPQSQPTESLYYDYEPPYYDVMTTGTTPDYQEQTDLQVPPTADRFQAEEYGEGGTDPPEGPYDYTYGYGDDYREETELGPALSAETAHSGAAAHGPRGLKGEKGEPAVLEPGMLVEGPPGPEGPAGLIGPPGIQGNPGPVGDPGERGPPGRAGLPGSDGAPGPPGTSLMLPFRFGSGGGDKGPVVAAQEAQAQAILQQARLALRGPPGPMGYTGRPGPLGQPGSPGLKGESGDLGPQGPRGPQGLTGPPGKAGRRGRAGADGARGMPGDPGVKGDRGFDGLPGLPGEKGHRGDTGAQGLPGPPGEDGERGDDGEIGPRGLPGESGPRGLLGPKGPPGIPGPPGVRGMDGPQGPKGSLGPQGEPGPPGQQGTPGTQGLPGPQGAIGPHGEKGPQGKPGLPGMPGSDGPPGHPGKEGPPGTKGNQGPSGPQGPLGYPGPRGVKGVDGIRGLKGHKGEKGEDGFPGFKGDIGVKGDRGEVGVPGSRGEDGPEGPKGRTGPTGDPGPPGLMGEKGKLGVPGLPGYPGRQGPKGSLGFPGFPGASGEKGARGLSGKSGPRGERGPTGPRGQRGPRGATGKSGAKGTSGGDGPHGPPGERGLPGPQGPNGFPGPKGPPGPPGKDGLPGHPGQRGEVGFQGKTGPPGPPGVVGPQGAAGETGPMGERGHPGPPGPPGEQGLPGTAGKEGTKGDPGPPGAPGKDGPAGLRGFPGERGLPGTAGGPGLKGNEGPSGPPGPAGSPGERGAAGSGGPIGPPGRPGPQGPPGAAGEKGVPGEKGPIGPTGRDGVQGPVGLPGPAGPPGVAGEDGDKGEVGDPGQKGTKGNKGEHGPPGPPGPIGPVGQPGAAGADGEPGARGPQGHFGAKGDEGTRGFNGPPGPIGLQGLPGPSGEKGETGDVGPMGPPGPPGPRGPAGPNGADGPQGPPGGVGNLGPPGEKGEPGESGSPGIQGEPGVKGPRGERGEKGESGQPGEPGPPGPKGPTGDDGPKGNPGPVGFPGDPGPPGEGGPRGQDGAKGDRGEDGEPGQPGSPGPTGENGPPGPLGKRGPAGSPGSEGRQGGKGAKGDPGAIGAPGKTGPVGPAGPAGKPGPDGLRGLPGSVGQQGRPGATGQAGPPGPVGPPGLPGLRGDAGAKGEKGHPGLIGLIGPPGEQGEKGDRGLPGPQGSPGQKGEMGIPGASGPIGPGGPPGLPGPAGPKGAKGATGPGGPKGEKGVQGPPGHPGPPGEVIQPLPIQMPKKTRRSVDGSRLMQEDEAIPTGGAPGSPGGLEEIFGSLDSLREEIEQMRRPTGTQDSPARTCQDLKLCHPELPDGEYWVDPNQGCARDAFRVFCNFTAGGETCVTPRDDVTQFSYVDSEGSPVGVVQLTFLRLLSVSAHQDVSYPCSGAARDGPLRLRGANEDELSPETSPYVKEFRDGCQTQQGRTVLEVRTPVLEQLPVLDASFSDLGAPPRRGGVLLGPVCFMG

SEQ ID NO: 232461 - protein, 624 aa, Artificial Sequence
  derived and/or modified sequence
MERCSRCHRLLLLLPLVLGLSAAPGWAGAPPVDVLRALRFPSLPDGVRRAKGICPADVAYRVARPAQLSAPTRQLFPGGFPKDFSLLTVVRTRPGLQAPLLTLYSAQGVRQLGLELGRPVRFLYEDQTGRPQPPSQPVFRGLSLADGKWHRVAVAVKGQSVTLIVDCKKRVTRPLPRSARPVLDTHGVIIFGARILDEEVFEGDVQELAIVPGVQAAYESCEQKELECEGGQRERPQNQQPHRAQRSPQQQPSRLHRPQNQEPQSQPTESLYYDYKPPYYDVMTTGTTPDYQDPTPGEEEEILESSLLPPLEEEQTDLQVPPTADRFQAEEYGEGGTDPPEGPYDYTYGYGDDYREETELGPALSAETAHSGAAAHGPRGLKGEKGEPAVLEPGMLVEGPPGPEGPAGLIGPPGIQGNPGPVGDPGERGPPGRAGLPGSDGAPGPPGTSLMLPFRFGSGGGDKGPVVAAQEAQAQAILQQARLALRGPPGPMGYTGRPGPLGQPGSPGLKGESGDLGPQGPRGPQGLTGPPGKAGRRGRAGADGARGMPGDPGVKGDRGFDGLPGLPGEKGHRGDTGAQGLPGPPGEDGERGDDGEIGPRGLPGESGPRGLLGPKGPPGIPGPP

SEQ ID NO: 232462 - protein, 624 aa, Artificial Sequence
  derived and/or modified sequence
MERCSRCHRLLLLLPLVLGLSAAPGWAGAPPVDVLRALRFPSLPDGVRRAKGICPADVAYRVARPAQLSAPTRQLFPGGFPKDFSLLTVVRTRPGLQAPLLTLYSAQGVRQLGLELGRPVRFLYEDQTGRPQPPSQPVFRGLSLADGKWHRVAVAVKGQSVTLIVDCKKRVTRPLPRSARPVLDTHGVIIFGARILDEEVFEGDVQELAIVPGVQAAYESCEQKELECEGGQRERPQNQQPHRAQRSPQQQPSRLHRPQNQEPQSQPTESLYYDYEPPYYDVMTTGTTPDYQDPTPGEEEEILESSLLPPLEEEQTDLQVPPTADRFQAEEYGEGGTDPPEGPYDYTYGYGDDYREETELGPALSAETAHSGAAAHGPRGLKGEKGEPAVLEPGMLVEGPPGPEGPAGLIGPPGIQGNPGPVGDPGERGPPGRAGLPGSDGAPGPPGTSLMLPFRFGSGGGDKGPVVAAQEAQAQAILQQARLALRGPPGPMGYTGRPGPLGQPGSPGLKGESGDLGPQGPRGPQGLTGPPGKAGRRGRAGADGARGMPGDPGVKGDRGFDGLPGLPGEKGHRGDTGAQGLPGPPGEDGERGDDGEIGPRGLPGESGPRGLLGPKGPPGIPGPP

SEQ ID NO: 232463 - protein, 597 aa, Artificial Sequence
  derived and/or modified sequence
  misc_feature (1)..(1): Xaa can be any naturally occurring amino acid
XAPPVDVLRALRFPSLPDGVRRAKGICPADVAYRVARPAQLSAPTRQLFPGGFPKDFSLLTVVRTRPGLQAPLLTLYSAQGVRQLGLELGRPVRFLYEDQTGRPQPPSQPVFRGLSLADGKWHRVAVAVKGQSVTLIVDCKKRVTRPLPRSARPVLDTHGVIIFGARILDEEVFEGDVQELAIVPGVQAAYESCEQKELECEGGQRERPQNQQPHRAQRSPQQQPSRLHRPQNQEPQSQPTESLYYDYKPPYYDVMTTGTTPDYQDPTPGEEEEILESSLLPPLEEEQTDLQVPPTADRFQAEEYGEGGTDPPEGPYDYTYGYGDDYREETELGPALSAETAHSGAAAHGPRGLKGEKGEPAVLEPGMLVEGPPGPEGPAGLIGPPGIQGNPGPVGDPGERGPPGRAGLPGSDGAPGPPGTSLMLPFRFGSGGGDKGPVVAAQEAQAQAILQQARLALRGPPGPMGYTGRPGPLGQPGSPGLKGESGDLGPQGPRGPQGLTGPPGKAGRRGRAGADGARGMPGDPGVKGDRGFDGLPGLPGEKGHRGDTGAQGLPGPPGEDGERGDDGEIGPRGLPGESGPRGLLGPKGPPGIPGPP

SEQ ID NO: 232464 - protein, 624 aa, Artificial Sequence
  derived and/or modified sequence
MERCSRCHRLLLLLPLVLGLSAAPGWAGAPPVDVLRALRFPSLPDGVRRAKGICPADVAYRVARPAQLSAPTRQLFPGGFPKDFSLLTVVRTRPGLQAPLLTLYSAQGVRQLGLELGPPVRFLYEDQTGRPQPPSQPVFRGLSLADGKWHRVAVAVKGQSVTLIVDCKKRVTRPLPRSARPVLDTHGVIIFGARILDEEVFEGDVQELAIVPGVQAAYESCEQKELECEGGQRERPQNQQPHRAQRSPQQQPSRLHRPQNQEPQSQPTESLYYDYKPPYYDVMTTGTTPDYQDPTPGEEEEILESSLLPPLEEEQTDLQVPPTADRFQAEEYGEGGTDPPEGPYDYTYGYGDDYREETELGPALSAETAHSGAAAHGPRGLKGEKGEPAVLEPGMLVEGPPGPEGPAGLIGPPGIQGNPGPVGDPGERGPPGRAGLPGSDGAPGPPGTSLMLPFRFGSGGGDKGPVVAAQEAQAQAILQQARLALRGPPGPMGYTGRPGPLGQPGSPGLKGESGDLGPQGPRGPQGLTGPPGKAGRRGRAGADGARGMPGDPGVKGDRGFDGLPGLPGEKGHRGDTGAQGLPGPPGEDGERGDDGEIGPRGLPGESGPRGLLGPKGPPGIPGPP

SEQ ID NO: 232465 - protein, 1715 aa, Artificial Sequence
  derived and/or modified sequence
MERCSRCHRLLLLLPLVLGLSAAPGWAGAPPVDVLRALRFPSLPDGVRRAKGICPADVAYRVARPAQLSAPTRQLFPGGFPKDFSLLTVVRTRPGLQAPLLTLYSAQGVRQLGLELGRPVRFLYEDQTGRPQPPSQPVFRGLSLADGKWHRVAVAVKGQSVTLIVDCKKRVTRPLPRSARPVLDTHGVIIFGARILDEEVFEGDVQELAIVPGVQAAYESCEQKELECEGGQRERPQNQQPHRAQRSPQQQPSRLHRPQNQEPQSQPTESLYYDYEPPYYDVMTTGTTPDYQEQTDLQVPPTADRFQAEEYGEGGTDPPEGPYDYTYGYGDDYREETELGPALSAETAHSGAAAHGPRGLKGEKGEPAVLEPGMLVEGPPGPEGPAGLIGPPGIQGNPGPVGDPGERGPPGRAGLPGSDGAPGPPGTSLMLPFRFGSGGGDKGPVVAAQEAQAQAILQQARLALRGPPGPMGYTGRPGPLGQPGSPGLKGESGDLGPQGPRGPQGLTGPPGKAGRRGRAGADGARGMPGDPGVKGDRGFDGLPGLPGEKGHRGDTGAQGLPGPPGEDGERGDDGEIGPRGLPGESGPRGLLGPKGPPGIPGPPGVRGMDGPQGPKGSLGPQGEPGPPGQQGTPGTQGLPGPQGAIGPHGEKGPQGKPGLPGMPGSDGPPGHPGKEGPPGTKGNQGPSGPQGPLGYPGPRGVKGVDGIRGLKGHKGEKGEDGFPGFKGDIGVKGDRGEVGVPGSRGEDGPEGPKGRTGPTGDPGPPGLMGEKGKLGVPGLPGYPGRQGPKGSLGFPGFPGASGEKGARGLSGKSGPRGERGPTGPRGQRGPRGATGKSGAKGTSGGDGPHGPPGERGLPGPQGPNGFPGPKGPLGPPGKDGLPGHPGQRGEVGFQGKTGPPGPPGVVGPQGAAGETGPMGERGHPGPPGPPGEQGLPGTAGKEGTKGDPGPPGAPGKDGPAGLRGFPGERGLPGTAGGPGLKGNEGPSGPPGPAGSPGERGAAGSGGPIGPPGRPGPQGPPGAAGEKGVPGEKGPIGPTGRDGVQGPVGLPGPAGPPGVAGEDGDKGEVGDPGQKGTKGNKGEHGPPGPPGPIGPVGQPGAAGADGEPGARGPQGHFGAKGDEGTRGFNGPPGPIGLQGLPGPSGEKGETGDVGPMGPPGPPGPRGPAGPNGADGPQGPPGGVGNLGPPGEKGEPGESGSPGIQGEPGVKGPRGERGEKGESGQPGEPGPPGPKGPTGDDGPKGNPGPVGFPGDPGPPGEGGPRGQDGAKGDRGEDGEPGQPGSPGPTGENGPPGPLGKRGPAGSPGSEGRQGGKGAKGDPGAIGAPGKTGPVGPAGPAGKPGPDGLRGLPGSVGQQGRPGATGQAGPPGPVGPPGLPGLRGDAGAKGEKGHPGLIGLIGPPGEQGEKGDRGLPGPQGSPGQKGEMGIPGASGPIGPGGPPGLPGPAGPKGAKGATGPGGPKGEKGVQGPPGHPGPPGEVIQPLPIQMPKKTRRSVDGSRLMQEDEAIPTGGAPGSPGGLEEIFGSLDSLREEIEQMRRPTGTQDSPARTCQDLKLCHPELPDGEYWVDPNQGCARDAFRVFCNFTAGGETCVTPRDDVTQFSYVDSEGSPVGVVQLTFLRLLSVSAHQDVSYPCSGAARDGPLRLRGANEDELSPETSPYVKEFRDGCQTQQGRTVLEVRTPVLEQLPVLDASFSDLGAPPRRGGVLLGPVCFMG

SEQ ID NO: 232466 - protein, 1736 aa, Artificial Sequence
  derived and/or modified sequence
MERCSRCHRLLLLLPLVLGLSAAPGWAGAPPVDVLRALRFPSLPDGVRRAKGICPADVAYRVARPAQLSAPTRQLFPGGFPKDFSLLTVVRTRPGLQAPLLTLYSAQGVRQLGLELGRPVRFLYEDQTGRPQPPSQPVFRGLSLADGKWHRVAVAVKGQSVTLIVDCKKRVTRPLPRSARPVLDTHGVIIFGARILDEEVFEGDVQELAIVPGVQAAYESCEQKELECEGGQRERPQNQQPHRAQRSPQQQPSRLHRPQNQEPQSQPTESLYYDYEPPYYDVMTTGTTPDYQDPTPGEEEEILESSLLPPLEEEQTDLQVPPTADRFQAEEYGEGGTDPPEGPYDYTYGYGDDYREETELGPALSAETAHSGAAAHGPRGLKGEKGEPAVLEPGMLVEGPPGPEGPAGLIGPPGIQGNPGPVGDPGERGPPGRAGLPGSDGAPGPPGTSLMLPFRFGSGGGDKGPVVAAQEAQAQAILQQARLALRGPPGPMGYTGRPGPLGQPGSPGLKGESGDLGPQGPRGPQGLTGPPGKAGRRGRAGADGARGMPGDPGVKGDRGFDGLPGLPGEKGHRGDTGAQGLPGPPGEDGERGDDGEIGPRGLPGESGPRGLLGPKGPPGIPGPPGVRGMDGPQGPKGSLGPQGEPGPPGQQGTPGTQGLPGPQGAIGPHGEKGPQGKPGLPGMPGSDGPPGHPGKEGPPGTKGNQGPSGPQGPLGYPGPRGVKGVDGIRGLKGHKGEKGEDGFPGFKGDIGVKGDRGEVGVPGSRGEDGPEGPKGRTGPTGDPGPPGLMGEKGKLGVPGLPGYPGRQGPKGSLGFPGFPGASGEKGARGLSGKSGPRGERGPTGPRGQRGPRGATGKSGAKGTSGGDGPHGPPGERGLPGPQGPNGFPGPKGPLGPPGKDGLPGHPGQRGEVGFQGKTGPPGPPGVVGPQGAAGETGPMGERGHPGPPGPPGEQGLPGTAGKEGTKGDPGPPGAPGKDGPAGLRGFPGERGLPGTAGGPGLKGNEGPSGPPGPAGSPGERGAAGSGGPIGPPGRPGPQGPPGAAGEKGVPGEKGPIGPTGRDGVQGPVGLPGPAGPPGVAGEDGDKGEVGDPGQKGTKGNKGEHGPPGPPGPIGPVGQPGAAGADGEPGARGPQGHFGAKGDEGTRGFNGPPGPIGLQGLPGPSGEKGETGDVGPMGPPGPPGPRGPAGPNGADGPQGPPGGVGNLGPPGEKGEPGESGSPGIQGEPGVKGPRGERGEKGESGQPGEPGPPGPKGPTGDDGPKGNPGPVGFPGDPGPPGEGGPRGQDGAKGDRGEDGEPGQPGSPGPTGENGPPGPLGKRGPAGSPGSEGRQGGKGAKGDPGAIGAPGKTGPVGPAGPAGKPGPDGLRGLPGSVGQQGRPGATGQAGPPGPVGPPGLPGLRGDAGAKGEKGHPGLIGLIGPPGEQGEKGDRGLPGPQGSPGQKGEMGIPGASGPIGPGGPPGLPGPAGPKGAKGATGPGGPKGEKGVQGPPGHPGPPGEVIQPLPIQMPKKTRRSVDGSRLMQEDEAIPTGGAPGSPGGLEEIFGSLDSLREEIEQMRRPTGTQDSPARTCQDLKLCHPELPDGEYWVDPNQGCARDAFRVFCNFTAGGETCVTPRDDVTQFSYVDSEGSPVGVVQLTFLRLLSVSAHQDVSYPCSGAARDGPLRLRGANEDELSPETSPYVKEFRDGCQTQQGRTVLEVRTPVLEQLPVLDASFSDLGAPPRRGGVLLGPVCFMG

SEQ ID NO: 232467 - protein, 1736 aa, Artificial Sequence
  derived and/or modified sequence
MERCSRCHRLLLLLPLVLGLSAAPGWAGAPPVDVLRALRFPSLPDGVRRAKGICPADVAYRVARPAQLSAPTRQLFPGGFPKDFSLLTVVRTRPGLQAPLLTLYSAQGVRQLGLELGRPVRFLYEDQTGRPQPPSQPVFRGLSLADGKWHRVAVAVKGQSVTLIVDCKKRVTRPLPRSARPVLDTHGVIIFGARILDEEVFEGDVQELAIVPGVQAAYESCEQKELECEGGQRERPQNQQPHRAQRSPQQQPSRLHRPQNQEPQSQPTESLYYDYKPPYYDVMTTGTTPDYQDPTPGEEEEILESSLLPPLEEEQTDLQVPPTADRFQAEEYGEGGTDPPEGPYDYTYGYGDDYREETELGPALSAETAHSGAAAHGPRGLKGEKGEPAVLEPGMLVEGPPGPEGPAGLIGPPGIQGNPGPVGDPGERGPPGRAGLPGSDGAPGPPGTSLMLPFRFGSGGGDKGPVVAAQEAQAQAILQQARLALRGPPGPMGYTGRPGPLGQPGSPGLKGESGDLGPQGPRGPQGLTGPPGKAGRRGRAGADGARGMPGDPGVKGDRGFDGLPGLPGEKGHRGDTGAQGLPGPPGEDGERGDDGEIGPRGLPGESGPRGLLGPKGPPGIPGPPGVRGMDGPQGPKGSLGPQGEPGPPGQQGTPGTQGLPGPQGAIGPHGEKGPQGKPGLPGMPGSDGPPGHPGKEGPPGTKGNQGPSGPQGPLGYPGPRGVKGVDGIRGLKGHKGEKGEDGFPGFKGDIGVKGDRGEVGVPGSRGEDGPEGPKGRTGPTGDPGPPGLMGEKGKLGVPGLPGYPGRQGPKGSLGFPGFPGASGEKGARGLSGKSGPRGERGPTGPRGQRGPRGATGKSGAKGTSGGDGPHGPPGERGLPGPQGPNGFPGPKGPPGPPGKDGLPGHPGQRGEVGFQGKTGPPGPPGVVGPQGAAGETGPMGERGHPGPPGPPGEQGLPGTAGKEGTKGDPGPPGAPGKDGPAGLRGFPGERGLPGTAGGPGLKGNEGPSGPPGPAGSPGERGAAGSGGPIGPPGRPGPQGPPGAAGEKGVPGEKGPIGPTGRDGVQGPVGLPGPAGPPGVAGEDGDKGEVGDPGQKGTKGNKGEHGPPGPPGPIGPVGQPGAAGADGEPGARGPQGHFGAKGDEGTRGFNGPPGPIGLQGLPGPSGEKGETGDVGPMGPPGPPGPRGPAGPNGADGPQGPPGGVGNLGPPGEKGEPGESGSPGIQGEPGVKGPRGERGEKGESGQPGEPGPPGPKGPTGDDGPKGNPGPVGFPGDPGPPGEGGPRGQDGAKGDRGEDGEPGQPGSPGPTGENGPPGPLGKRGPAGSPGSEGRQGGKGAKGDPGAIGAPGKTGPVGPAGPAGKPGPDGLRGLPGSVGQQGRPGATGQAGPPGPVGPPGLPGLRGDAGAKGEKGHPGLIGLIGPPGEQGEKGDRGLPGPQGSPGQKGEMGIPGASGPIGPGGPPGLPGPAGPKGAKGATGPGGPKGEKGVQGPPGHPGPPGEVIQPLPIQMPKKTRRSVDGSRLMQEDEAIPTGGAPGSPGGLEEIFGSLDSLREEIEQMRRPTGTQDSPARTCQDLKLCHPELPDGEYWVDPNQGCARDAFRVFCNFTAGGETCVTPRDDVTQFSYVDSEGSPVGVVQLTFLRLLSVSAHQDVSYPCSGAARDGPLRLRGANEDELSPETSPYVKEFRDGCQTQQGRTVLEVRTPVLEQLPVLDASFSDLGAPPRRGGVLLGPVCFMG

SEQ ID NO: 232468 - protein, 1736 aa, Artificial Sequence
  derived and/or modified sequence
MERCSRCHRLLLLLPLVLGLSAAPGWAGAPPVDVLRALRFPSLPDGVRRAKGICPADVAYRVARPAQLSAPTRQLFPGGFPKDFSLLTVVRTRPGLQAPLLTLYSAQGVRQLGLELGPPVRFLYEDQTGRPQPPSQPVFRGLSLADGKWHRVAVAVKGQSVTLIVDCKKRVTRPLPRSARPVLDTHGVIIFGARILDEEVFEGDVQELAIVPGVQAAYESCEQKELECEGGQRERPQNQQPHRAQRSPQQQPSRLHRPQNQEPQSQPTESLYYDYKPPYYDVMTTGTTPDYQDPTPGEEEEILESSLLPPLEEEQTDLQVPPTADRFQAEEYGEGGTDPPEGPYDYTYGYGDDYREETELGPALSAETAHSGAAAHGPRGLKGEKGEPAVLEPGMLVEGPPGPEGPAGLIGPPGIQGNPGPVGDPGERGPPGRAGLPGSDGAPGPPGTSLMLPFRFGSGGGDKGPVVAAQEAQAQAILQQARLALRGPPGPMGYTGRPGPLGQPGSPGLKGESGDLGPQGPRGPQGLTGPPGKAGRRGRAGADGARGMPGDPGVKGDRGFDGLPGLPGEKGHRGDTGAQGLPGPPGEDGERGDDGEIGPRGLPGESGPRGLLGPKGPPGIPGPPGVRGMDGPQGPKGSLGPQGEPGPPGQQGTPGTQGLPGPQGAIGPHGEKGPQGKPGLPGMPGSDGPPGHPGKEGPPGTKGNQGPSGPQGPLGYPGPRGVKGVDGIRGLKGHKGEKGEDGFPGFKGDIGVKGDRGEVGVPGSRGEDGPEGPKGRTGPTGDPGPPGLMGEKGKLGVPGLPGYPGRQGPKGSLGFPGFPGASGEKGARGLSGKSGPRGERGPTGPRGQRGPRGATGKSGAKGTSGGDGPHGPPGERGLPGPQGPNGFPGPKGPPGPPGKDGLPGHPGQRGEVGFQGKTGPPGPPGVVGPQGAAGETGPMGERGHPGPPGPPGEQGLPGTAGKEGTKGDPGPPGAPGKDGPAGLRGFPGERGLPGTAGGPGLKGNEGPSGPPGPAGSPGERGAAGSGGPIGPPGRPGPQGPPGAAGEKGVPGEKGPIGPTGRDGVQGPVGLPGPAGPPGVAGEDGDKGEVGDPGQKGTKGNKGEHGPPGPPGPIGPVGQPGAAGADGEPGARGPQGHFGAKGDEGTRGFNGPPGPIGLQGLPGPSGEKGETGDVGPMGPPGPPGPRGPAGPNGADGPQGPPGGVGNLGPPGEKGEPGESGSPGIQGEPGVKGPRGERGEKGESGQPGEPGPPGPKGPTGDDGPKGNPGPVGFPGDPGPPGEGGPRGQDGAKGDRGEDGEPGQPGSPGPTGENGPPGPLGKRGPAGSPGSEGRQGGKGAKGDPGAIGAPGKTGPVGPAGPAGKPGPDGLRGLPGSVGQQGRPGATGQAGPPGPVGPPGLPGLRGDAGAKGEKGHPGLIGLIGPPGEQGEKGDRGLPGPQGSPGQKGEMGIPGASGPIGPGGPPGLPGPAGPKGAKGATGPGGPKGEKGVQGPPGHPGPPGEVIQPLPIQMPKKTRRSVDGSRLMQEDEAIPTGGAPGSPGGLEEIFGSLDSLREEIEQMRRPTGTQDSPARTCQDLKLCHPELPDGEYWVDPNQGCARDAFRVFCNFTAGGETCVTPRDDVTQFSYVDSEGSPVGVVQLTFLRLLSVSAHQDVSYPCSGAARDGPLRLRGANEDELSPETSPYVKEFRDGCQTQQGRTVLEVRTPVLEQLPVLDASFSDLGAPPRRGGVLLGPVCFMG

SEQ ID NO: 232469 - protein, 1715 aa, Artificial Sequence
  derived and/or modified sequence
MERCSRCHRLLLLLPLVLGLSAAPGWAGAPPVDVLRALRFPSLPDGVRRAKGICPADVAYRVARPAQLSAPTRQLFPGGFPKDFSLLTVVRTRPGLQAPLLTLYSAQGVRQLGLELGRPVRFLYEDQTGRPQPPSQPVFRGLSLADGKWHRVAVAVKGQSVTLIVDCKKRVTRPLPRSARPVLDTHGVIIFGARILDEEVFEGDVQELAIVPGVQAAYESCEQKELECEGGQRERPQNQQPHRAQRSPQQQPSRLHRPQNQEPQSQPTESLYYDYKPPYYDVMTTGTTPDYQEQTDLQVPPTADRFQAEEYGEGGTDPPEGPYDYTYGYGDDYREETELGPALSAETAHSGAAAHGPRGLKGEKGEPAVLEPGMLVEGPPGPEGPAGLIGPPGIQGNPGPVGDPGERGPPGRAGLPGSDGAPGPPGTSLMLPFRFGSGGGDKGPVVAAQEAQAQAILQQARLALRGPPGPMGYTGRPGPLGQPGSPGLKGESGDLGPQGPRGPQGLTGPPGKAGRRGRAGADGARGMPGDPGVKGDRGFDGLPGLPGEKGHRGDTGAQGLPGPPGEDGERGDDGEIGPRGLPGESGPRGLLGPKGPPGIPGPPGVRGMDGPQGPKGSLGPQGEPGPPGQQGTPGTQGLPGPQGAIGPHGEKGPQGKPGLPGMPGSDGPPGHPGKEGPPGTKGNQGPSGPQGPLGYPGPRGVKGVDGIRGLKGHKGEKGEDGFPGFKGDIGVKGDRGEVGVPGSRGEDGPEGPKGRTGPTGDPGPPGLMGEKGKLGVPGLPGYPGRQGPKGSLGFPGFPGASGEKGARGLSGKSGPRGERGPTGPRGQRGPRGATGKSGAKGTSGGDGPHGPPGERGLPGPQGPNGFPGPKGPPGPPGKDGLPGHPGQRGEVGFQGKTGPPGPPGVVGPQGAAGETGPMGERGHPGPPGPPGEQGLPGTAGKEGTKGDPGPPGAPGKDGPAGLRGFPGERGLPGTAGGPGLKGNEGPSGPPGPAGSPGERGAAGSGGPIGPPGRPGPQGPPGAAGEKGVPGEKGPIGPTGRDGVQGPVGLPGPAGPPGVAGEDGDKGEVGDPGQKGTKGNKGEHGPPGPPGPIGPVGQPGAAGADGEPGARGPQGHFGAKGDEGTRGFNGPPGPIGLQGLPGPSGEKGETGDVGPMGPPGPPGPRGPAGPNGADGPQGPPGGVGNLGPPGEKGEPGESGSPGIQGEPGVKGPRGERGEKGESGQPGEPGPPGPKGPTGDDGPKGNPGPVGFPGDPGPPGEGGPRGQDGAKGDRGEDGEPGQPGSPGPTGENGPPGPLGKRGPAGSPGSEGRQGGKGAKGDPGAIGAPGKTGPVGPAGPAGKPGPDGLRGLPGSVGQQGRPGATGQAGPPGPVGPPGLPGLRGDAGAKGEKGHPGLIGLIGPPGEQGEKGDRGLPGPQGSPGQKGEMGIPGASGPIGPGGPPGLPGPAGPKGAKGATGPGGPKGEKGVQGPPGHPGPPGEVIQPLPIQMPKKTRRSVDGSRLMQEDEAIPTGGAPGSPGGLEEIFGSLDSLREEIEQMRRPTGTQDSPARTCQDLKLCHPELPDGEYWVDPNQGCARDAFRVFCNFTAGGETCVTPRDDVTQFSYVDSEGSPVGVVQLTFLRLLSVSAHQDVSYPCSGAARDGPLRLRGANEDELSPETSPYVKEFRDGCQTQQGRTVLEVRTPVLEQLPVLDASFSDLGAPPRRGGVLLGPVCFMG

SEQ ID NO: 232470 - protein, 1715 aa, Artificial Sequence
  derived and/or modified sequence
MERCSRCHRLLLLLPLVLGLSAAPGWAGAPPVDVLRALRFPSLPDGVRRAKGICPADVAYRVARPAQLSAPTRQLFPGGFPKDFSLLTVVRTRPGLQAPLLTLYSAQGVRQLGLELGPPVRFLYEDQTGRPQPPSQPVFRGLSLADGKWHRVAVAVKGQSVTLIVDCKKRVTRPLPRSARPVLDTHGVIIFGARILDEEVFEGDVQELAIVPGVQAAYESCEQKELECEGGQRERPQNQQPHRAQRSPQQQPSRLHRPQNQEPQSQPTESLYYDYKPPYYDVMTTGTTPDYQEQTDLQVPPTADRFQAEEYGEGGTDPPEGPYDYTYGYGDDYREETELGPALSAETAHSGAAAHGPRGLKGEKGEPAVLEPGMLVEGPPGPEGPAGLIGPPGIQGNPGPVGDPGERGPPGRAGLPGSDGAPGPPGTSLMLPFRFGSGGGDKGPVVAAQEAQAQAILQQARLALRGPPGPMGYTGRPGPLGQPGSPGLKGESGDLGPQGPRGPQGLTGPPGKAGRRGRAGADGARGMPGDPGVKGDRGFDGLPGLPGEKGHRGDTGAQGLPGPPGEDGERGDDGEIGPRGLPGESGPRGLLGPKGPPGIPGPPGVRGMDGPQGPKGSLGPQGEPGPPGQQGTPGTQGLPGPQGAIGPHGEKGPQGKPGLPGMPGSDGPPGHPGKEGPPGTKGNQGPSGPQGPLGYPGPRGVKGVDGIRGLKGHKGEKGEDGFPGFKGDIGVKGDRGEVGVPGSRGEDGPEGPKGRTGPTGDPGPPGLMGEKGKLGVPGLPGYPGRQGPKGSLGFPGFPGASGEKGARGLSGKSGPRGERGPTGPRGQRGPRGATGKSGAKGTSGGDGPHGPPGERGLPGPQGPNGFPGPKGPPGPPGKDGLPGHPGQRGEVGFQGKTGPPGPPGVVGPQGAAGETGPMGERGHPGPPGPPGEQGLPGTAGKEGTKGDPGPPGAPGKDGPAGLRGFPGERGLPGTAGGPGLKGNEGPSGPPGPAGSPGERGAAGSGGPIGPPGRPGPQGPPGAAGEKGVPGEKGPIGPTGRDGVQGPVGLPGPAGPPGVAGEDGDKGEVGDPGQKGTKGNKGEHGPPGPPGPIGPVGQPGAAGADGEPGARGPQGHFGAKGDEGTRGFNGPPGPIGLQGLPGPSGEKGETGDVGPMGPPGPPGPRGPAGPNGADGPQGPPGGVGNLGPPGEKGEPGESGSPGIQGEPGVKGPRGERGEKGESGQPGEPGPPGPKGPTGDDGPKGNPGPVGFPGDPGPPGEGGPRGQDGAKGDRGEDGEPGQPGSPGPTGENGPPGPLGKRGPAGSPGSEGRQGGKGAKGDPGAIGAPGKTGPVGPAGPAGKPGPDGLRGLPGSVGQQGRPGATGQAGPPGPVGPPGLPGLRGDAGAKGEKGHPGLIGLIGPPGEQGEKGDRGLPGPQGSPGQKGEMGIPGASGPIGPGGPPGLPGPAGPKGAKGATGPGGPKGEKGVQGPPGHPGPPGEVIQPLPIQMPKKTRRSVDGSRLMQEDEAIPTGGAPGSPGGLEEIFGSLDSLREEIEQMRRPTGTQDSPARTCQDLKLCHPELPDGEYWVDPNQGCARDAFRVFCNFTAGGETCVTPRDDVTQFSYVDSEGSPVGVVQLTFLRLLSVSAHQDVSYPCSGAARDGPLRLRGANEDELSPETSPYVKEFRDGCQTQQGRTVLEVRTPVLEQLPVLDASFSDLGAPPRRGGVLLGPVCFMG

SEQ ID NO: 232471 - DNA, 5211 bp, Artificial Sequence
  derived and/or modified sequence
atggagagatgcagcagatgccacagactgctgctgctgctgcccctggtgctgggcctgagcgccgcccccggctgggccggcgccccccccgtggacgtgctgagagccctgagattccccagcctgcccgacggcgtgagaagagccaagggcatctgccccgccgacgtggcctacagagtggccagacccgcccagctgagcgcccccaccagacagctgttccccggcggcttccccaaggacttcagcctgctgaccgtggtgagaaccagacccggcctgcaggcccccctgctgaccctgtacagcgcccagggcgtgagacagctgggcctggagctgggcagacccgtgagattcctgtacgaggaccagaccggcagaccccagccccccagccagcccgtgttcagaggcctgagcctggccgacggcaagtggcacagagtggccgtggccgtgaagggccagagcgtgaccctgatcgtggactgcaagaagagagtgaccagacccctgcccagaagcgccagacccgtgctggacacccacggcgtgatcatcttcggcgccagaatcctggacgaggaggtgttcgagggcgacgtgcaggagctggccatcgtgcccggcgtgcaggccgcctacgagagctgcgagcagaaggagctggagtgcgagggcggccagagagagagaccccagaaccagcagccccacagagcccagagaagcccccagcagcagcccagcagactgcacagaccccagaaccaggagccccagagccagcccaccgagagcctgtactacgactacgagcccccctactacgacgtgatgaccaccggcaccacccccgactaccaggaccccacccccggcgaggaggaggagatcctggagagcagcctgctgccccccctggaggaggagcagaccgacctgcaggtgccccccaccgccgacagattccaggccgaggagtacggcgagggcggcaccgacccccccgagggcccctacgactacacctacggctacggcgacgactacagagaggagaccgagctgggccccgccctgagcgccgagaccgcccacagcggcgccgccgcccacggccccagaggcctgaagggcgagaagggcgagcccgccgtgctggagcccggcatgctggtggagggcccccccggccccgagggccccgccggcctgatcggcccccccggcatccagggcaaccccggccccgtgggcgaccccggcgagagaggcccccccggcagagccggcctgcccggcagcgacggcgcccccggcccccccggcaccagcctgatgctgcccttcagattcggcagcggcggcggcgacaagggccccgtggtggccgcccaggaggcccaggcccaggccatcctgcagcaggccagactggccctgagaggcccccccggccccatgggctacaccggcagacccggccccctgggccagcccggcagccccggcctgaagggcgagagcggcgacctgggcccccagggccccagaggcccccagggcctgaccggcccccccggcaaggccggcagaagaggcagagccggcgccgacggcgccagaggcatgcccggcgaccccggcgtgaagggcgacagaggcttcgacggcctgcccggcctgcccggcgagaagggccacagaggcgacaccggcgcccagggcctgcccggcccccccggcgaggacggcgagagaggcgacgacggcgagatcggccccagaggcctgcccggcgagagcggccccagaggcctgctgggccccaagggcccccccggcatccccggcccccccggcgtgagaggcatggacggcccccagggccccaagggcagcctgggcccccagggcgagcccggcccccccggccagcagggcacccccggcacccagggcctgcccggcccccagggcgccatcggcccccacggcgagaagggcccccagggcaagcccggcctgcccggcatgcccggcagcgacggcccccccggccaccccggcaaggagggcccccccggcaccaagggcaaccagggccccagcggcccccagggccccctgggctaccccggccccagaggcgtgaagggcgtggacggcatcagaggcctgaagggccacaagggcgagaagggcgaggacggcttccccggcttcaagggcgacatcggcgtgaagggcgacagaggcgaggtgggcgtgcccggcagcagaggcgaggacggccccgagggccccaagggcagaaccggccccaccggcgaccccggcccccccggcctgatgggcgagaagggcaagctgggcgtgcccggcctgcccggctaccccggcagacagggccccaagggcagcctgggcttccccggcttccccggcgccagcggcgagaagggcgccagaggcctgagcggcaagagcggccccagaggcgagagaggccccaccggccccagaggccagagaggccccagaggcgccaccggcaagagcggcgccaagggcaccagcggcggcgacggcccccacggcccccccggcgagagaggcctgcccggcccccagggccccaacggcttccccggccccaagggcccccccggcccccccggcaaggacggcctgcccggccaccccggccagagaggcgaggtgggcttccagggcaagaccggcccccccggcccccccggcgtggtgggcccccagggcgccgccggcgagaccggccccatgggcgagagaggccaccccggcccccccggcccccccggcgagcagggcctgcccggcaccgccggcaaggagggcaccaagggcgaccccggcccccccggcgcccccggcaaggacggccccgccggcctgagaggcttccccggcgagagaggcctgcccggcaccgccggcggccccggcctgaagggcaacgagggccccagcggcccccccggccccgccggcagccccggcgagagaggcgccgccggcagcggcggccccatcggcccccccggcagacccggcccccagggcccccccggcgccgccggcgagaagggcgtgcccggcgagaagggccccatcggccccaccggcagagacggcgtgcagggccccgtgggcctgcccggccccgccggcccccccggcgtggccggcgaggacggcgacaagggcgaggtgggcgaccccggccagaagggcaccaagggcaacaagggcgagcacggcccccccggcccccccggccccatcggccccgtgggccagcccggcgccgccggcgccgacggcgagcccggcgccagaggcccccagggccacttcggcgccaagggcgacgagggcaccagaggcttcaacggcccccccggccccatcggcctgcagggcctgcccggccccagcggcgagaagggcgagaccggcgacgtgggccccatgggcccccccggcccccccggccccagaggccccgccggccccaacggcgccgacggcccccagggcccccccggcggcgtgggcaacctgggcccccccggcgagaagggcgagcccggcgagagcggcagccccggcatccagggcgagcccggcgtgaagggccccagaggcgagagaggcgagaagggcgagagcggccagcccggcgagcccggcccccccggccccaagggccccaccggcgacgacggccccaagggcaaccccggccccgtgggcttccccggcgaccccggcccccccggcgagggcggccccagaggccaggacggcgccaagggcgacagaggcgaggacggcgagcccggccagcccggcagccccggccccaccggcgagaacggcccccccggccccctgggcaagagaggccccgccggcagccccggcagcgagggcagacagggcggcaagggcgccaagggcgaccccggcgccatcggcgcccccggcaagaccggccccgtgggccccgccggccccgccggcaagcccggccccgacggcctgagaggcctgcccggcagcgtgggccagcagggcagacccggcgccaccggccaggccggcccccccggccccgtgggcccccccggcctgcccggcctgagaggcgacgccggcgccaagggcgagaagggccaccccggcctgatcggcctgatcggcccccccggcgagcagggcgagaagggcgacagaggcctgcccggcccccagggcagccccggccagaagggcgagatgggcatccccggcgccagcggccccatcggccccggcggcccccccggcctgcccggccccgccggccccaagggcgccaagggcgccaccggccccggcggccccaagggcgagaagggcgtgcagggcccccccggccaccccggcccccccggcgaggtgatccagcccctgcccatccagatgcccaagaagaccagaagaagcgtggacggcagcagactgatgcaggaggacgaggccatccccaccggcggcgcccccggcagccccggcggcctggaggagatcttcggcagcctggacagcctgagagaggagatcgagcagatgagaagacccaccggcacccaggacagccccgccagaacctgccaggacctgaagctgtgccaccccgagctgcccgacggcgagtactgggtggaccccaaccagggctgcgccagagacgccttcagagtgttctgcaacttcaccgccggcggcgagacctgcgtgacccccagagacgacgtgacccagttcagctacgtggacagcgagggcagccccgtgggcgtggtgcagctgaccttcctgagactgctgagcgtgagcgcccaccaggacgtgagctacccctgcagcggcgccgccagagacggccccctgagactgagaggcgccaacgaggacgagctgagccccgagaccagcccctacgtgaaggagttcagagacggctgccagacccagcagggcagaaccgtgctggaggtgagaacccccgtgctggagcagctgcccgtgctggacgccagcttcagcgacctgggcgccccccccagaagaggcggcgtgctgctgggccccgtgtgcttcatgggctag

SEQ ID NO: 232472 - DNA, 5148 bp, Artificial Sequence
  derived and/or modified sequence
atggagagatgcagcagatgccacagactgctgctgctgctgcccctggtgctgggcctgagcgccgcccccggctgggccggcgccccccccgtggacgtgctgagagccctgagattccccagcctgcccgacggcgtgagaagagccaagggcatctgccccgccgacgtggcctacagagtggccagacccgcccagctgagcgcccccaccagacagctgttccccggcggcttccccaaggacttcagcctgctgaccgtggtgagaaccagacccggcctgcaggcccccctgctgaccctgtacagcgcccagggcgtgagacagctgggcctggagctgggcagacccgtgagattcctgtacgaggaccagaccggcagaccccagccccccagccagcccgtgttcagaggcctgagcctggccgacggcaagtggcacagagtggccgtggccgtgaagggccagagcgtgaccctgatcgtggactgcaagaagagagtgaccagacccctgcccagaagcgccagacccgtgctggacacccacggcgtgatcatcttcggcgccagaatcctggacgaggaggtgttcgagggcgacgtgcaggagctggccatcgtgcccggcgtgcaggccgcctacgagagctgcgagcagaaggagctggagtgcgagggcggccagagagagagaccccagaaccagcagccccacagagcccagagaagcccccagcagcagcccagcagactgcacagaccccagaaccaggagccccagagccagcccaccgagagcctgtactacgactacgagcccccctactacgacgtgatgaccaccggcaccacccccgactaccaggagcagaccgacctgcaggtgccccccaccgccgacagattccaggccgaggagtacggcgagggcggcaccgacccccccgagggcccctacgactacacctacggctacggcgacgactacagagaggagaccgagctgggccccgccctgagcgccgagaccgcccacagcggcgccgccgcccacggccccagaggcctgaagggcgagaagggcgagcccgccgtgctggagcccggcatgctggtggagggcccccccggccccgagggccccgccggcctgatcggcccccccggcatccagggcaaccccggccccgtgggcgaccccggcgagagaggcccccccggcagagccggcctgcccggcagcgacggcgcccccggcccccccggcaccagcctgatgctgcccttcagattcggcagcggcggcggcgacaagggccccgtggtggccgcccaggaggcccaggcccaggccatcctgcagcaggccagactggccctgagaggcccccccggccccatgggctacaccggcagacccggccccctgggccagcccggcagccccggcctgaagggcgagagcggcgacctgggcccccagggccccagaggcccccagggcctgaccggcccccccggcaaggccggcagaagaggcagagccggcgccgacggcgccagaggcatgcccggcgaccccggcgtgaagggcgacagaggcttcgacggcctgcccggcctgcccggcgagaagggccacagaggcgacaccggcgcccagggcctgcccggcccccccggcgaggacggcgagagaggcgacgacggcgagatcggccccagaggcctgcccggcgagagcggccccagaggcctgctgggccccaagggcccccccggcatccccggcccccccggcgtgagaggcatggacggcccccagggccccaagggcagcctgggcccccagggcgagcccggcccccccggccagcagggcacccccggcacccagggcctgcccggcccccagggcgccatcggcccccacggcgagaagggcccccagggcaagcccggcctgcccggcatgcccggcagcgacggcccccccggccaccccggcaaggagggcccccccggcaccaagggcaaccagggccccagcggcccccagggccccctgggctaccccggccccagaggcgtgaagggcgtggacggcatcagaggcctgaagggccacaagggcgagaagggcgaggacggcttccccggcttcaagggcgacatcggcgtgaagggcgacagaggcgaggtgggcgtgcccggcagcagaggcgaggacggccccgagggccccaagggcagaaccggccccaccggcgaccccggcccccccggcctgatgggcgagaagggcaagctgggcgtgcccggcctgcccggctaccccggcagacagggccccaagggcagcctgggcttccccggcttccccggcgccagcggcgagaagggcgccagaggcctgagcggcaagagcggccccagaggcgagagaggccccaccggccccagaggccagagaggccccagaggcgccaccggcaagagcggcgccaagggcaccagcggcggcgacggcccccacggcccccccggcgagagaggcctgcccggcccccagggccccaacggcttccccggccccaagggcccccccggcccccccggcaaggacggcctgcccggccaccccggccagagaggcgaggtgggcttccagggcaagaccggcccccccggcccccccggcgtggtgggcccccagggcgccgccggcgagaccggccccatgggcgagagaggccaccccggcccccccggcccccccggcgagcagggcctgcccggcaccgccggcaaggagggcaccaagggcgaccccggcccccccggcgcccccggcaaggacggccccgccggcctgagaggcttccccggcgagagaggcctgcccggcaccgccggcggccccggcctgaagggcaacgagggccccagcggcccccccggccccgccggcagccccggcgagagaggcgccgccggcagcggcggccccatcggcccccccggcagacccggcccccagggcccccccggcgccgccggcgagaagggcgtgcccggcgagaagggccccatcggccccaccggcagagacggcgtgcagggccccgtgggcctgcccggccccgccggcccccccggcgtggccggcgaggacggcgacaagggcgaggtgggcgaccccggccagaagggcaccaagggcaacaagggcgagcacggcccccccggcccccccggccccatcggccccgtgggccagcccggcgccgccggcgccgacggcgagcccggcgccagaggcccccagggccacttcggcgccaagggcgacgagggcaccagaggcttcaacggcccccccggccccatcggcctgcagggcctgcccggccccagcggcgagaagggcgagaccggcgacgtgggccccatgggcccccccggcccccccggccccagaggccccgccggccccaacggcgccgacggcccccagggcccccccggcggcgtgggcaacctgggcccccccggcgagaagggcgagcccggcgagagcggcagccccggcatccagggcgagcccggcgtgaagggccccagaggcgagagaggcgagaagggcgagagcggccagcccggcgagcccggcccccccggccccaagggccccaccggcgacgacggccccaagggcaaccccggccccgtgggcttccccggcgaccccggcccccccggcgagggcggccccagaggccaggacggcgccaagggcgacagaggcgaggacggcgagcccggccagcccggcagccccggccccaccggcgagaacggcccccccggccccctgggcaagagaggccccgccggcagccccggcagcgagggcagacagggcggcaagggcgccaagggcgaccccggcgccatcggcgcccccggcaagaccggccccgtgggccccgccggccccgccggcaagcccggccccgacggcctgagaggcctgcccggcagcgtgggccagcagggcagacccggcgccaccggccaggccggcccccccggccccgtgggcccccccggcctgcccggcctgagaggcgacgccggcgccaagggcgagaagggccaccccggcctgatcggcctgatcggcccccccggcgagcagggcgagaagggcgacagaggcctgcccggcccccagggcagccccggccagaagggcgagatgggcatccccggcgccagcggccccatcggccccggcggcccccccggcctgcccggccccgccggccccaagggcgccaagggcgccaccggccccggcggccccaagggcgagaagggcgtgcagggcccccccggccaccccggcccccccggcgaggtgatccagcccctgcccatccagatgcccaagaagaccagaagaagcgtggacggcagcagactgatgcaggaggacgaggccatccccaccggcggcgcccccggcagccccggcggcctggaggagatcttcggcagcctggacagcctgagagaggagatcgagcagatgagaagacccaccggcacccaggacagccccgccagaacctgccaggacctgaagctgtgccaccccgagctgcccgacggcgagtactgggtggaccccaaccagggctgcgccagagacgccttcagagtgttctgcaacttcaccgccggcggcgagacctgcgtgacccccagagacgacgtgacccagttcagctacgtggacagcgagggcagccccgtgggcgtggtgcagctgaccttcctgagactgctgagcgtgagcgcccaccaggacgtgagctacccctgcagcggcgccgccagagacggccccctgagactgagaggcgccaacgaggacgagctgagccccgagaccagcccctacgtgaaggagttcagagacggctgccagacccagcagggcagaaccgtgctggaggtgagaacccccgtgctggagcagctgcccgtgctggacgccagcttcagcgacctgggcgccccccccagaagaggcggcgtgctgctgggccccgtgtgcttcatgggctag

SEQ ID NO: 232473 - DNA, 5070 bp, Artificial Sequence
  derived and/or modified sequence
atggagagatgcagcagatgccacagactgctgctgctgctgcccctggtgctgggcctgagcgccgcccccggctgggccggcgccccccccgtggacgtgctgagagccctgagattccccagcctgcccgacggcgtgagaagagccaagggcatctgccccgccgacgtggcctacagagtggccagacccgcccagctgagcgcccccaccagacagctgttccccggcggcttccccaaggacttcagcctgctgaccgtggtgagaaccagacccggcctgcaggcccccctgctgaccctgtacagcgcccagggcgtgagacagctgggcctggagctgggcagacccgtgagattcctgtacgaggaccagaccggcagaccccagccccccagccagcccgtgttcagaggcctgagcctggccgacggcaagtggcacagagtggccgtggccgtgaagggccagagcgtgaccctgatcgtggactgcaagaagagagtgaccagacccctgcccagaagcgccagacccgtgctggacacccacggcgtgatcatcttcggcgccagaatcctggacgaggaggtgttcgagggcgacgtgcaggagctggccatcgtgcccggcgtgcaggccgcctacgagagctgcgagcagaaggagctggagtgcgagggcggccagagagagagaccccagaaccagcagccccacagagcccagagaagcccccagcagcagcccagcagactgcacagaccccagaaccaggagccccagagccaggagcagaccgacctgcaggtgccccccaccgccgacagattccaggccgaggagtacggcgagggcggcaccgacccccccgagggcccctacgactacacctacggctacggcgacgactacagagaggagaccgagctgggccccgccctgagcgccgagaccgcccacagcggcgccgccgcccacggccccagaggcctgaagggcgagaagggcgagcccgccgtgctggagcccggcatgctggtggagggcccccccggccccgagggccccgccggcctgatcggcccccccggcatccagggcaaccccggccccgtgggcgaccccggcgagagaggcccccccggcagagccggcctgcccggcagcgacggcgcccccggcccccccggcaccagcctgatgctgcccttcagattcggcagcggcggcggcgacaagggccccgtggtggccgcccaggaggcccaggcccaggccatcctgcagcaggccagactggccctgagaggcccccccggccccatgggctacaccggcagacccggccccctgggccagcccggcagccccggcctgaagggcgagagcggcgacctgggcccccagggccccagaggcccccagggcctgaccggcccccccggcaaggccggcagaagaggcagagccggcgccgacggcgccagaggcatgcccggcgaccccggcgtgaagggcgacagaggcttcgacggcctgcccggcctgcccggcgagaagggccacagaggcgacaccggcgcccagggcctgcccggcccccccggcgaggacggcgagagaggcgacgacggcgagatcggccccagaggcctgcccggcgagagcggccccagaggcctgctgggccccaagggcccccccggcatccccggcccccccggcgtgagaggcatggacggcccccagggccccaagggcagcctgggcccccagggcgagcccggcccccccggccagcagggcacccccggcacccagggcctgcccggcccccagggcgccatcggcccccacggcgagaagggcccccagggcaagcccggcctgcccggcatgcccggcagcgacggcccccccggccaccccggcaaggagggcccccccggcaccaagggcaaccagggccccagcggcccccagggccccctgggctaccccggccccagaggcgtgaagggcgtggacggcatcagaggcctgaagggccacaagggcgagaagggcgaggacggcttccccggcttcaagggcgacatcggcgtgaagggcgacagaggcgaggtgggcgtgcccggcagcagaggcgaggacggccccgagggccccaagggcagaaccggccccaccggcgaccccggcccccccggcctgatgggcgagaagggcaagctgggcgtgcccggcctgcccggctaccccggcagacagggccccaagggcagcctgggcttccccggcttccccggcgccagcggcgagaagggcgccagaggcctgagcggcaagagcggccccagaggcgagagaggccccaccggccccagaggccagagaggccccagaggcgccaccggcaagagcggcgccaagggcaccagcggcggcgacggcccccacggcccccccggcgagagaggcctgcccggcccccagggccccaacggcttccccggccccaagggcccccccggcccccccggcaaggacggcctgcccggccaccccggccagagaggcgaggtgggcttccagggcaagaccggcccccccggcccccccggcgtggtgggcccccagggcgccgccggcgagaccggccccatgggcgagagaggccaccccggcccccccggcccccccggcgagcagggcctgcccggcaccgccggcaaggagggcaccaagggcgaccccggcccccccggcgcccccggcaaggacggccccgccggcctgagaggcttccccggcgagagaggcctgcccggcaccgccggcggccccggcctgaagggcaacgagggccccagcggcccccccggccccgccggcagccccggcgagagaggcgccgccggcagcggcggccccatcggcccccccggcagacccggcccccagggcccccccggcgccgccggcgagaagggcgtgcccggcgagaagggccccatcggccccaccggcagagacggcgtgcagggccccgtgggcctgcccggccccgccggcccccccggcgtggccggcgaggacggcgacaagggcgaggtgggcgaccccggccagaagggcaccaagggcaacaagggcgagcacggcccccccggcccccccggccccatcggccccgtgggccagcccggcgccgccggcgccgacggcgagcccggcgccagaggcccccagggccacttcggcgccaagggcgacgagggcaccagaggcttcaacggcccccccggccccatcggcctgcagggcctgcccggccccagcggcgagaagggcgagaccggcgacgtgggccccatgggcccccccggcccccccggccccagaggccccgccggccccaacggcgccgacggcccccagggcccccccggcggcgtgggcaacctgggcccccccggcgagaagggcgagcccggcgagagcggcagccccggcatccagggcgagcccggcgtgaagggccccagaggcgagagaggcgagaagggcgagagcggccagcccggcgagcccggcccccccggccccaagggccccaccggcgacgacggccccaagggcaaccccggccccgtgggcttccccggcgaccccggcccccccggcgagggcggccccagaggccaggacggcgccaagggcgacagaggcgaggacggcgagcccggccagcccggcagccccggccccaccggcgagaacggcccccccggccccctgggcaagagaggccccgccggcagccccggcagcgagggcagacagggcggcaagggcgccaagggcgaccccggcgccatcggcgcccccggcaagaccggccccgtgggccccgccggccccgccggcaagcccggccccgacggcctgagaggcctgcccggcagcgtgggccagcagggcagacccggcgccaccggccaggccggcccccccggccccgtgggcccccccggcctgcccggcctgagaggcgacgccggcgccaagggcgagaagggccaccccggcctgatcggcctgatcggcccccccggcgagcagggcgagaagggcgacagaggcctgcccggcccccagggcagccccggccagaagggcgagatgggcatccccggcgccagcggccccatcggccccggcggcccccccggcctgcccggccccgccggccccaagggcgccaagggcgccaccggccccggcggccccaagggcgagaagggcgtgcagggcccccccggccaccccggcccccccggcgaggtgatccagcccctgcccatccagatgcccaagaagaccagaagaagcgtggacggcagcagactgatgcaggaggacgaggccatccccaccggcggcgcccccggcagccccggcggcctggaggagatcttcggcagcctggacagcctgagagaggagatcgagcagatgagaagacccaccggcacccaggacagccccgccagaacctgccaggacctgaagctgtgccaccccgagctgcccgacggcgagtactgggtggaccccaaccagggctgcgccagagacgccttcagagtgttctgcaacttcaccgccggcggcgagacctgcgtgacccccagagacgacgtgacccagttcagctacgtggacagcgagggcagccccgtgggcgtggtgcagctgaccttcctgagactgctgagcgtgagcgcccaccaggacgtgagctacccctgcagcggcgccgccagagacggccccctgagactgagaggcgccaacgaggacgagctgagccccgagaccagcccctacgtgaaggagttcagagacggctgccagacccagcagggcagaaccgtgctggaggtgagaacccccgtgctggagcagctgcccgtgctggacgccagcttcagcgacctgggcgccccccccagaagaggcggcgtgctgctgggccccgtgtgcttcatgggctag

SEQ ID NO: 232474 - DNA, 5133 bp, Artificial Sequence
  derived and/or modified sequence
atggagagatgcagcagatgccacagactgctgctgctgctgcccctggtgctgggcctgagcgccgcccccggctgggccggcgccccccccgtggacgtgctgagagccctgagattccccagcctgcccgacggcgtgagaagagccaagggcatctgccccgccgacgtggcctacagagtggccagacccgcccagctgagcgcccccaccagacagctgttccccggcggcttccccaaggacttcagcctgctgaccgtggtgagaaccagacccggcctgcaggcccccctgctgaccctgtacagcgcccagggcgtgagacagctgggcctggagctgggcagacccgtgagattcctgtacgaggaccagaccggcagaccccagccccccagccagcccgtgttcagaggcctgagcctggccgacggcaagtggcacagagtggccgtggccgtgaagggccagagcgtgaccctgatcgtggactgcaagaagagagtgaccagacccctgcccagaagcgccagacccgtgctggacacccacggcgtgatcatcttcggcgccagaatcctggacgaggaggtgttcgagggcgacgtgcaggagctggccatcgtgcccggcgtgcaggccgcctacgagagctgcgagcagaaggagctggagtgcgagggcggccagagagagagaccccagaaccagcagccccacagagcccagagaagcccccagcagcagcccagcagactgcacagaccccagaaccaggagccccagagccaggaccccacccccggcgaggaggaggagatcctggagagcagcctgctgccccccctggaggaggagcagaccgacctgcaggtgccccccaccgccgacagattccaggccgaggagtacggcgagggcggcaccgacccccccgagggcccctacgactacacctacggctacggcgacgactacagagaggagaccgagctgggccccgccctgagcgccgagaccgcccacagcggcgccgccgcccacggccccagaggcctgaagggcgagaagggcgagcccgccgtgctggagcccggcatgctggtggagggcccccccggccccgagggccccgccggcctgatcggcccccccggcatccagggcaaccccggccccgtgggcgaccccggcgagagaggcccccccggcagagccggcctgcccggcagcgacggcgcccccggcccccccggcaccagcctgatgctgcccttcagattcggcagcggcggcggcgacaagggccccgtggtggccgcccaggaggcccaggcccaggccatcctgcagcaggccagactggccctgagaggcccccccggccccatgggctacaccggcagacccggccccctgggccagcccggcagccccggcctgaagggcgagagcggcgacctgggcccccagggccccagaggcccccagggcctgaccggcccccccggcaaggccggcagaagaggcagagccggcgccgacggcgccagaggcatgcccggcgaccccggcgtgaagggcgacagaggcttcgacggcctgcccggcctgcccggcgagaagggccacagaggcgacaccggcgcccagggcctgcccggcccccccggcgaggacggcgagagaggcgacgacggcgagatcggccccagaggcctgcccggcgagagcggccccagaggcctgctgggccccaagggcccccccggcatccccggcccccccggcgtgagaggcatggacggcccccagggccccaagggcagcctgggcccccagggcgagcccggcccccccggccagcagggcacccccggcacccagggcctgcccggcccccagggcgccatcggcccccacggcgagaagggcccccagggcaagcccggcctgcccggcatgcccggcagcgacggcccccccggccaccccggcaaggagggcccccccggcaccaagggcaaccagggccccagcggcccccagggccccctgggctaccccggccccagaggcgtgaagggcgtggacggcatcagaggcctgaagggccacaagggcgagaagggcgaggacggcttccccggcttcaagggcgacatcggcgtgaagggcgacagaggcgaggtgggcgtgcccggcagcagaggcgaggacggccccgagggccccaagggcagaaccggccccaccggcgaccccggcccccccggcctgatgggcgagaagggcaagctgggcgtgcccggcctgcccggctaccccggcagacagggccccaagggcagcctgggcttccccggcttccccggcgccagcggcgagaagggcgccagaggcctgagcggcaagagcggccccagaggcgagagaggccccaccggccccagaggccagagaggccccagaggcgccaccggcaagagcggcgccaagggcaccagcggcggcgacggcccccacggcccccccggcgagagaggcctgcccggcccccagggccccaacggcttccccggccccaagggcccccccggcccccccggcaaggacggcctgcccggccaccccggccagagaggcgaggtgggcttccagggcaagaccggcccccccggcccccccggcgtggtgggcccccagggcgccgccggcgagaccggccccatgggcgagagaggccaccccggcccccccggcccccccggcgagcagggcctgcccggcaccgccggcaaggagggcaccaagggcgaccccggcccccccggcgcccccggcaaggacggccccgccggcctgagaggcttccccggcgagagaggcctgcccggcaccgccggcggccccggcctgaagggcaacgagggccccagcggcccccccggccccgccggcagccccggcgagagaggcgccgccggcagcggcggccccatcggcccccccggcagacccggcccccagggcccccccggcgccgccggcgagaagggcgtgcccggcgagaagggccccatcggccccaccggcagagacggcgtgcagggccccgtgggcctgcccggccccgccggcccccccggcgtggccggcgaggacggcgacaagggcgaggtgggcgaccccggccagaagggcaccaagggcaacaagggcgagcacggcccccccggcccccccggccccatcggccccgtgggccagcccggcgccgccggcgccgacggcgagcccggcgccagaggcccccagggccacttcggcgccaagggcgacgagggcaccagaggcttcaacggcccccccggccccatcggcctgcagggcctgcccggccccagcggcgagaagggcgagaccggcgacgtgggccccatgggcccccccggcccccccggccccagaggccccgccggccccaacggcgccgacggcccccagggcccccccggcggcgtgggcaacctgggcccccccggcgagaagggcgagcccggcgagagcggcagccccggcatccagggcgagcccggcgtgaagggccccagaggcgagagaggcgagaagggcgagagcggccagcccggcgagcccggcccccccggccccaagggccccaccggcgacgacggccccaagggcaaccccggccccgtgggcttccccggcgaccccggcccccccggcgagggcggccccagaggccaggacggcgccaagggcgacagaggcgaggacggcgagcccggccagcccggcagccccggccccaccggcgagaacggcccccccggccccctgggcaagagaggccccgccggcagccccggcagcgagggcagacagggcggcaagggcgccaagggcgaccccggcgccatcggcgcccccggcaagaccggccccgtgggccccgccggccccgccggcaagcccggccccgacggcctgagaggcctgcccggcagcgtgggccagcagggcagacccggcgccaccggccaggccggcccccccggccccgtgggcccccccggcctgcccggcctgagaggcgacgccggcgccaagggcgagaagggccaccccggcctgatcggcctgatcggcccccccggcgagcagggcgagaagggcgacagaggcctgcccggcccccagggcagccccggccagaagggcgagatgggcatccccggcgccagcggccccatcggccccggcggcccccccggcctgcccggccccgccggccccaagggcgccaagggcgccaccggccccggcggccccaagggcgagaagggcgtgcagggcccccccggccaccccggcccccccggcgaggtgatccagcccctgcccatccagatgcccaagaagaccagaagaagcgtggacggcagcagactgatgcaggaggacgaggccatccccaccggcggcgcccccggcagccccggcggcctggaggagatcttcggcagcctggacagcctgagagaggagatcgagcagatgagaagacccaccggcacccaggacagccccgccagaacctgccaggacctgaagctgtgccaccccgagctgcccgacggcgagtactgggtggaccccaaccagggctgcgccagagacgccttcagagtgttctgcaacttcaccgccggcggcgagacctgcgtgacccccagagacgacgtgacccagttcagctacgtggacagcgagggcagccccgtgggcgtggtgcagctgaccttcctgagactgctgagcgtgagcgcccaccaggacgtgagctacccctgcagcggcgccgccagagacggccccctgagactgagaggcgccaacgaggacgagctgagccccgagaccagcccctacgtgaaggagttcagagacggctgccagacccagcagggcagaaccgtgctggaggtgagaacccccgtgctggagcagctgcccgtgctggacgccagcttcagcgacctgggcgccccccccagaagaggcggcgtgctgctgggccccgtgtgcttcatgggctag

SEQ ID NO: 232475 - DNA, 1875 bp, Artificial Sequence
  derived and/or modified sequence
atggagagatgcagcagatgccacagactgctgctgctgctgcccctggtgctgggcctgagcgccgcccccggctgggccggcgccccccccgtggacgtgctgagagccctgagattccccagcctgcccgacggcgtgagaagagccaagggcatctgccccgccgacgtggcctacagagtggccagacccgcccagctgagcgcccccaccagacagctgttccccggcggcttccccaaggacttcagcctgctgaccgtggtgagaaccagacccggcctgcaggcccccctgctgaccctgtacagcgcccagggcgtgagacagctgggcctggagctgggcagacccgtgagattcctgtacgaggaccagaccggcagaccccagccccccagccagcccgtgttcagaggcctgagcctggccgacggcaagtggcacagagtggccgtggccgtgaagggccagagcgtgaccctgatcgtggactgcaagaagagagtgaccagacccctgcccagaagcgccagacccgtgctggacacccacggcgtgatcatcttcggcgccagaatcctggacgaggaggtgttcgagggcgacgtgcaggagctggccatcgtgcccggcgtgcaggccgcctacgagagctgcgagcagaaggagctggagtgcgagggcggccagagagagagaccccagaaccagcagccccacagagcccagagaagcccccagcagcagcccagcagactgcacagaccccagaaccaggagccccagagccagcccaccgagagcctgtactacgactacaagcccccctactacgacgtgatgaccaccggcaccacccccgactaccaggaccccacccccggcgaggaggaggagatcctggagagcagcctgctgccccccctggaggaggagcagaccgacctgcaggtgccccccaccgccgacagattccaggccgaggagtacggcgagggcggcaccgacccccccgagggcccctacgactacacctacggctacggcgacgactacagagaggagaccgagctgggccccgccctgagcgccgagaccgcccacagcggcgccgccgcccacggccccagaggcctgaagggcgagaagggcgagcccgccgtgctggagcccggcatgctggtggagggcccccccggccccgagggccccgccggcctgatcggcccccccggcatccagggcaaccccggccccgtgggcgaccccggcgagagaggcccccccggcagagccggcctgcccggcagcgacggcgcccccggcccccccggcaccagcctgatgctgcccttcagattcggcagcggcggcggcgacaagggccccgtggtggccgcccaggaggcccaggcccaggccatcctgcagcaggccagactggccctgagaggcccccccggccccatgggctacaccggcagacccggccccctgggccagcccggcagccccggcctgaagggcgagagcggcgacctgggcccccagggccccagaggcccccagggcctgaccggcccccccggcaaggccggcagaagaggcagagccggcgccgacggcgccagaggcatgcccggcgaccccggcgtgaagggcgacagaggcttcgacggcctgcccggcctgcccggcgagaagggccacagaggcgacaccggcgcccagggcctgcccggcccccccggcgaggacggcgagagaggcgacgacggcgagatcggccccagaggcctgcccggcgagagcggccccagaggcctgctgggccccaagggcccccccggcatccccggccccccctag

SEQ ID NO: 232476 - DNA, 1875 bp, Artificial Sequence
  derived and/or modified sequence
atggagagatgcagcagatgccacagactgctgctgctgctgcccctggtgctgggcctgagcgccgcccccggctgggccggcgccccccccgtggacgtgctgagagccctgagattccccagcctgcccgacggcgtgagaagagccaagggcatctgccccgccgacgtggcctacagagtggccagacccgcccagctgagcgcccccaccagacagctgttccccggcggcttccccaaggacttcagcctgctgaccgtggtgagaaccagacccggcctgcaggcccccctgctgaccctgtacagcgcccagggcgtgagacagctgggcctggagctgggcagacccgtgagattcctgtacgaggaccagaccggcagaccccagccccccagccagcccgtgttcagaggcctgagcctggccgacggcaagtggcacagagtggccgtggccgtgaagggccagagcgtgaccctgatcgtggactgcaagaagagagtgaccagacccctgcccagaagcgccagacccgtgctggacacccacggcgtgatcatcttcggcgccagaatcctggacgaggaggtgttcgagggcgacgtgcaggagctggccatcgtgcccggcgtgcaggccgcctacgagagctgcgagcagaaggagctggagtgcgagggcggccagagagagagaccccagaaccagcagccccacagagcccagagaagcccccagcagcagcccagcagactgcacagaccccagaaccaggagccccagagccagcccaccgagagcctgtactacgactacgagcccccctactacgacgtgatgaccaccggcaccacccccgactaccaggaccccacccccggcgaggaggaggagatcctggagagcagcctgctgccccccctggaggaggagcagaccgacctgcaggtgccccccaccgccgacagattccaggccgaggagtacggcgagggcggcaccgacccccccgagggcccctacgactacacctacggctacggcgacgactacagagaggagaccgagctgggccccgccctgagcgccgagaccgcccacagcggcgccgccgcccacggccccagaggcctgaagggcgagaagggcgagcccgccgtgctggagcccggcatgctggtggagggcccccccggccccgagggccccgccggcctgatcggcccccccggcatccagggcaaccccggccccgtgggcgaccccggcgagagaggcccccccggcagagccggcctgcccggcagcgacggcgcccccggcccccccggcaccagcctgatgctgcccttcagattcggcagcggcggcggcgacaagggccccgtggtggccgcccaggaggcccaggcccaggccatcctgcagcaggccagactggccctgagaggcccccccggccccatgggctacaccggcagacccggccccctgggccagcccggcagccccggcctgaagggcgagagcggcgacctgggcccccagggccccagaggcccccagggcctgaccggcccccccggcaaggccggcagaagaggcagagccggcgccgacggcgccagaggcatgcccggcgaccccggcgtgaagggcgacagaggcttcgacggcctgcccggcctgcccggcgagaagggccacagaggcgacaccggcgcccagggcctgcccggcccccccggcgaggacggcgagagaggcgacgacggcgagatcggccccagaggcctgcccggcgagagcggccccagaggcctgctgggccccaagggcccccccggcatccccggccccccctag

SEQ ID NO: 232477 - DNA, 1794 bp, Artificial Sequence
  derived and/or modified sequence
tgagccccccccgtggacgtgctgagagccctgagattccccagcctgcccgacggcgtgagaagagccaagggcatctgccccgccgacgtggcctacagagtggccagacccgcccagctgagcgcccccaccagacagctgttccccggcggcttccccaaggacttcagcctgctgaccgtggtgagaaccagacccggcctgcaggcccccctgctgaccctgtacagcgcccagggcgtgagacagctgggcctggagctgggcagacccgtgagattcctgtacgaggaccagaccggcagaccccagccccccagccagcccgtgttcagaggcctgagcctggccgacggcaagtggcacagagtggccgtggccgtgaagggccagagcgtgaccctgatcgtggactgcaagaagagagtgaccagacccctgcccagaagcgccagacccgtgctggacacccacggcgtgatcatcttcggcgccagaatcctggacgaggaggtgttcgagggcgacgtgcaggagctggccatcgtgcccggcgtgcaggccgcctacgagagctgcgagcagaaggagctggagtgcgagggcggccagagagagagaccccagaaccagcagccccacagagcccagagaagcccccagcagcagcccagcagactgcacagaccccagaaccaggagccccagagccagcccaccgagagcctgtactacgactacaagcccccctactacgacgtgatgaccaccggcaccacccccgactaccaggaccccacccccggcgaggaggaggagatcctggagagcagcctgctgccccccctggaggaggagcagaccgacctgcaggtgccccccaccgccgacagattccaggccgaggagtacggcgagggcggcaccgacccccccgagggcccctacgactacacctacggctacggcgacgactacagagaggagaccgagctgggccccgccctgagcgccgagaccgcccacagcggcgccgccgcccacggccccagaggcctgaagggcgagaagggcgagcccgccgtgctggagcccggcatgctggtggagggcccccccggccccgagggccccgccggcctgatcggcccccccggcatccagggcaaccccggccccgtgggcgaccccggcgagagaggcccccccggcagagccggcctgcccggcagcgacggcgcccccggcccccccggcaccagcctgatgctgcccttcagattcggcagcggcggcggcgacaagggccccgtggtggccgcccaggaggcccaggcccaggccatcctgcagcaggccagactggccctgagaggcccccccggccccatgggctacaccggcagacccggccccctgggccagcccggcagccccggcctgaagggcgagagcggcgacctgggcccccagggccccagaggcccccagggcctgaccggcccccccggcaaggccggcagaagaggcagagccggcgccgacggcgccagaggcatgcccggcgaccccggcgtgaagggcgacagaggcttcgacggcctgcccggcctgcccggcgagaagggccacagaggcgacaccggcgcccagggcctgcccggcccccccggcgaggacggcgagagaggcgacgacggcgagatcggccccagaggcctgcccggcgagagcggccccagaggcctgctgggccccaagggcccccccggcatccccggccccccctag

SEQ ID NO: 232478 - DNA, 1875 bp, Artificial Sequence
  derived and/or modified sequence
atggagagatgcagcagatgccacagactgctgctgctgctgcccctggtgctgggcctgagcgccgcccccggctgggccggcgccccccccgtggacgtgctgagagccctgagattccccagcctgcccgacggcgtgagaagagccaagggcatctgccccgccgacgtggcctacagagtggccagacccgcccagctgagcgcccccaccagacagctgttccccggcggcttccccaaggacttcagcctgctgaccgtggtgagaaccagacccggcctgcaggcccccctgctgaccctgtacagcgcccagggcgtgagacagctgggcctggagctgggcccccccgtgagattcctgtacgaggaccagaccggcagaccccagccccccagccagcccgtgttcagaggcctgagcctggccgacggcaagtggcacagagtggccgtggccgtgaagggccagagcgtgaccctgatcgtggactgcaagaagagagtgaccagacccctgcccagaagcgccagacccgtgctggacacccacggcgtgatcatcttcggcgccagaatcctggacgaggaggtgttcgagggcgacgtgcaggagctggccatcgtgcccggcgtgcaggccgcctacgagagctgcgagcagaaggagctggagtgcgagggcggccagagagagagaccccagaaccagcagccccacagagcccagagaagcccccagcagcagcccagcagactgcacagaccccagaaccaggagccccagagccagcccaccgagagcctgtactacgactacaagcccccctactacgacgtgatgaccaccggcaccacccccgactaccaggaccccacccccggcgaggaggaggagatcctggagagcagcctgctgccccccctggaggaggagcagaccgacctgcaggtgccccccaccgccgacagattccaggccgaggagtacggcgagggcggcaccgacccccccgagggcccctacgactacacctacggctacggcgacgactacagagaggagaccgagctgggccccgccctgagcgccgagaccgcccacagcggcgccgccgcccacggccccagaggcctgaagggcgagaagggcgagcccgccgtgctggagcccggcatgctggtggagggcccccccggccccgagggccccgccggcctgatcggcccccccggcatccagggcaaccccggccccgtgggcgaccccggcgagagaggcccccccggcagagccggcctgcccggcagcgacggcgcccccggcccccccggcaccagcctgatgctgcccttcagattcggcagcggcggcggcgacaagggccccgtggtggccgcccaggaggcccaggcccaggccatcctgcagcaggccagactggccctgagaggcccccccggccccatgggctacaccggcagacccggccccctgggccagcccggcagccccggcctgaagggcgagagcggcgacctgggcccccagggccccagaggcccccagggcctgaccggcccccccggcaaggccggcagaagaggcagagccggcgccgacggcgccagaggcatgcccggcgaccccggcgtgaagggcgacagaggcttcgacggcctgcccggcctgcccggcgagaagggccacagaggcgacaccggcgcccagggcctgcccggcccccccggcgaggacggcgagagaggcgacgacggcgagatcggccccagaggcctgcccggcgagagcggccccagaggcctgctgggccccaagggcccccccggcatccccggccccccctag

SEQ ID NO: 232479 - DNA, 5070 bp, Artificial Sequence
  derived and/or modified sequence
atggagagatgcagcagatgccacagactgctgctgctgctgcccctggtgctgggcctgagcgccgcccccggctgggccggcgccccccccgtggacgtgctgagagccctgagattccccagcctgcccgacggcgtgagaagagccaagggcatctgccccgccgacgtggcctacagagtggccagacccgcccagctgagcgcccccaccagacagctgttccccggcggcttccccaaggacttcagcctgctgaccgtggtgagaaccagacccggcctgcaggcccccctgctgaccctgtacagcgcccagggcgtgagacagctgggcctggagctgggcccccccgtgagattcctgtacgaggaccagaccggcagaccccagccccccagccagcccgtgttcagaggcctgagcctggccgacggcaagtggcacagagtggccgtggccgtgaagggccagagcgtgaccctgatcgtggactgcaagaagagagtgaccagacccctgcccagaagcgccagacccgtgctggacacccacggcgtgatcatcttcggcgccagaatcctggacgaggaggtgttcgagggcgacgtgcaggagctggccatcgtgcccggcgtgcaggccgcctacgagagctgcgagcagaaggagctggagtgcgagggcggccagagagagagaccccagaaccagcagccccacagagcccagagaagcccccagcagcagcccagcagactgcacagaccccagaaccaggagccccagagccaggagcagaccgacctgcaggtgccccccaccgccgacagattccaggccgaggagtacggcgagggcggcaccgacccccccgagggcccctacgactacacctacggctacggcgacgactacagagaggagaccgagctgggccccgccctgagcgccgagaccgcccacagcggcgccgccgcccacggccccagaggcctgaagggcgagaagggcgagcccgccgtgctggagcccggcatgctggtggagggcccccccggccccgagggccccgccggcctgatcggcccccccggcatccagggcaaccccggccccgtgggcgaccccggcgagagaggcccccccggcagagccggcctgcccggcagcgacggcgcccccggcccccccggcaccagcctgatgctgcccttcagattcggcagcggcggcggcgacaagggccccgtggtggccgcccaggaggcccaggcccaggccatcctgcagcaggccagactggccctgagaggcccccccggccccatgggctacaccggcagacccggccccctgggccagcccggcagccccggcctgaagggcgagagcggcgacctgggcccccagggccccagaggcccccagggcctgaccggcccccccggcaaggccggcagaagaggcagagccggcgccgacggcgccagaggcatgcccggcgaccccggcgtgaagggcgacagaggcttcgacggcctgcccggcctgcccggcgagaagggccacagaggcgacaccggcgcccagggcctgcccggcccccccggcgaggacggcgagagaggcgacgacggcgagatcggccccagaggcctgcccggcgagagcggccccagaggcctgctgggccccaagggcccccccggcatccccggcccccccggcgtgagaggcatggacggcccccagggccccaagggcagcctgggcccccagggcgagcccggcccccccggccagcagggcacccccggcacccagggcctgcccggcccccagggcgccatcggcccccacggcgagaagggcccccagggcaagcccggcctgcccggcatgcccggcagcgacggcccccccggccaccccggcaaggagggcccccccggcaccaagggcaaccagggccccagcggcccccagggccccctgggctaccccggccccagaggcgtgaagggcgtggacggcatcagaggcctgaagggccacaagggcgagaagggcgaggacggcttccccggcttcaagggcgacatcggcgtgaagggcgacagaggcgaggtgggcgtgcccggcagcagaggcgaggacggccccgagggccccaagggcagaaccggccccaccggcgaccccggcccccccggcctgatgggcgagaagggcaagctgggcgtgcccggcctgcccggctaccccggcagacagggccccaagggcagcctgggcttccccggcttccccggcgccagcggcgagaagggcgccagaggcctgagcggcaagagcggccccagaggcgagagaggccccaccggccccagaggccagagaggccccagaggcgccaccggcaagagcggcgccaagggcaccagcggcggcgacggcccccacggcccccccggcgagagaggcctgcccggcccccagggccccaacggcttccccggccccaagggcccccccggcccccccggcaaggacggcctgcccggccaccccggccagagaggcgaggtgggcttccagggcaagaccggcccccccggcccccccggcgtggtgggcccccagggcgccgccggcgagaccggccccatgggcgagagaggccaccccggcccccccggcccccccggcgagcagggcctgcccggcaccgccggcaaggagggcaccaagggcgaccccggcccccccggcgcccccggcaaggacggccccgccggcctgagaggcttccccggcgagagaggcctgcccggcaccgccggcggccccggcctgaagggcaacgagggccccagcggcccccccggccccgccggcagccccggcgagagaggcgccgccggcagcggcggccccatcggcccccccggcagacccggcccccagggcccccccggcgccgccggcgagaagggcgtgcccggcgagaagggccccatcggccccaccggcagagacggcgtgcagggccccgtgggcctgcccggccccgccggcccccccggcgtggccggcgaggacggcgacaagggcgaggtgggcgaccccggccagaagggcaccaagggcaacaagggcgagcacggcccccccggcccccccggccccatcggccccgtgggccagcccggcgccgccggcgccgacggcgagcccggcgccagaggcccccagggccacttcggcgccaagggcgacgagggcaccagaggcttcaacggcccccccggccccatcggcctgcagggcctgcccggccccagcggcgagaagggcgagaccggcgacgtgggccccatgggcccccccggcccccccggccccagaggccccgccggccccaacggcgccgacggcccccagggcccccccggcggcgtgggcaacctgggcccccccggcgagaagggcgagcccggcgagagcggcagccccggcatccagggcgagcccggcgtgaagggccccagaggcgagagaggcgagaagggcgagagcggccagcccggcgagcccggcccccccggccccaagggccccaccggcgacgacggccccaagggcaaccccggccccgtgggcttccccggcgaccccggcccccccggcgagggcggccccagaggccaggacggcgccaagggcgacagaggcgaggacggcgagcccggccagcccggcagccccggccccaccggcgagaacggcccccccggccccctgggcaagagaggccccgccggcagccccggcagcgagggcagacagggcggcaagggcgccaagggcgaccccggcgccatcggcgcccccggcaagaccggccccgtgggccccgccggccccgccggcaagcccggccccgacggcctgagaggcctgcccggcagcgtgggccagcagggcagacccggcgccaccggccaggccggcccccccggccccgtgggcccccccggcctgcccggcctgagaggcgacgccggcgccaagggcgagaagggccaccccggcctgatcggcctgatcggcccccccggcgagcagggcgagaagggcgacagaggcctgcccggcccccagggcagccccggccagaagggcgagatgggcatccccggcgccagcggccccatcggccccggcggcccccccggcctgcccggccccgccggccccaagggcgccaagggcgccaccggccccggcggccccaagggcgagaagggcgtgcagggcccccccggccaccccggcccccccggcgaggtgatccagcccctgcccatccagatgcccaagaagaccagaagaagcgtggacggcagcagactgatgcaggaggacgaggccatccccaccggcggcgcccccggcagccccggcggcctggaggagatcttcggcagcctggacagcctgagagaggagatcgagcagatgagaagacccaccggcacccaggacagccccgccagaacctgccaggacctgaagctgtgccaccccgagctgcccgacggcgagtactgggtggaccccaaccagggctgcgccagagacgccttcagagtgttctgcaacttcaccgccggcggcgagacctgcgtgacccccagagacgacgtgacccagttcagctacgtggacagcgagggcagccccgtgggcgtggtgcagctgaccttcctgagactgctgagcgtgagcgcccaccaggacgtgagctacccctgcagcggcgccgccagagacggccccctgagactgagaggcgccaacgaggacgagctgagccccgagaccagcccctacgtgaaggagttcagagacggctgccagacccagcagggcagaaccgtgctggaggtgagaacccccgtgctggagcagctgcccgtgctggacgccagcttcagcgacctgggcgccccccccagaagaggcggcgtgctgctgggccccgtgtgcttcatgggctag

SEQ ID NO: 232480 - DNA, 5133 bp, Artificial Sequence
  derived and/or modified sequence
atggagagatgcagcagatgccacagactgctgctgctgctgcccctggtgctgggcctgagcgccgcccccggctgggccggcgccccccccgtggacgtgctgagagccctgagattccccagcctgcccgacggcgtgagaagagccaagggcatctgccccgccgacgtggcctacagagtggccagacccgcccagctgagcgcccccaccagacagctgttccccggcggcttccccaaggacttcagcctgctgaccgtggtgagaaccagacccggcctgcaggcccccctgctgaccctgtacagcgcccagggcgtgagacagctgggcctggagctgggcccccccgtgagattcctgtacgaggaccagaccggcagaccccagccccccagccagcccgtgttcagaggcctgagcctggccgacggcaagtggcacagagtggccgtggccgtgaagggccagagcgtgaccctgatcgtggactgcaagaagagagtgaccagacccctgcccagaagcgccagacccgtgctggacacccacggcgtgatcatcttcggcgccagaatcctggacgaggaggtgttcgagggcgacgtgcaggagctggccatcgtgcccggcgtgcaggccgcctacgagagctgcgagcagaaggagctggagtgcgagggcggccagagagagagaccccagaaccagcagccccacagagcccagagaagcccccagcagcagcccagcagactgcacagaccccagaaccaggagccccagagccaggaccccacccccggcgaggaggaggagatcctggagagcagcctgctgccccccctggaggaggagcagaccgacctgcaggtgccccccaccgccgacagattccaggccgaggagtacggcgagggcggcaccgacccccccgagggcccctacgactacacctacggctacggcgacgactacagagaggagaccgagctgggccccgccctgagcgccgagaccgcccacagcggcgccgccgcccacggccccagaggcctgaagggcgagaagggcgagcccgccgtgctggagcccggcatgctggtggagggcccccccggccccgagggccccgccggcctgatcggcccccccggcatccagggcaaccccggccccgtgggcgaccccggcgagagaggcccccccggcagagccggcctgcccggcagcgacggcgcccccggcccccccggcaccagcctgatgctgcccttcagattcggcagcggcggcggcgacaagggccccgtggtggccgcccaggaggcccaggcccaggccatcctgcagcaggccagactggccctgagaggcccccccggccccatgggctacaccggcagacccggccccctgggccagcccggcagccccggcctgaagggcgagagcggcgacctgggcccccagggccccagaggcccccagggcctgaccggcccccccggcaaggccggcagaagaggcagagccggcgccgacggcgccagaggcatgcccggcgaccccggcgtgaagggcgacagaggcttcgacggcctgcccggcctgcccggcgagaagggccacagaggcgacaccggcgcccagggcctgcccggcccccccggcgaggacggcgagagaggcgacgacggcgagatcggccccagaggcctgcccggcgagagcggccccagaggcctgctgggccccaagggcccccccggcatccccggcccccccggcgtgagaggcatggacggcccccagggccccaagggcagcctgggcccccagggcgagcccggcccccccggccagcagggcacccccggcacccagggcctgcccggcccccagggcgccatcggcccccacggcgagaagggcccccagggcaagcccggcctgcccggcatgcccggcagcgacggcccccccggccaccccggcaaggagggcccccccggcaccaagggcaaccagggccccagcggcccccagggccccctgggctaccccggccccagaggcgtgaagggcgtggacggcatcagaggcctgaagggccacaagggcgagaagggcgaggacggcttccccggcttcaagggcgacatcggcgtgaagggcgacagaggcgaggtgggcgtgcccggcagcagaggcgaggacggccccgagggccccaagggcagaaccggccccaccggcgaccccggcccccccggcctgatgggcgagaagggcaagctgggcgtgcccggcctgcccggctaccccggcagacagggccccaagggcagcctgggcttccccggcttccccggcgccagcggcgagaagggcgccagaggcctgagcggcaagagcggccccagaggcgagagaggccccaccggccccagaggccagagaggccccagaggcgccaccggcaagagcggcgccaagggcaccagcggcggcgacggcccccacggcccccccggcgagagaggcctgcccggcccccagggccccaacggcttccccggccccaagggcccccccggcccccccggcaaggacggcctgcccggccaccccggccagagaggcgaggtgggcttccagggcaagaccggcccccccggcccccccggcgtggtgggcccccagggcgccgccggcgagaccggccccatgggcgagagaggccaccccggcccccccggcccccccggcgagcagggcctgcccggcaccgccggcaaggagggcaccaagggcgaccccggcccccccggcgcccccggcaaggacggccccgccggcctgagaggcttccccggcgagagaggcctgcccggcaccgccggcggccccggcctgaagggcaacgagggccccagcggcccccccggccccgccggcagccccggcgagagaggcgccgccggcagcggcggccccatcggcccccccggcagacccggcccccagggcccccccggcgccgccggcgagaagggcgtgcccggcgagaagggccccatcggccccaccggcagagacggcgtgcagggccccgtgggcctgcccggccccgccggcccccccggcgtggccggcgaggacggcgacaagggcgaggtgggcgaccccggccagaagggcaccaagggcaacaagggcgagcacggcccccccggcccccccggccccatcggccccgtgggccagcccggcgccgccggcgccgacggcgagcccggcgccagaggcccccagggccacttcggcgccaagggcgacgagggcaccagaggcttcaacggcccccccggccccatcggcctgcagggcctgcccggccccagcggcgagaagggcgagaccggcgacgtgggccccatgggcccccccggcccccccggccccagaggccccgccggccccaacggcgccgacggcccccagggcccccccggcggcgtgggcaacctgggcccccccggcgagaagggcgagcccggcgagagcggcagccccggcatccagggcgagcccggcgtgaagggccccagaggcgagagaggcgagaagggcgagagcggccagcccggcgagcccggcccccccggccccaagggccccaccggcgacgacggccccaagggcaaccccggccccgtgggcttccccggcgaccccggcccccccggcgagggcggccccagaggccaggacggcgccaagggcgacagaggcgaggacggcgagcccggccagcccggcagccccggccccaccggcgagaacggcccccccggccccctgggcaagagaggccccgccggcagccccggcagcgagggcagacagggcggcaagggcgccaagggcgaccccggcgccatcggcgcccccggcaagaccggccccgtgggccccgccggccccgccggcaagcccggccccgacggcctgagaggcctgcccggcagcgtgggccagcagggcagacccggcgccaccggccaggccggcccccccggccccgtgggcccccccggcctgcccggcctgagaggcgacgccggcgccaagggcgagaagggccaccccggcctgatcggcctgatcggcccccccggcgagcagggcgagaagggcgacagaggcctgcccggcccccagggcagccccggccagaagggcgagatgggcatccccggcgccagcggccccatcggccccggcggcccccccggcctgcccggccccgccggccccaagggcgccaagggcgccaccggccccggcggccccaagggcgagaagggcgtgcagggcccccccggccaccccggcccccccggcgaggtgatccagcccctgcccatccagatgcccaagaagaccagaagaagcgtggacggcagcagactgatgcaggaggacgaggccatccccaccggcggcgcccccggcagccccggcggcctggaggagatcttcggcagcctggacagcctgagagaggagatcgagcagatgagaagacccaccggcacccaggacagccccgccagaacctgccaggacctgaagctgtgccaccccgagctgcccgacggcgagtactgggtggaccccaaccagggctgcgccagagacgccttcagagtgttctgcaacttcaccgccggcggcgagacctgcgtgacccccagagacgacgtgacccagttcagctacgtggacagcgagggcagccccgtgggcgtggtgcagctgaccttcctgagactgctgagcgtgagcgcccaccaggacgtgagctacccctgcagcggcgccgccagagacggccccctgagactgagaggcgccaacgaggacgagctgagccccgagaccagcccctacgtgaaggagttcagagacggctgccagacccagcagggcagaaccgtgctggaggtgagaacccccgtgctggagcagctgcccgtgctggacgccagcttcagcgacctgggcgccccccccagaagaggcggcgtgctgctgggccccgtgtgcttcatgggctag

SEQ ID NO: 232481 - DNA, 5148 bp, Artificial Sequence
  derived and/or modified sequence
atggagagatgcagcagatgccacagactgctgctgctgctgcccctggtgctgggcctgagcgccgcccccggctgggccggcgccccccccgtggacgtgctgagagccctgagattccccagcctgcccgacggcgtgagaagagccaagggcatctgccccgccgacgtggcctacagagtggccagacccgcccagctgagcgcccccaccagacagctgttccccggcggcttccccaaggacttcagcctgctgaccgtggtgagaaccagacccggcctgcaggcccccctgctgaccctgtacagcgcccagggcgtgagacagctgggcctggagctgggcagacccgtgagattcctgtacgaggaccagaccggcagaccccagccccccagccagcccgtgttcagaggcctgagcctggccgacggcaagtggcacagagtggccgtggccgtgaagggccagagcgtgaccctgatcgtggactgcaagaagagagtgaccagacccctgcccagaagcgccagacccgtgctggacacccacggcgtgatcatcttcggcgccagaatcctggacgaggaggtgttcgagggcgacgtgcaggagctggccatcgtgcccggcgtgcaggccgcctacgagagctgcgagcagaaggagctggagtgcgagggcggccagagagagagaccccagaaccagcagccccacagagcccagagaagcccccagcagcagcccagcagactgcacagaccccagaaccaggagccccagagccagcccaccgagagcctgtactacgactacgagcccccctactacgacgtgatgaccaccggcaccacccccgactaccaggagcagaccgacctgcaggtgccccccaccgccgacagattccaggccgaggagtacggcgagggcggcaccgacccccccgagggcccctacgactacacctacggctacggcgacgactacagagaggagaccgagctgggccccgccctgagcgccgagaccgcccacagcggcgccgccgcccacggccccagaggcctgaagggcgagaagggcgagcccgccgtgctggagcccggcatgctggtggagggcccccccggccccgagggccccgccggcctgatcggcccccccggcatccagggcaaccccggccccgtgggcgaccccggcgagagaggcccccccggcagagccggcctgcccggcagcgacggcgcccccggcccccccggcaccagcctgatgctgcccttcagattcggcagcggcggcggcgacaagggccccgtggtggccgcccaggaggcccaggcccaggccatcctgcagcaggccagactggccctgagaggcccccccggccccatgggctacaccggcagacccggccccctgggccagcccggcagccccggcctgaagggcgagagcggcgacctgggcccccagggccccagaggcccccagggcctgaccggcccccccggcaaggccggcagaagaggcagagccggcgccgacggcgccagaggcatgcccggcgaccccggcgtgaagggcgacagaggcttcgacggcctgcccggcctgcccggcgagaagggccacagaggcgacaccggcgcccagggcctgcccggcccccccggcgaggacggcgagagaggcgacgacggcgagatcggccccagaggcctgcccggcgagagcggccccagaggcctgctgggccccaagggcccccccggcatccccggcccccccggcgtgagaggcatggacggcccccagggccccaagggcagcctgggcccccagggcgagcccggcccccccggccagcagggcacccccggcacccagggcctgcccggcccccagggcgccatcggcccccacggcgagaagggcccccagggcaagcccggcctgcccggcatgcccggcagcgacggcccccccggccaccccggcaaggagggcccccccggcaccaagggcaaccagggccccagcggcccccagggccccctgggctaccccggccccagaggcgtgaagggcgtggacggcatcagaggcctgaagggccacaagggcgagaagggcgaggacggcttccccggcttcaagggcgacatcggcgtgaagggcgacagaggcgaggtgggcgtgcccggcagcagaggcgaggacggccccgagggccccaagggcagaaccggccccaccggcgaccccggcccccccggcctgatgggcgagaagggcaagctgggcgtgcccggcctgcccggctaccccggcagacagggccccaagggcagcctgggcttccccggcttccccggcgccagcggcgagaagggcgccagaggcctgagcggcaagagcggccccagaggcgagagaggccccaccggccccagaggccagagaggccccagaggcgccaccggcaagagcggcgccaagggcaccagcggcggcgacggcccccacggcccccccggcgagagaggcctgcccggcccccagggccccaacggcttccccggccccaagggccccctgggcccccccggcaaggacggcctgcccggccaccccggccagagaggcgaggtgggcttccagggcaagaccggcccccccggcccccccggcgtggtgggcccccagggcgccgccggcgagaccggccccatgggcgagagaggccaccccggcccccccggcccccccggcgagcagggcctgcccggcaccgccggcaaggagggcaccaagggcgaccccggcccccccggcgcccccggcaaggacggccccgccggcctgagaggcttccccggcgagagaggcctgcccggcaccgccggcggccccggcctgaagggcaacgagggccccagcggcccccccggccccgccggcagccccggcgagagaggcgccgccggcagcggcggccccatcggcccccccggcagacccggcccccagggcccccccggcgccgccggcgagaagggcgtgcccggcgagaagggccccatcggccccaccggcagagacggcgtgcagggccccgtgggcctgcccggccccgccggcccccccggcgtggccggcgaggacggcgacaagggcgaggtgggcgaccccggccagaagggcaccaagggcaacaagggcgagcacggcccccccggcccccccggccccatcggccccgtgggccagcccggcgccgccggcgccgacggcgagcccggcgccagaggcccccagggccacttcggcgccaagggcgacgagggcaccagaggcttcaacggcccccccggccccatcggcctgcagggcctgcccggccccagcggcgagaagggcgagaccggcgacgtgggccccatgggcccccccggcccccccggccccagaggccccgccggccccaacggcgccgacggcccccagggcccccccggcggcgtgggcaacctgggcccccccggcgagaagggcgagcccggcgagagcggcagccccggcatccagggcgagcccggcgtgaagggccccagaggcgagagaggcgagaagggcgagagcggccagcccggcgagcccggcccccccggccccaagggccccaccggcgacgacggccccaagggcaaccccggccccgtgggcttccccggcgaccccggcccccccggcgagggcggccccagaggccaggacggcgccaagggcgacagaggcgaggacggcgagcccggccagcccggcagccccggccccaccggcgagaacggcccccccggccccctgggcaagagaggccccgccggcagccccggcagcgagggcagacagggcggcaagggcgccaagggcgaccccggcgccatcggcgcccccggcaagaccggccccgtgggccccgccggccccgccggcaagcccggccccgacggcctgagaggcctgcccggcagcgtgggccagcagggcagacccggcgccaccggccaggccggcccccccggccccgtgggcccccccggcctgcccggcctgagaggcgacgccggcgccaagggcgagaagggccaccccggcctgatcggcctgatcggcccccccggcgagcagggcgagaagggcgacagaggcctgcccggcccccagggcagccccggccagaagggcgagatgggcatccccggcgccagcggccccatcggccccggcggcccccccggcctgcccggccccgccggccccaagggcgccaagggcgccaccggccccggcggccccaagggcgagaagggcgtgcagggcccccccggccaccccggcccccccggcgaggtgatccagcccctgcccatccagatgcccaagaagaccagaagaagcgtggacggcagcagactgatgcaggaggacgaggccatccccaccggcggcgcccccggcagccccggcggcctggaggagatcttcggcagcctggacagcctgagagaggagatcgagcagatgagaagacccaccggcacccaggacagccccgccagaacctgccaggacctgaagctgtgccaccccgagctgcccgacggcgagtactgggtggaccccaaccagggctgcgccagagacgccttcagagtgttctgcaacttcaccgccggcggcgagacctgcgtgacccccagagacgacgtgacccagttcagctacgtggacagcgagggcagccccgtgggcgtggtgcagctgaccttcctgagactgctgagcgtgagcgcccaccaggacgtgagctacccctgcagcggcgccgccagagacggccccctgagactgagaggcgccaacgaggacgagctgagccccgagaccagcccctacgtgaaggagttcagagacggctgccagacccagcagggcagaaccgtgctggaggtgagaacccccgtgctggagcagctgcccgtgctggacgccagcttcagcgacctgggcgccccccccagaagaggcggcgtgctgctgggccccgtgtgcttcatgggctag

SEQ ID NO: 232482 - DNA, 5052 bp, Artificial Sequence
  derived and/or modified sequence
ggcgccccccccgtggacgtgctgagagccctgagattccccagcctgcccgacggcgtgagaagagccaagggcatctgccccgccgacgtggcctacagagtggccagacccgcccagctgagcgcccccaccagacagctgttccccggcggcttccccaaggacttcagcctgctgaccgtggtgagaaccagacccggcctgcaggcccccctgctgaccctgtacagcgcccagggcgtgagacagctgggcctggagctgggcagacccgtgagattcctgtacgaggaccagaccggcagaccccagccccccagccagcccgtgttcagaggcctgagcctggccgacggcaagtggcacagagtggccgtggccgtgaagggccagagcgtgaccctgatcgtggactgcaagaagagagtgaccagacccctgcccagaagcgccagacccgtgctggacacccacggcgtgatcatcttcggcgccagaatcctggacgaggaggtgttcgagggcgacgtgcaggagctggccatcgtgcccggcgtgcaggccgcctacgagagctgcgagcagaaggagctggagtgcgagggcggccagagagagagaccccagaaccagcagccccacagagcccagagaagcccccagcagcagcccagcagactgcacagaccccagaaccaggagccccagagccaggaccccacccccggcgaggaggaggagatcctggagagcagcctgctgccccccctggaggaggagcagaccgacctgcaggtgccccccaccgccgacagattccaggccgaggagtacggcgagggcggcaccgacccccccgagggcccctacgactacacctacggctacggcgacgactacagagaggagaccgagctgggccccgccctgagcgccgagaccgcccacagcggcgccgccgcccacggccccagaggcctgaagggcgagaagggcgagcccgccgtgctggagcccggcatgctggtggagggcccccccggccccgagggccccgccggcctgatcggcccccccggcatccagggcaaccccggccccgtgggcgaccccggcgagagaggcccccccggcagagccggcctgcccggcagcgacggcgcccccggcccccccggcaccagcctgatgctgcccttcagattcggcagcggcggcggcgacaagggccccgtggtggccgcccaggaggcccaggcccaggccatcctgcagcaggccagactggccctgagaggcccccccggccccatgggctacaccggcagacccggccccctgggccagcccggcagccccggcctgaagggcgagagcggcgacctgggcccccagggccccagaggcccccagggcctgaccggcccccccggcaaggccggcagaagaggcagagccggcgccgacggcgccagaggcatgcccggcgaccccggcgtgaagggcgacagaggcttcgacggcctgcccggcctgcccggcgagaagggccacagaggcgacaccggcgcccagggcctgcccggcccccccggcgaggacggcgagagaggcgacgacggcgagatcggccccagaggcctgcccggcgagagcggccccagaggcctgctgggccccaagggcccccccggcatccccggcccccccggcgtgagaggcatggacggcccccagggccccaagggcagcctgggcccccagggcgagcccggcccccccggccagcagggcacccccggcacccagggcctgcccggcccccagggcgccatcggcccccacggcgagaagggcccccagggcaagcccggcctgcccggcatgcccggcagcgacggcccccccggccaccccggcaaggagggcccccccggcaccaagggcaaccagggccccagcggcccccagggccccctgggctaccccggccccagaggcgtgaagggcgtggacggcatcagaggcctgaagggccacaagggcgagaagggcgaggacggcttccccggcttcaagggcgacatcggcgtgaagggcgacagaggcgaggtgggcgtgcccggcagcagaggcgaggacggccccgagggccccaagggcagaaccggccccaccggcgaccccggcccccccggcctgatgggcgagaagggcaagctgggcgtgcccggcctgcccggctaccccggcagacagggccccaagggcagcctgggcttccccggcttccccggcgccagcggcgagaagggcgccagaggcctgagcggcaagagcggccccagaggcgagagaggccccaccggccccagaggccagagaggccccagaggcgccaccggcaagagcggcgccaagggcaccagcggcggcgacggcccccacggcccccccggcgagagaggcctgcccggcccccagggccccaacggcttccccggccccaagggcccccccggcccccccggcaaggacggcctgcccggccaccccggccagagaggcgaggtgggcttccagggcaagaccggcccccccggcccccccggcgtggtgggcccccagggcgccgccggcgagaccggccccatgggcgagagaggccaccccggcccccccggcccccccggcgagcagggcctgcccggcaccgccggcaaggagggcaccaagggcgaccccggcccccccggcgcccccggcaaggacggccccgccggcctgagaggcttccccggcgagagaggcctgcccggcaccgccggcggccccggcctgaagggcaacgagggccccagcggcccccccggccccgccggcagccccggcgagagaggcgccgccggcagcggcggccccatcggcccccccggcagacccggcccccagggcccccccggcgccgccggcgagaagggcgtgcccggcgagaagggccccatcggccccaccggcagagacggcgtgcagggccccgtgggcctgcccggccccgccggcccccccggcgtggccggcgaggacggcgacaagggcgaggtgggcgaccccggccagaagggcaccaagggcaacaagggcgagcacggcccccccggcccccccggccccatcggccccgtgggccagcccggcgccgccggcgccgacggcgagcccggcgccagaggcccccagggccacttcggcgccaagggcgacgagggcaccagaggcttcaacggcccccccggccccatcggcctgcagggcctgcccggccccagcggcgagaagggcgagaccggcgacgtgggccccatgggcccccccggcccccccggccccagaggccccgccggccccaacggcgccgacggcccccagggcccccccggcggcgtgggcaacctgggcccccccggcgagaagggcgagcccggcgagagcggcagccccggcatccagggcgagcccggcgtgaagggccccagaggcgagagaggcgagaagggcgagagcggccagcccggcgagcccggcccccccggccccaagggccccaccggcgacgacggccccaagggcaaccccggccccgtgggcttccccggcgaccccggcccccccggcgagggcggccccagaggccaggacggcgccaagggcgacagaggcgaggacggcgagcccggccagcccggcagccccggccccaccggcgagaacggcccccccggccccctgggcaagagaggccccgccggcagccccggcagcgagggcagacagggcggcaagggcgccaagggcgaccccggcgccatcggcgcccccggcaagaccggccccgtgggccccgccggccccgccggcaagcccggccccgacggcctgagaggcctgcccggcagcgtgggccagcagggcagacccggcgccaccggccaggccggcccccccggccccgtgggcccccccggcctgcccggcctgagaggcgacgccggcgccaagggcgagaagggccaccccggcctgatcggcctgatcggcccccccggcgagcagggcgagaagggcgacagaggcctgcccggcccccagggcagccccggccagaagggcgagatgggcatccccggcgccagcggccccatcggccccggcggcccccccggcctgcccggccccgccggccccaagggcgccaagggcgccaccggccccggcggccccaagggcgagaagggcgtgcagggcccccccggccaccccggcccccccggcgaggtgatccagcccctgcccatccagatgcccaagaagaccagaagaagcgtggacggcagcagactgatgcaggaggacgaggccatccccaccggcggcgcccccggcagccccggcggcctggaggagatcttcggcagcctggacagcctgagagaggagatcgagcagatgagaagacccaccggcacccaggacagccccgccagaacctgccaggacctgaagctgtgccaccccgagctgcccgacggcgagtactgggtggaccccaaccagggctgcgccagagacgccttcagagtgttctgcaacttcaccgccggcggcgagacctgcgtgacccccagagacgacgtgacccagttcagctacgtggacagcgagggcagccccgtgggcgtggtgcagctgaccttcctgagactgctgagcgtgagcgcccaccaggacgtgagctacccctgcagcggcgccgccagagacggccccctgagactgagaggcgccaacgaggacgagctgagccccgagaccagcccctacgtgaaggagttcagagacggctgccagacccagcagggcagaaccgtgctggaggtgagaacccccgtgctggagcagctgcccgtgctggacgccagcttcagcgacctgggcgccccccccagaagaggcggcgtgctgctgggccccgtgtgcttcatgggctag

SEQ ID NO: 232483 - DNA, 5070 bp, Artificial Sequence
  derived and/or modified sequence
atggagagatgcagcagatgccacagactgctgctgctgctgcccctggtgctgggcctgagcgccgcccccggctgggccggcgccccccccgtggacgtgctgagagccctgagattccccagcctgcccgacggcgtgagaagagccaagggcatctgccccgccgacgtggcctacagagtggccagacccgcccagctgagcgcccccaccagacagctgttccccggcggcttccccaaggacttcagcctgctgaccgtggtgagaaccagacccggcctgcaggcccccctgctgaccctgtacagcgcccagggcgtgagacagctgggcctggagctgggcagacccgtgagattcctgtacgaggaccagaccggcagaccccagccccccagccagcccgtgttcagaggcctgagcctggccgacggcaagtggcacagagtggccgtggccgtgaagggccagagcgtgaccctgatcgtggactgcaagaagagagtgaccagacccctgcccagaagcgccagacccgtgctggacacccacggcgtgatcatcttcggcgccagaatcctggacgaggaggtgttcgagggcgacgtgcaggagctggccatcgtgcccggcgtgcaggccgcctacgagagctgcgagcagaaggagctggagtgcgagggcggccagagagagagaccccagaaccagcagccccacagagcccagagaagcccccagcagcagcccagcagactgcacagaccccagaaccaggagccccagagccaggagcagaccgacctgcaggtgccccccaccgccgacagattccaggccgaggagtacggcgagggcggcaccgacccccccgagggcccctacgactacacctacggctacggcgacgactacagagaggagaccgagctgggccccgccctgagcgccgagaccgcccacagcggcgccgccgcccacggccccagaggcctgaagggcgagaagggcgagcccgccgtgctggagcccggcatgctggtggagggcccccccggccccgagggccccgccggcctgatcggcccccccggcatccagggcaaccccggccccgtgggcgaccccggcgagagaggcccccccggcagagccggcctgcccggcagcgacggcgcccccggcccccccggcaccagcctgatgctgcccttcagattcggcagcggcggcggcgacaagggccccgtggtggccgcccaggaggcccaggcccaggccatcctgcagcaggccagactggccctgagaggcccccccggccccatgggctacaccggcagacccggccccctgggccagcccggcagccccggcctgaagggcgagagcggcgacctgggcccccagggccccagaggcccccagggcctgaccggcccccccggcaaggccggcagaagaggcagagccggcgccgacggcgccagaggcatgcccggcgaccccggcgtgaagggcgacagaggcttcgacggcctgcccggcctgcccggcgagaagggccacagaggcgacaccggcgcccagggcctgcccggcccccccggcgaggacggcgagagaggcgacgacggcgagatcggccccagaggcctgcccggcgagagcggccccagaggcctgctgggccccaagggcccccccggcatccccggcccccccggcgtgagaggcatggacggcccccagggccccaagggcagcctgggcccccagggcgagcccggcccccccggccagcagggcacccccggcacccagggcctgcccggcccccagggcgccatcggcccccacggcgagaagggcccccagggcaagcccggcctgcccggcatgcccggcagcgacggcccccccggccaccccggcaaggagggcccccccggcaccaagggcaaccagggccccagcggcccccagggccccctgggctaccccggccccagaggcgtgaagggcgtggacggcatcagaggcctgaagggccacaagggcgagaagggcgaggacggcttccccggcttcaagggcgacatcggcgtgaagggcgacagaggcgaggtgggcgtgcccggcagcagaggcgaggacggccccgagggccccaagggcagaaccggccccaccggcgaccccggcccccccggcctgatgggcgagaagggcaagctgggcgtgcccggcctgcccggctaccccggcagacagggccccaagggcagcctgggcttccccggcttccccggcgccagcggcgagaagggcgccagaggcctgagcggcaagagcggccccagaggcgagagaggccccaccggccccagaggccagagaggccccagaggcgccaccggcaagagcggcgccaagggcaccagcggcggcgacggcccccacggcccccccggcgagagaggcctgcccggcccccagggccccaacggcttccccggccccaagggccccctgggcccccccggcaaggacggcctgcccggccaccccggccagagaggcgaggtgggcttccagggcaagaccggcccccccggcccccccggcgtggtgggcccccagggcgccgccggcgagaccggccccatgggcgagagaggccaccccggcccccccggcccccccggcgagcagggcctgcccggcaccgccggcaaggagggcaccaagggcgaccccggcccccccggcgcccccggcaaggacggccccgccggcctgagaggcttccccggcgagagaggcctgcccggcaccgccggcggccccggcctgaagggcaacgagggccccagcggcccccccggccccgccggcagccccggcgagagaggcgccgccggcagcggcggccccatcggcccccccggcagacccggcccccagggcccccccggcgccgccggcgagaagggcgtgcccggcgagaagggccccatcggccccaccggcagagacggcgtgcagggccccgtgggcctgcccggccccgccggcccccccggcgtggccggcgaggacggcgacaagggcgaggtgggcgaccccggccagaagggcaccaagggcaacaagggcgagcacggcccccccggcccccccggccccatcggccccgtgggccagcccggcgccgccggcgccgacggcgagcccggcgccagaggcccccagggccacttcggcgccaagggcgacgagggcaccagaggcttcaacggcccccccggccccatcggcctgcagggcctgcccggccccagcggcgagaagggcgagaccggcgacgtgggccccatgggcccccccggcccccccggccccagaggccccgccggccccaacggcgccgacggcccccagggcccccccggcggcgtgggcaacctgggcccccccggcgagaagggcgagcccggcgagagcggcagccccggcatccagggcgagcccggcgtgaagggccccagaggcgagagaggcgagaagggcgagagcggccagcccggcgagcccggcccccccggccccaagggccccaccggcgacgacggccccaagggcaaccccggccccgtgggcttccccggcgaccccggcccccccggcgagggcggccccagaggccaggacggcgccaagggcgacagaggcgaggacggcgagcccggccagcccggcagccccggccccaccggcgagaacggcccccccggccccctgggcaagagaggccccgccggcagccccggcagcgagggcagacagggcggcaagggcgccaagggcgaccccggcgccatcggcgcccccggcaagaccggccccgtgggccccgccggccccgccggcaagcccggccccgacggcctgagaggcctgcccggcagcgtgggccagcagggcagacccggcgccaccggccaggccggcccccccggccccgtgggcccccccggcctgcccggcctgagaggcgacgccggcgccaagggcgagaagggccaccccggcctgatcggcctgatcggcccccccggcgagcagggcgagaagggcgacagaggcctgcccggcccccagggcagccccggccagaagggcgagatgggcatccccggcgccagcggccccatcggccccggcggcccccccggcctgcccggccccgccggccccaagggcgccaagggcgccaccggccccggcggccccaagggcgagaagggcgtgcagggcccccccggccaccccggcccccccggcgaggtgatccagcccctgcccatccagatgcccaagaagaccagaagaagcgtggacggcagcagactgatgcaggaggacgaggccatccccaccggcggcgcccccggcagccccggcggcctggaggagatcttcggcagcctggacagcctgagagaggagatcgagcagatgagaagacccaccggcacccaggacagccccgccagaacctgccaggacctgaagctgtgccaccccgagctgcccgacggcgagtactgggtggaccccaaccagggctgcgccagagacgccttcagagtgttctgcaacttcaccgccggcggcgagacctgcgtgacccccagagacgacgtgacccagttcagctacgtggacagcgagggcagccccgtgggcgtggtgcagctgaccttcctgagactgctgagcgtgagcgcccaccaggacgtgagctacccctgcagcggcgccgccagagacggccccctgagactgagaggcgccaacgaggacgagctgagccccgagaccagcccctacgtgaaggagttcagagacggctgccagacccagcagggcagaaccgtgctggaggtgagaacccccgtgctggagcagctgcccgtgctggacgccagcttcagcgacctgggcgccccccccagaagaggcggcgtgctgctgggccccgtgtgcttcatgggctag

SEQ ID NO: 232484 - DNA, 5211 bp, Artificial Sequence
  derived and/or modified sequence
atggagagatgcagcagatgccacagactgctgctgctgctgcccctggtgctgggcctgagcgccgcccccggctgggccggcgccccccccgtggacgtgctgagagccctgagattccccagcctgcccgacggcgtgagaagagccaagggcatctgccccgccgacgtggcctacagagtggccagacccgcccagctgagcgcccccaccagacagctgttccccggcggcttccccaaggacttcagcctgctgaccgtggtgagaaccagacccggcctgcaggcccccctgctgaccctgtacagcgcccagggcgtgagacagctgggcctggagctgggcagacccgtgagattcctgtacgaggaccagaccggcagaccccagccccccagccagcccgtgttcagaggcctgagcctggccgacggcaagtggcacagagtggccgtggccgtgaagggccagagcgtgaccctgatcgtggactgcaagaagagagtgaccagacccctgcccagaagcgccagacccgtgctggacacccacggcgtgatcatcttcggcgccagaatcctggacgaggaggtgttcgagggcgacgtgcaggagctggccatcgtgcccggcgtgcaggccgcctacgagagctgcgagcagaaggagctggagtgcgagggcggccagagagagagaccccagaaccagcagccccacagagcccagagaagcccccagcagcagcccagcagactgcacagaccccagaaccaggagccccagagccagcccaccgagagcctgtactacgactacgagcccccctactacgacgtgatgaccaccggcaccacccccgactaccaggaccccacccccggcgaggaggaggagatcctggagagcagcctgctgccccccctggaggaggagcagaccgacctgcaggtgccccccaccgccgacagattccaggccgaggagtacggcgagggcggcaccgacccccccgagggcccctacgactacacctacggctacggcgacgactacagagaggagaccgagctgggccccgccctgagcgccgagaccgcccacagcggcgccgccgcccacggccccagaggcctgaagggcgagaagggcgagcccgccgtgctggagcccggcatgctggtggagggcccccccggccccgagggccccgccggcctgatcggcccccccggcatccagggcaaccccggccccgtgggcgaccccggcgagagaggcccccccggcagagccggcctgcccggcagcgacggcgcccccggcccccccggcaccagcctgatgctgcccttcagattcggcagcggcggcggcgacaagggccccgtggtggccgcccaggaggcccaggcccaggccatcctgcagcaggccagactggccctgagaggcccccccggccccatgggctacaccggcagacccggccccctgggccagcccggcagccccggcctgaagggcgagagcggcgacctgggcccccagggccccagaggcccccagggcctgaccggcccccccggcaaggccggcagaagaggcagagccggcgccgacggcgccagaggcatgcccggcgaccccggcgtgaagggcgacagaggcttcgacggcctgcccggcctgcccggcgagaagggccacagaggcgacaccggcgcccagggcctgcccggcccccccggcgaggacggcgagagaggcgacgacggcgagatcggccccagaggcctgcccggcgagagcggccccagaggcctgctgggccccaagggcccccccggcatccccggcccccccggcgtgagaggcatggacggcccccagggccccaagggcagcctgggcccccagggcgagcccggcccccccggccagcagggcacccccggcacccagggcctgcccggcccccagggcgccatcggcccccacggcgagaagggcccccagggcaagcccggcctgcccggcatgcccggcagcgacggcccccccggccaccccggcaaggagggcccccccggcaccaagggcaaccagggccccagcggcccccagggccccctgggctaccccggccccagaggcgtgaagggcgtggacggcatcagaggcctgaagggccacaagggcgagaagggcgaggacggcttccccggcttcaagggcgacatcggcgtgaagggcgacagaggcgaggtgggcgtgcccggcagcagaggcgaggacggccccgagggccccaagggcagaaccggccccaccggcgaccccggcccccccggcctgatgggcgagaagggcaagctgggcgtgcccggcctgcccggctaccccggcagacagggccccaagggcagcctgggcttccccggcttccccggcgccagcggcgagaagggcgccagaggcctgagcggcaagagcggccccagaggcgagagaggccccaccggccccagaggccagagaggccccagaggcgccaccggcaagagcggcgccaagggcaccagcggcggcgacggcccccacggcccccccggcgagagaggcctgcccggcccccagggccccaacggcttccccggccccaagggccccctgggcccccccggcaaggacggcctgcccggccaccccggccagagaggcgaggtgggcttccagggcaagaccggcccccccggcccccccggcgtggtgggcccccagggcgccgccggcgagaccggccccatgggcgagagaggccaccccggcccccccggcccccccggcgagcagggcctgcccggcaccgccggcaaggagggcaccaagggcgaccccggcccccccggcgcccccggcaaggacggccccgccggcctgagaggcttccccggcgagagaggcctgcccggcaccgccggcggccccggcctgaagggcaacgagggccccagcggcccccccggccccgccggcagccccggcgagagaggcgccgccggcagcggcggccccatcggcccccccggcagacccggcccccagggcccccccggcgccgccggcgagaagggcgtgcccggcgagaagggccccatcggccccaccggcagagacggcgtgcagggccccgtgggcctgcccggccccgccggcccccccggcgtggccggcgaggacggcgacaagggcgaggtgggcgaccccggccagaagggcaccaagggcaacaagggcgagcacggcccccccggcccccccggccccatcggccccgtgggccagcccggcgccgccggcgccgacggcgagcccggcgccagaggcccccagggccacttcggcgccaagggcgacgagggcaccagaggcttcaacggcccccccggccccatcggcctgcagggcctgcccggccccagcggcgagaagggcgagaccggcgacgtgggccccatgggcccccccggcccccccggccccagaggccccgccggccccaacggcgccgacggcccccagggcccccccggcggcgtgggcaacctgggcccccccggcgagaagggcgagcccggcgagagcggcagccccggcatccagggcgagcccggcgtgaagggccccagaggcgagagaggcgagaagggcgagagcggccagcccggcgagcccggcccccccggccccaagggccccaccggcgacgacggccccaagggcaaccccggccccgtgggcttccccggcgaccccggcccccccggcgagggcggccccagaggccaggacggcgccaagggcgacagaggcgaggacggcgagcccggccagcccggcagccccggccccaccggcgagaacggcccccccggccccctgggcaagagaggccccgccggcagccccggcagcgagggcagacagggcggcaagggcgccaagggcgaccccggcgccatcggcgcccccggcaagaccggccccgtgggccccgccggccccgccggcaagcccggccccgacggcctgagaggcctgcccggcagcgtgggccagcagggcagacccggcgccaccggccaggccggcccccccggccccgtgggcccccccggcctgcccggcctgagaggcgacgccggcgccaagggcgagaagggccaccccggcctgatcggcctgatcggcccccccggcgagcagggcgagaagggcgacagaggcctgcccggcccccagggcagccccggccagaagggcgagatgggcatccccggcgccagcggccccatcggccccggcggcccccccggcctgcccggccccgccggccccaagggcgccaagggcgccaccggccccggcggccccaagggcgagaagggcgtgcagggcccccccggccaccccggcccccccggcgaggtgatccagcccctgcccatccagatgcccaagaagaccagaagaagcgtggacggcagcagactgatgcaggaggacgaggccatccccaccggcggcgcccccggcagccccggcggcctggaggagatcttcggcagcctggacagcctgagagaggagatcgagcagatgagaagacccaccggcacccaggacagccccgccagaacctgccaggacctgaagctgtgccaccccgagctgcccgacggcgagtactgggtggaccccaaccagggctgcgccagagacgccttcagagtgttctgcaacttcaccgccggcggcgagacctgcgtgacccccagagacgacgtgacccagttcagctacgtggacagcgagggcagccccgtgggcgtggtgcagctgaccttcctgagactgctgagcgtgagcgcccaccaggacgtgagctacccctgcagcggcgccgccagagacggccccctgagactgagaggcgccaacgaggacgagctgagccccgagaccagcccctacgtgaaggagttcagagacggctgccagacccagcagggcagaaccgtgctggaggtgagaacccccgtgctggagcagctgcccgtgctggacgccagcttcagcgacctgggcgccccccccagaagaggcggcgtgctgctgggccccgtgtgcttcatgggctag

SEQ ID NO: 232485 - DNA, 5211 bp, Artificial Sequence
  derived and/or modified sequence
atggagagatgcagcagatgccacagactgctgctgctgctgcccctggtgctgggcctgagcgccgcccccggctgggccggcgccccccccgtggacgtgctgagagccctgagattccccagcctgcccgacggcgtgagaagagccaagggcatctgccccgccgacgtggcctacagagtggccagacccgcccagctgagcgcccccaccagacagctgttccccggcggcttccccaaggacttcagcctgctgaccgtggtgagaaccagacccggcctgcaggcccccctgctgaccctgtacagcgcccagggcgtgagacagctgggcctggagctgggcagacccgtgagattcctgtacgaggaccagaccggcagaccccagccccccagccagcccgtgttcagaggcctgagcctggccgacggcaagtggcacagagtggccgtggccgtgaagggccagagcgtgaccctgatcgtggactgcaagaagagagtgaccagacccctgcccagaagcgccagacccgtgctggacacccacggcgtgatcatcttcggcgccagaatcctggacgaggaggtgttcgagggcgacgtgcaggagctggccatcgtgcccggcgtgcaggccgcctacgagagctgcgagcagaaggagctggagtgcgagggcggccagagagagagaccccagaaccagcagccccacagagcccagagaagcccccagcagcagcccagcagactgcacagaccccagaaccaggagccccagagccagcccaccgagagcctgtactacgactacaagcccccctactacgacgtgatgaccaccggcaccacccccgactaccaggaccccacccccggcgaggaggaggagatcctggagagcagcctgctgccccccctggaggaggagcagaccgacctgcaggtgccccccaccgccgacagattccaggccgaggagtacggcgagggcggcaccgacccccccgagggcccctacgactacacctacggctacggcgacgactacagagaggagaccgagctgggccccgccctgagcgccgagaccgcccacagcggcgccgccgcccacggccccagaggcctgaagggcgagaagggcgagcccgccgtgctggagcccggcatgctggtggagggcccccccggccccgagggccccgccggcctgatcggcccccccggcatccagggcaaccccggccccgtgggcgaccccggcgagagaggcccccccggcagagccggcctgcccggcagcgacggcgcccccggcccccccggcaccagcctgatgctgcccttcagattcggcagcggcggcggcgacaagggccccgtggtggccgcccaggaggcccaggcccaggccatcctgcagcaggccagactggccctgagaggcccccccggccccatgggctacaccggcagacccggccccctgggccagcccggcagccccggcctgaagggcgagagcggcgacctgggcccccagggccccagaggcccccagggcctgaccggcccccccggcaaggccggcagaagaggcagagccggcgccgacggcgccagaggcatgcccggcgaccccggcgtgaagggcgacagaggcttcgacggcctgcccggcctgcccggcgagaagggccacagaggcgacaccggcgcccagggcctgcccggcccccccggcgaggacggcgagagaggcgacgacggcgagatcggccccagaggcctgcccggcgagagcggccccagaggcctgctgggccccaagggcccccccggcatccccggcccccccggcgtgagaggcatggacggcccccagggccccaagggcagcctgggcccccagggcgagcccggcccccccggccagcagggcacccccggcacccagggcctgcccggcccccagggcgccatcggcccccacggcgagaagggcccccagggcaagcccggcctgcccggcatgcccggcagcgacggcccccccggccaccccggcaaggagggcccccccggcaccaagggcaaccagggccccagcggcccccagggccccctgggctaccccggccccagaggcgtgaagggcgtggacggcatcagaggcctgaagggccacaagggcgagaagggcgaggacggcttccccggcttcaagggcgacatcggcgtgaagggcgacagaggcgaggtgggcgtgcccggcagcagaggcgaggacggccccgagggccccaagggcagaaccggccccaccggcgaccccggcccccccggcctgatgggcgagaagggcaagctgggcgtgcccggcctgcccggctaccccggcagacagggccccaagggcagcctgggcttccccggcttccccggcgccagcggcgagaagggcgccagaggcctgagcggcaagagcggccccagaggcgagagaggccccaccggccccagaggccagagaggccccagaggcgccaccggcaagagcggcgccaagggcaccagcggcggcgacggcccccacggcccccccggcgagagaggcctgcccggcccccagggccccaacggcttccccggccccaagggcccccccggcccccccggcaaggacggcctgcccggccaccccggccagagaggcgaggtgggcttccagggcaagaccggcccccccggcccccccggcgtggtgggcccccagggcgccgccggcgagaccggccccatgggcgagagaggccaccccggcccccccggcccccccggcgagcagggcctgcccggcaccgccggcaaggagggcaccaagggcgaccccggcccccccggcgcccccggcaaggacggccccgccggcctgagaggcttccccggcgagagaggcctgcccggcaccgccggcggccccggcctgaagggcaacgagggccccagcggcccccccggccccgccggcagccccggcgagagaggcgccgccggcagcggcggccccatcggcccccccggcagacccggcccccagggcccccccggcgccgccggcgagaagggcgtgcccggcgagaagggccccatcggccccaccggcagagacggcgtgcagggccccgtgggcctgcccggccccgccggcccccccggcgtggccggcgaggacggcgacaagggcgaggtgggcgaccccggccagaagggcaccaagggcaacaagggcgagcacggcccccccggcccccccggccccatcggccccgtgggccagcccggcgccgccggcgccgacggcgagcccggcgccagaggcccccagggccacttcggcgccaagggcgacgagggcaccagaggcttcaacggcccccccggccccatcggcctgcagggcctgcccggccccagcggcgagaagggcgagaccggcgacgtgggccccatgggcccccccggcccccccggccccagaggccccgccggccccaacggcgccgacggcccccagggcccccccggcggcgtgggcaacctgggcccccccggcgagaagggcgagcccggcgagagcggcagccccggcatccagggcgagcccggcgtgaagggccccagaggcgagagaggcgagaagggcgagagcggccagcccggcgagcccggcccccccggccccaagggccccaccggcgacgacggccccaagggcaaccccggccccgtgggcttccccggcgaccccggcccccccggcgagggcggccccagaggccaggacggcgccaagggcgacagaggcgaggacggcgagcccggccagcccggcagccccggccccaccggcgagaacggcccccccggccccctgggcaagagaggccccgccggcagccccggcagcgagggcagacagggcggcaagggcgccaagggcgaccccggcgccatcggcgcccccggcaagaccggccccgtgggccccgccggccccgccggcaagcccggccccgacggcctgagaggcctgcccggcagcgtgggccagcagggcagacccggcgccaccggccaggccggcccccccggccccgtgggcccccccggcctgcccggcctgagaggcgacgccggcgccaagggcgagaagggccaccccggcctgatcggcctgatcggcccccccggcgagcagggcgagaagggcgacagaggcctgcccggcccccagggcagccccggccagaagggcgagatgggcatccccggcgccagcggccccatcggccccggcggcccccccggcctgcccggccccgccggccccaagggcgccaagggcgccaccggccccggcggccccaagggcgagaagggcgtgcagggcccccccggccaccccggcccccccggcgaggtgatccagcccctgcccatccagatgcccaagaagaccagaagaagcgtggacggcagcagactgatgcaggaggacgaggccatccccaccggcggcgcccccggcagccccggcggcctggaggagatcttcggcagcctggacagcctgagagaggagatcgagcagatgagaagacccaccggcacccaggacagccccgccagaacctgccaggacctgaagctgtgccaccccgagctgcccgacggcgagtactgggtggaccccaaccagggctgcgccagagacgccttcagagtgttctgcaacttcaccgccggcggcgagacctgcgtgacccccagagacgacgtgacccagttcagctacgtggacagcgagggcagccccgtgggcgtggtgcagctgaccttcctgagactgctgagcgtgagcgcccaccaggacgtgagctacccctgcagcggcgccgccagagacggccccctgagactgagaggcgccaacgaggacgagctgagccccgagaccagcccctacgtgaaggagttcagagacggctgccagacccagcagggcagaaccgtgctggaggtgagaacccccgtgctggagcagctgcccgtgctggacgccagcttcagcgacctgggcgccccccccagaagaggcggcgtgctgctgggccccgtgtgcttcatgggctag

SEQ ID NO: 232486 - DNA, 5133 bp, Artificial Sequence
  derived and/or modified sequence
atggagagatgcagcagatgccacagactgctgctgctgctgcccctggtgctgggcctgagcgccgcccccggctgggccggcgccccccccgtggacgtgctgagagccctgagattccccagcctgcccgacggcgtgagaagagccaagggcatctgccccgccgacgtggcctacagagtggccagacccgcccagctgagcgcccccaccagacagctgttccccggcggcttccccaaggacttcagcctgctgaccgtggtgagaaccagacccggcctgcaggcccccctgctgaccctgtacagcgcccagggcgtgagacagctgggcctggagctgggcagacccgtgagattcctgtacgaggaccagaccggcagaccccagccccccagccagcccgtgttcagaggcctgagcctggccgacggcaagtggcacagagtggccgtggccgtgaagggccagagcgtgaccctgatcgtggactgcaagaagagagtgaccagacccctgcccagaagcgccagacccgtgctggacacccacggcgtgatcatcttcggcgccagaatcctggacgaggaggtgttcgagggcgacgtgcaggagctggccatcgtgcccggcgtgcaggccgcctacgagagctgcgagcagaaggagctggagtgcgagggcggccagagagagagaccccagaaccagcagccccacagagcccagagaagcccccagcagcagcccagcagactgcacagaccccagaaccaggagccccagagccaggaccccacccccggcgaggaggaggagatcctggagagcagcctgctgccccccctggaggaggagcagaccgacctgcaggtgccccccaccgccgacagattccaggccgaggagtacggcgagggcggcaccgacccccccgagggcccctacgactacacctacggctacggcgacgactacagagaggagaccgagctgggccccgccctgagcgccgagaccgcccacagcggcgccgccgcccacggccccagaggcctgaagggcgagaagggcgagcccgccgtgctggagcccggcatgctggtggagggcccccccggccccgagggccccgccggcctgatcggcccccccggcatccagggcaaccccggccccgtgggcgaccccggcgagagaggcccccccggcagagccggcctgcccggcagcgacggcgcccccggcccccccggcaccagcctgatgctgcccttcagattcggcagcggcggcggcgacaagggccccgtggtggccgcccaggaggcccaggcccaggccatcctgcagcaggccagactggccctgagaggcccccccggccccatgggctacaccggcagacccggccccctgggccagcccggcagccccggcctgaagggcgagagcggcgacctgggcccccagggccccagaggcccccagggcctgaccggcccccccggcaaggccggcagaagaggcagagccggcgccgacggcgccagaggcatgcccggcgaccccggcgtgaagggcgacagaggcttcgacggcctgcccggcctgcccggcgagaagggccacagaggcgacaccggcgcccagggcctgcccggcccccccggcgaggacggcgagagaggcgacgacggcgagatcggccccagaggcctgcccggcgagagcggccccagaggcctgctgggccccaagggcccccccggcatccccggcccccccggcgtgagaggcatggacggcccccagggccccaagggcagcctgggcccccagggcgagcccggcccccccggccagcagggcacccccggcacccagggcctgcccggcccccagggcgccatcggcccccacggcgagaagggcccccagggcaagcccggcctgcccggcatgcccggcagcgacggcccccccggccaccccggcaaggagggcccccccggcaccaagggcaaccagggccccagcggcccccagggccccctgggctaccccggccccagaggcgtgaagggcgtggacggcatcagaggcctgaagggccacaagggcgagaagggcgaggacggcttccccggcttcaagggcgacatcggcgtgaagggcgacagaggcgaggtgggcgtgcccggcagcagaggcgaggacggccccgagggccccaagggcagaaccggccccaccggcgaccccggcccccccggcctgatgggcgagaagggcaagctgggcgtgcccggcctgcccggctaccccggcagacagggccccaagggcagcctgggcttccccggcttccccggcgccagcggcgagaagggcgccagaggcctgagcggcaagagcggccccagaggcgagagaggccccaccggccccagaggccagagaggccccagaggcgccaccggcaagagcggcgccaagggcaccagcggcggcgacggcccccacggcccccccggcgagagaggcctgcccggcccccagggccccaacggcttccccggccccaagggccccctgggcccccccggcaaggacggcctgcccggccaccccggccagagaggcgaggtgggcttccagggcaagaccggcccccccggcccccccggcgtggtgggcccccagggcgccgccggcgagaccggccccatgggcgagagaggccaccccggcccccccggcccccccggcgagcagggcctgcccggcaccgccggcaaggagggcaccaagggcgaccccggcccccccggcgcccccggcaaggacggccccgccggcctgagaggcttccccggcgagagaggcctgcccggcaccgccggcggccccggcctgaagggcaacgagggccccagcggcccccccggccccgccggcagccccggcgagagaggcgccgccggcagcggcggccccatcggcccccccggcagacccggcccccagggcccccccggcgccgccggcgagaagggcgtgcccggcgagaagggccccatcggccccaccggcagagacggcgtgcagggccccgtgggcctgcccggccccgccggcccccccggcgtggccggcgaggacggcgacaagggcgaggtgggcgaccccggccagaagggcaccaagggcaacaagggcgagcacggcccccccggcccccccggccccatcggccccgtgggccagcccggcgccgccggcgccgacggcgagcccggcgccagaggcccccagggccacttcggcgccaagggcgacgagggcaccagaggcttcaacggcccccccggccccatcggcctgcagggcctgcccggccccagcggcgagaagggcgagaccggcgacgtgggccccatgggcccccccggcccccccggccccagaggccccgccggccccaacggcgccgacggcccccagggcccccccggcggcgtgggcaacctgggcccccccggcgagaagggcgagcccggcgagagcggcagccccggcatccagggcgagcccggcgtgaagggccccagaggcgagagaggcgagaagggcgagagcggccagcccggcgagcccggcccccccggccccaagggccccaccggcgacgacggccccaagggcaaccccggccccgtgggcttccccggcgaccccggcccccccggcgagggcggccccagaggccaggacggcgccaagggcgacagaggcgaggacggcgagcccggccagcccggcagccccggccccaccggcgagaacggcccccccggccccctgggcaagagaggccccgccggcagccccggcagcgagggcagacagggcggcaagggcgccaagggcgaccccggcgccatcggcgcccccggcaagaccggccccgtgggccccgccggccccgccggcaagcccggccccgacggcctgagaggcctgcccggcagcgtgggccagcagggcagacccggcgccaccggccaggccggcccccccggccccgtgggcccccccggcctgcccggcctgagaggcgacgccggcgccaagggcgagaagggccaccccggcctgatcggcctgatcggcccccccggcgagcagggcgagaagggcgacagaggcctgcccggcccccagggcagccccggccagaagggcgagatgggcatccccggcgccagcggccccatcggccccggcggcccccccggcctgcccggccccgccggccccaagggcgccaagggcgccaccggccccggcggccccaagggcgagaagggcgtgcagggcccccccggccaccccggcccccccggcgaggtgatccagcccctgcccatccagatgcccaagaagaccagaagaagcgtggacggcagcagactgatgcaggaggacgaggccatccccaccggcggcgcccccggcagccccggcggcctggaggagatcttcggcagcctggacagcctgagagaggagatcgagcagatgagaagacccaccggcacccaggacagccccgccagaacctgccaggacctgaagctgtgccaccccgagctgcccgacggcgagtactgggtggaccccaaccagggctgcgccagagacgccttcagagtgttctgcaacttcaccgccggcggcgagacctgcgtgacccccagagacgacgtgacccagttcagctacgtggacagcgagggcagccccgtgggcgtggtgcagctgaccttcctgagactgctgagcgtgagcgcccaccaggacgtgagctacccctgcagcggcgccgccagagacggccccctgagactgagaggcgccaacgaggacgagctgagccccgagaccagcccctacgtgaaggagttcagagacggctgccagacccagcagggcagaaccgtgctggaggtgagaacccccgtgctggagcagctgcccgtgctggacgccagcttcagcgacctgggcgccccccccagaagaggcggcgtgctgctgggccccgtgtgcttcatgggctag

SEQ ID NO: 232487 - DNA, 5211 bp, Artificial Sequence
  derived and/or modified sequence
atggagagatgcagcagatgccacagactgctgctgctgctgcccctggtgctgggcctgagcgccgcccccggctgggccggcgccccccccgtggacgtgctgagagccctgagattccccagcctgcccgacggcgtgagaagagccaagggcatctgccccgccgacgtggcctacagagtggccagacccgcccagctgagcgcccccaccagacagctgttccccggcggcttccccaaggacttcagcctgctgaccgtggtgagaaccagacccggcctgcaggcccccctgctgaccctgtacagcgcccagggcgtgagacagctgggcctggagctgggcccccccgtgagattcctgtacgaggaccagaccggcagaccccagccccccagccagcccgtgttcagaggcctgagcctggccgacggcaagtggcacagagtggccgtggccgtgaagggccagagcgtgaccctgatcgtggactgcaagaagagagtgaccagacccctgcccagaagcgccagacccgtgctggacacccacggcgtgatcatcttcggcgccagaatcctggacgaggaggtgttcgagggcgacgtgcaggagctggccatcgtgcccggcgtgcaggccgcctacgagagctgcgagcagaaggagctggagtgcgagggcggccagagagagagaccccagaaccagcagccccacagagcccagagaagcccccagcagcagcccagcagactgcacagaccccagaaccaggagccccagagccagcccaccgagagcctgtactacgactacaagcccccctactacgacgtgatgaccaccggcaccacccccgactaccaggaccccacccccggcgaggaggaggagatcctggagagcagcctgctgccccccctggaggaggagcagaccgacctgcaggtgccccccaccgccgacagattccaggccgaggagtacggcgagggcggcaccgacccccccgagggcccctacgactacacctacggctacggcgacgactacagagaggagaccgagctgggccccgccctgagcgccgagaccgcccacagcggcgccgccgcccacggccccagaggcctgaagggcgagaagggcgagcccgccgtgctggagcccggcatgctggtggagggcccccccggccccgagggccccgccggcctgatcggcccccccggcatccagggcaaccccggccccgtgggcgaccccggcgagagaggcccccccggcagagccggcctgcccggcagcgacggcgcccccggcccccccggcaccagcctgatgctgcccttcagattcggcagcggcggcggcgacaagggccccgtggtggccgcccaggaggcccaggcccaggccatcctgcagcaggccagactggccctgagaggcccccccggccccatgggctacaccggcagacccggccccctgggccagcccggcagccccggcctgaagggcgagagcggcgacctgggcccccagggccccagaggcccccagggcctgaccggcccccccggcaaggccggcagaagaggcagagccggcgccgacggcgccagaggcatgcccggcgaccccggcgtgaagggcgacagaggcttcgacggcctgcccggcctgcccggcgagaagggccacagaggcgacaccggcgcccagggcctgcccggcccccccggcgaggacggcgagagaggcgacgacggcgagatcggccccagaggcctgcccggcgagagcggccccagaggcctgctgggccccaagggcccccccggcatccccggcccccccggcgtgagaggcatggacggcccccagggccccaagggcagcctgggcccccagggcgagcccggcccccccggccagcagggcacccccggcacccagggcctgcccggcccccagggcgccatcggcccccacggcgagaagggcccccagggcaagcccggcctgcccggcatgcccggcagcgacggcccccccggccaccccggcaaggagggcccccccggcaccaagggcaaccagggccccagcggcccccagggccccctgggctaccccggccccagaggcgtgaagggcgtggacggcatcagaggcctgaagggccacaagggcgagaagggcgaggacggcttccccggcttcaagggcgacatcggcgtgaagggcgacagaggcgaggtgggcgtgcccggcagcagaggcgaggacggccccgagggccccaagggcagaaccggccccaccggcgaccccggcccccccggcctgatgggcgagaagggcaagctgggcgtgcccggcctgcccggctaccccggcagacagggccccaagggcagcctgggcttccccggcttccccggcgccagcggcgagaagggcgccagaggcctgagcggcaagagcggccccagaggcgagagaggccccaccggccccagaggccagagaggccccagaggcgccaccggcaagagcggcgccaagggcaccagcggcggcgacggcccccacggcccccccggcgagagaggcctgcccggcccccagggccccaacggcttccccggccccaagggcccccccggcccccccggcaaggacggcctgcccggccaccccggccagagaggcgaggtgggcttccagggcaagaccggcccccccggcccccccggcgtggtgggcccccagggcgccgccggcgagaccggccccatgggcgagagaggccaccccggcccccccggcccccccggcgagcagggcctgcccggcaccgccggcaaggagggcaccaagggcgaccccggcccccccggcgcccccggcaaggacggccccgccggcctgagaggcttccccggcgagagaggcctgcccggcaccgccggcggccccggcctgaagggcaacgagggccccagcggcccccccggccccgccggcagccccggcgagagaggcgccgccggcagcggcggccccatcggcccccccggcagacccggcccccagggcccccccggcgccgccggcgagaagggcgtgcccggcgagaagggccccatcggccccaccggcagagacggcgtgcagggccccgtgggcctgcccggccccgccggcccccccggcgtggccggcgaggacggcgacaagggcgaggtgggcgaccccggccagaagggcaccaagggcaacaagggcgagcacggcccccccggcccccccggccccatcggccccgtgggccagcccggcgccgccggcgccgacggcgagcccggcgccagaggcccccagggccacttcggcgccaagggcgacgagggcaccagaggcttcaacggcccccccggccccatcggcctgcagggcctgcccggccccagcggcgagaagggcgagaccggcgacgtgggccccatgggcccccccggcccccccggccccagaggccccgccggccccaacggcgccgacggcccccagggcccccccggcggcgtgggcaacctgggcccccccggcgagaagggcgagcccggcgagagcggcagccccggcatccagggcgagcccggcgtgaagggccccagaggcgagagaggcgagaagggcgagagcggccagcccggcgagcccggcccccccggccccaagggccccaccggcgacgacggccccaagggcaaccccggccccgtgggcttccccggcgaccccggcccccccggcgagggcggccccagaggccaggacggcgccaagggcgacagaggcgaggacggcgagcccggccagcccggcagccccggccccaccggcgagaacggcccccccggccccctgggcaagagaggccccgccggcagccccggcagcgagggcagacagggcggcaagggcgccaagggcgaccccggcgccatcggcgcccccggcaagaccggccccgtgggccccgccggccccgccggcaagcccggccccgacggcctgagaggcctgcccggcagcgtgggccagcagggcagacccggcgccaccggccaggccggcccccccggccccgtgggcccccccggcctgcccggcctgagaggcgacgccggcgccaagggcgagaagggccaccccggcctgatcggcctgatcggcccccccggcgagcagggcgagaagggcgacagaggcctgcccggcccccagggcagccccggccagaagggcgagatgggcatccccggcgccagcggccccatcggccccggcggcccccccggcctgcccggccccgccggccccaagggcgccaagggcgccaccggccccggcggccccaagggcgagaagggcgtgcagggcccccccggccaccccggcccccccggcgaggtgatccagcccctgcccatccagatgcccaagaagaccagaagaagcgtggacggcagcagactgatgcaggaggacgaggccatccccaccggcggcgcccccggcagccccggcggcctggaggagatcttcggcagcctggacagcctgagagaggagatcgagcagatgagaagacccaccggcacccaggacagccccgccagaacctgccaggacctgaagctgtgccaccccgagctgcccgacggcgagtactgggtggaccccaaccagggctgcgccagagacgccttcagagtgttctgcaacttcaccgccggcggcgagacctgcgtgacccccagagacgacgtgacccagttcagctacgtggacagcgagggcagccccgtgggcgtggtgcagctgaccttcctgagactgctgagcgtgagcgcccaccaggacgtgagctacccctgcagcggcgccgccagagacggccccctgagactgagaggcgccaacgaggacgagctgagccccgagaccagcccctacgtgaaggagttcagagacggctgccagacccagcagggcagaaccgtgctggaggtgagaacccccgtgctggagcagctgcccgtgctggacgccagcttcagcgacctgggcgccccccccagaagaggcggcgtgctgctgggccccgtgtgcttcatgggctag

SEQ ID NO: 232488 - DNA, 5148 bp, Artificial Sequence
  derived and/or modified sequence
atggagagatgcagcagatgccacagactgctgctgctgctgcccctggtgctgggcctgagcgccgcccccggctgggccggcgccccccccgtggacgtgctgagagccctgagattccccagcctgcccgacggcgtgagaagagccaagggcatctgccccgccgacgtggcctacagagtggccagacccgcccagctgagcgcccccaccagacagctgttccccggcggcttccccaaggacttcagcctgctgaccgtggtgagaaccagacccggcctgcaggcccccctgctgaccctgtacagcgcccagggcgtgagacagctgggcctggagctgggcagacccgtgagattcctgtacgaggaccagaccggcagaccccagccccccagccagcccgtgttcagaggcctgagcctggccgacggcaagtggcacagagtggccgtggccgtgaagggccagagcgtgaccctgatcgtggactgcaagaagagagtgaccagacccctgcccagaagcgccagacccgtgctggacacccacggcgtgatcatcttcggcgccagaatcctggacgaggaggtgttcgagggcgacgtgcaggagctggccatcgtgcccggcgtgcaggccgcctacgagagctgcgagcagaaggagctggagtgcgagggcggccagagagagagaccccagaaccagcagccccacagagcccagagaagcccccagcagcagcccagcagactgcacagaccccagaaccaggagccccagagccagcccaccgagagcctgtactacgactacaagcccccctactacgacgtgatgaccaccggcaccacccccgactaccaggagcagaccgacctgcaggtgccccccaccgccgacagattccaggccgaggagtacggcgagggcggcaccgacccccccgagggcccctacgactacacctacggctacggcgacgactacagagaggagaccgagctgggccccgccctgagcgccgagaccgcccacagcggcgccgccgcccacggccccagaggcctgaagggcgagaagggcgagcccgccgtgctggagcccggcatgctggtggagggcccccccggccccgagggccccgccggcctgatcggcccccccggcatccagggcaaccccggccccgtgggcgaccccggcgagagaggcccccccggcagagccggcctgcccggcagcgacggcgcccccggcccccccggcaccagcctgatgctgcccttcagattcggcagcggcggcggcgacaagggccccgtggtggccgcccaggaggcccaggcccaggccatcctgcagcaggccagactggccctgagaggcccccccggccccatgggctacaccggcagacccggccccctgggccagcccggcagccccggcctgaagggcgagagcggcgacctgggcccccagggccccagaggcccccagggcctgaccggcccccccggcaaggccggcagaagaggcagagccggcgccgacggcgccagaggcatgcccggcgaccccggcgtgaagggcgacagaggcttcgacggcctgcccggcctgcccggcgagaagggccacagaggcgacaccggcgcccagggcctgcccggcccccccggcgaggacggcgagagaggcgacgacggcgagatcggccccagaggcctgcccggcgagagcggccccagaggcctgctgggccccaagggcccccccggcatccccggcccccccggcgtgagaggcatggacggcccccagggccccaagggcagcctgggcccccagggcgagcccggcccccccggccagcagggcacccccggcacccagggcctgcccggcccccagggcgccatcggcccccacggcgagaagggcccccagggcaagcccggcctgcccggcatgcccggcagcgacggcccccccggccaccccggcaaggagggcccccccggcaccaagggcaaccagggccccagcggcccccagggccccctgggctaccccggccccagaggcgtgaagggcgtggacggcatcagaggcctgaagggccacaagggcgagaagggcgaggacggcttccccggcttcaagggcgacatcggcgtgaagggcgacagaggcgaggtgggcgtgcccggcagcagaggcgaggacggccccgagggccccaagggcagaaccggccccaccggcgaccccggcccccccggcctgatgggcgagaagggcaagctgggcgtgcccggcctgcccggctaccccggcagacagggccccaagggcagcctgggcttccccggcttccccggcgccagcggcgagaagggcgccagaggcctgagcggcaagagcggccccagaggcgagagaggccccaccggccccagaggccagagaggccccagaggcgccaccggcaagagcggcgccaagggcaccagcggcggcgacggcccccacggcccccccggcgagagaggcctgcccggcccccagggccccaacggcttccccggccccaagggcccccccggcccccccggcaaggacggcctgcccggccaccccggccagagaggcgaggtgggcttccagggcaagaccggcccccccggcccccccggcgtggtgggcccccagggcgccgccggcgagaccggccccatgggcgagagaggccaccccggcccccccggcccccccggcgagcagggcctgcccggcaccgccggcaaggagggcaccaagggcgaccccggcccccccggcgcccccggcaaggacggccccgccggcctgagaggcttccccggcgagagaggcctgcccggcaccgccggcggccccggcctgaagggcaacgagggccccagcggcccccccggccccgccggcagccccggcgagagaggcgccgccggcagcggcggccccatcggcccccccggcagacccggcccccagggcccccccggcgccgccggcgagaagggcgtgcccggcgagaagggccccatcggccccaccggcagagacggcgtgcagggccccgtgggcctgcccggccccgccggcccccccggcgtggccggcgaggacggcgacaagggcgaggtgggcgaccccggccagaagggcaccaagggcaacaagggcgagcacggcccccccggcccccccggccccatcggccccgtgggccagcccggcgccgccggcgccgacggcgagcccggcgccagaggcccccagggccacttcggcgccaagggcgacgagggcaccagaggcttcaacggcccccccggccccatcggcctgcagggcctgcccggccccagcggcgagaagggcgagaccggcgacgtgggccccatgggcccccccggcccccccggccccagaggccccgccggccccaacggcgccgacggcccccagggcccccccggcggcgtgggcaacctgggcccccccggcgagaagggcgagcccggcgagagcggcagccccggcatccagggcgagcccggcgtgaagggccccagaggcgagagaggcgagaagggcgagagcggccagcccggcgagcccggcccccccggccccaagggccccaccggcgacgacggccccaagggcaaccccggccccgtgggcttccccggcgaccccggcccccccggcgagggcggccccagaggccaggacggcgccaagggcgacagaggcgaggacggcgagcccggccagcccggcagccccggccccaccggcgagaacggcccccccggccccctgggcaagagaggccccgccggcagccccggcagcgagggcagacagggcggcaagggcgccaagggcgaccccggcgccatcggcgcccccggcaagaccggccccgtgggccccgccggccccgccggcaagcccggccccgacggcctgagaggcctgcccggcagcgtgggccagcagggcagacccggcgccaccggccaggccggcccccccggccccgtgggcccccccggcctgcccggcctgagaggcgacgccggcgccaagggcgagaagggccaccccggcctgatcggcctgatcggcccccccggcgagcagggcgagaagggcgacagaggcctgcccggcccccagggcagccccggccagaagggcgagatgggcatccccggcgccagcggccccatcggccccggcggcccccccggcctgcccggccccgccggccccaagggcgccaagggcgccaccggccccggcggccccaagggcgagaagggcgtgcagggcccccccggccaccccggcccccccggcgaggtgatccagcccctgcccatccagatgcccaagaagaccagaagaagcgtggacggcagcagactgatgcaggaggacgaggccatccccaccggcggcgcccccggcagccccggcggcctggaggagatcttcggcagcctggacagcctgagagaggagatcgagcagatgagaagacccaccggcacccaggacagccccgccagaacctgccaggacctgaagctgtgccaccccgagctgcccgacggcgagtactgggtggaccccaaccagggctgcgccagagacgccttcagagtgttctgcaacttcaccgccggcggcgagacctgcgtgacccccagagacgacgtgacccagttcagctacgtggacagcgagggcagccccgtgggcgtggtgcagctgaccttcctgagactgctgagcgtgagcgcccaccaggacgtgagctacccctgcagcggcgccgccagagacggccccctgagactgagaggcgccaacgaggacgagctgagccccgagaccagcccctacgtgaaggagttcagagacggctgccagacccagcagggcagaaccgtgctggaggtgagaacccccgtgctggagcagctgcccgtgctggacgccagcttcagcgacctgggcgccccccccagaagaggcggcgtgctgctgggccccgtgtgcttcatgggctag

SEQ ID NO: 232489 - DNA, 5148 bp, Artificial Sequence
  derived and/or modified sequence
atggagagatgcagcagatgccacagactgctgctgctgctgcccctggtgctgggcctgagcgccgcccccggctgggccggcgccccccccgtggacgtgctgagagccctgagattccccagcctgcccgacggcgtgagaagagccaagggcatctgccccgccgacgtggcctacagagtggccagacccgcccagctgagcgcccccaccagacagctgttccccggcggcttccccaaggacttcagcctgctgaccgtggtgagaaccagacccggcctgcaggcccccctgctgaccctgtacagcgcccagggcgtgagacagctgggcctggagctgggcccccccgtgagattcctgtacgaggaccagaccggcagaccccagccccccagccagcccgtgttcagaggcctgagcctggccgacggcaagtggcacagagtggccgtggccgtgaagggccagagcgtgaccctgatcgtggactgcaagaagagagtgaccagacccctgcccagaagcgccagacccgtgctggacacccacggcgtgatcatcttcggcgccagaatcctggacgaggaggtgttcgagggcgacgtgcaggagctggccatcgtgcccggcgtgcaggccgcctacgagagctgcgagcagaaggagctggagtgcgagggcggccagagagagagaccccagaaccagcagccccacagagcccagagaagcccccagcagcagcccagcagactgcacagaccccagaaccaggagccccagagccagcccaccgagagcctgtactacgactacaagcccccctactacgacgtgatgaccaccggcaccacccccgactaccaggagcagaccgacctgcaggtgccccccaccgccgacagattccaggccgaggagtacggcgagggcggcaccgacccccccgagggcccctacgactacacctacggctacggcgacgactacagagaggagaccgagctgggccccgccctgagcgccgagaccgcccacagcggcgccgccgcccacggccccagaggcctgaagggcgagaagggcgagcccgccgtgctggagcccggcatgctggtggagggcccccccggccccgagggccccgccggcctgatcggcccccccggcatccagggcaaccccggccccgtgggcgaccccggcgagagaggcccccccggcagagccggcctgcccggcagcgacggcgcccccggcccccccggcaccagcctgatgctgcccttcagattcggcagcggcggcggcgacaagggccccgtggtggccgcccaggaggcccaggcccaggccatcctgcagcaggccagactggccctgagaggcccccccggccccatgggctacaccggcagacccggccccctgggccagcccggcagccccggcctgaagggcgagagcggcgacctgggcccccagggccccagaggcccccagggcctgaccggcccccccggcaaggccggcagaagaggcagagccggcgccgacggcgccagaggcatgcccggcgaccccggcgtgaagggcgacagaggcttcgacggcctgcccggcctgcccggcgagaagggccacagaggcgacaccggcgcccagggcctgcccggcccccccggcgaggacggcgagagaggcgacgacggcgagatcggccccagaggcctgcccggcgagagcggccccagaggcctgctgggccccaagggcccccccggcatccccggcccccccggcgtgagaggcatggacggcccccagggccccaagggcagcctgggcccccagggcgagcccggcccccccggccagcagggcacccccggcacccagggcctgcccggcccccagggcgccatcggcccccacggcgagaagggcccccagggcaagcccggcctgcccggcatgcccggcagcgacggcccccccggccaccccggcaaggagggcccccccggcaccaagggcaaccagggccccagcggcccccagggccccctgggctaccccggccccagaggcgtgaagggcgtggacggcatcagaggcctgaagggccacaagggcgagaagggcgaggacggcttccccggcttcaagggcgacatcggcgtgaagggcgacagaggcgaggtgggcgtgcccggcagcagaggcgaggacggccccgagggccccaagggcagaaccggccccaccggcgaccccggcccccccggcctgatgggcgagaagggcaagctgggcgtgcccggcctgcccggctaccccggcagacagggccccaagggcagcctgggcttccccggcttccccggcgccagcggcgagaagggcgccagaggcctgagcggcaagagcggccccagaggcgagagaggccccaccggccccagaggccagagaggccccagaggcgccaccggcaagagcggcgccaagggcaccagcggcggcgacggcccccacggcccccccggcgagagaggcctgcccggcccccagggccccaacggcttccccggccccaagggcccccccggcccccccggcaaggacggcctgcccggccaccccggccagagaggcgaggtgggcttccagggcaagaccggcccccccggcccccccggcgtggtgggcccccagggcgccgccggcgagaccggccccatgggcgagagaggccaccccggcccccccggcccccccggcgagcagggcctgcccggcaccgccggcaaggagggcaccaagggcgaccccggcccccccggcgcccccggcaaggacggccccgccggcctgagaggcttccccggcgagagaggcctgcccggcaccgccggcggccccggcctgaagggcaacgagggccccagcggcccccccggccccgccggcagccccggcgagagaggcgccgccggcagcggcggccccatcggcccccccggcagacccggcccccagggcccccccggcgccgccggcgagaagggcgtgcccggcgagaagggccccatcggccccaccggcagagacggcgtgcagggccccgtgggcctgcccggccccgccggcccccccggcgtggccggcgaggacggcgacaagggcgaggtgggcgaccccggccagaagggcaccaagggcaacaagggcgagcacggcccccccggcccccccggccccatcggccccgtgggccagcccggcgccgccggcgccgacggcgagcccggcgccagaggcccccagggccacttcggcgccaagggcgacgagggcaccagaggcttcaacggcccccccggccccatcggcctgcagggcctgcccggccccagcggcgagaagggcgagaccggcgacgtgggccccatgggcccccccggcccccccggccccagaggccccgccggccccaacggcgccgacggcccccagggcccccccggcggcgtgggcaacctgggcccccccggcgagaagggcgagcccggcgagagcggcagccccggcatccagggcgagcccggcgtgaagggccccagaggcgagagaggcgagaagggcgagagcggccagcccggcgagcccggcccccccggccccaagggccccaccggcgacgacggccccaagggcaaccccggccccgtgggcttccccggcgaccccggcccccccggcgagggcggccccagaggccaggacggcgccaagggcgacagaggcgaggacggcgagcccggccagcccggcagccccggccccaccggcgagaacggcccccccggccccctgggcaagagaggccccgccggcagccccggcagcgagggcagacagggcggcaagggcgccaagggcgaccccggcgccatcggcgcccccggcaagaccggccccgtgggccccgccggccccgccggcaagcccggccccgacggcctgagaggcctgcccggcagcgtgggccagcagggcagacccggcgccaccggccaggccggcccccccggccccgtgggcccccccggcctgcccggcctgagaggcgacgccggcgccaagggcgagaagggccaccccggcctgatcggcctgatcggcccccccggcgagcagggcgagaagggcgacagaggcctgcccggcccccagggcagccccggccagaagggcgagatgggcatccccggcgccagcggccccatcggccccggcggcccccccggcctgcccggccccgccggccccaagggcgccaagggcgccaccggccccggcggccccaagggcgagaagggcgtgcagggcccccccggccaccccggcccccccggcgaggtgatccagcccctgcccatccagatgcccaagaagaccagaagaagcgtggacggcagcagactgatgcaggaggacgaggccatccccaccggcggcgcccccggcagccccggcggcctggaggagatcttcggcagcctggacagcctgagagaggagatcgagcagatgagaagacccaccggcacccaggacagccccgccagaacctgccaggacctgaagctgtgccaccccgagctgcccgacggcgagtactgggtggaccccaaccagggctgcgccagagacgccttcagagtgttctgcaacttcaccgccggcggcgagacctgcgtgacccccagagacgacgtgacccagttcagctacgtggacagcgagggcagccccgtgggcgtggtgcagctgaccttcctgagactgctgagcgtgagcgcccaccaggacgtgagctacccctgcagcggcgccgccagagacggccccctgagactgagaggcgccaacgaggacgagctgagccccgagaccagcccctacgtgaaggagttcagagacggctgccagacccagcagggcagaaccgtgctggaggtgagaacccccgtgctggagcagctgcccgtgctggacgccagcttcagcgacctgggcgccccccccagaagaggcggcgtgctgctgggccccgtgtgcttcatgggctag

SEQ ID NO: 232490 - DNA, 5211 bp, Artificial Sequence
  derived and/or modified sequence
atggaaaggtgtagccgctgtcacaggttactgctattgctgcctctcgtcctcgggctgagcgcagcccctggctgggcaggggccccccccgtggacgtcttgagagcccttcgattcccatctctgcctgacggagtgagacgggctaaaggcatctgtcctgctgacgtggcgtaccgagtcgccagacccgcgcaattatccgcccccacacgacagctttttcccggtgggttcccgaaggacttctctctgctaacggtggtgaggacaagaccagggctgcaagccccgctcctcacactatatagtgcacagggcgtgcgtcagctgggtctggaactgggcaggccagttagatttctctacgaagaccagaccggaaggccacagccgccatctcagccagttttccgtgggctttctctcgccgatgggaaatggcatagggtggccgtggctgtgaaaggacagtcagtaacgctcattgtcgattgcaaaaaacgtgtcacacgccccctgccccggtccgcccgtcccgttctagacactcatggagtgatcattttcggcgcgaggatactcgatgaagaagtctttgaaggggatgttcaggagctcgccattgtccccggcgtgcaagcggcctatgaaagctgtgagcagaaggagttggagtgcgagggggggcagagagagagaccgcagaaccagcagccgcacagggcccagcggtccccacagcagcagccttccaggttacaccgcccacagaatcaggagccccaaagccagcctacagaatctctgtattacgactacgagccaccatattatgacgttatgaccaccggcaccacccctgattatcaggaccccacccccggagaagaggaggagatcctggagtcatctttgctcccgcctctggaagaagagcagaccgatctgcaggtgccgcctaccgcagatagattccaagcggaagagtatggcgaggggggcaccgacccaccagaggggccgtacgattatacatacgggtatggcgacgattatagagaggagaccgagctgggaccagccctgagtgccgaaaccgcacacagtggcgccgccgcccacgggccccgaggcctgaagggggagaaaggagagccggctgtgttagaacccggaatgctggttgaaggccctcccggccccgaaggccctgctggtctgatcgggcctcctggaattcaaggcaatccgggcccagttggtgaccccggtgagagggggcccccaggcagggccggactccccggcagcgacggcgctcctggaccaccgggcactagcctgatgctgccctttagattcggttccgggggaggcgataaaggccctgtggtggcggctcaagaggcacaagctcaggcaatcctacagcaagccagactcgctttgcggggccctcctgggccaatggggtacaccggcagacctggccccctagggcaaccaggctcgcccggactgaaaggcgaaagcggcgacctcggaccgcagggcccgaggggtccccagggcctgacggggcctcccggtaaggccggccgccggggccgggccggagccgacggcgcacggggcatgccaggggatccgggcgtgaaaggggaccggggattcgatggcctgcctgggcttcctggcgaaaagggacatcgaggcgatacgggcgctcagggcctgccagggcctcccggggaagacggcgagcggggcgatgacggcgagattgggcccagaggacttcctggggaatccggcccccggggccttcttggaccaaaaggtcctcccgggatccccggccccccaggtgtgcggggcatggacggccctcagggacctaaaggaagcttggggccccagggcgagccaggacctcctggacagcagggaacccccggcacccaagggctgcccggccctcaaggcgcaataggtcctcacggggagaaaggaccacaagggaagcctgggctgccggggatgcctggttccgacgggcccccgggtcatcccgggaaggaaggaccccccgggaccaaaggcaatcagggaccatctgggcctcagggacctctggggtatccaggacccagaggtgtaaagggtgtggatggcattaggggcctcaaaggtcacaaaggagagaaaggagaggacggattccctggatttaagggagacatcggtgtaaaaggagataggggagaggtcggggtgcccggatctcggggcgaggatggccctgagggacctaagggccgtaccggcccaacaggcgatcctggcccccctggccttatgggggagaaaggaaaattaggcgttcctggactgcctggatacccggggcggcaagggccgaaggggtccctcggatttcccggctttccaggggcttccggcgagaaaggcgcccgcggcctctccgggaagtccggtccgcgaggcgagagagggccgacgggtccaaggggccagcgagggccaagaggtgcaacagggaagtccggcgctaaaggcacgagcggaggggacggtccccatgggccccctggagaacgcggattacccggacctcaagggcccaacggattccccggtccaaagggaccaccaggcccgcctggaaaagacgggttacccgggcacccaggacagagaggggaagtcgggtttcaggggaagaccggaccaccaggccccccaggagttgtcggaccccagggcgcagcgggtgagactggtcctatgggagagaggggacacccaggcccacccggaccaccaggagaacaggggctgccgggaacagcgggcaaggagggtacaaaaggagaccctggccctcctggcgctcccggcaaggacggacccgccgggctgagggggttccctggagaacggggtctacccggcacagcaggtggacccggattgaagggaaatgaaggtccttccggtcccccgggacccgccggctcgcctggagagcgcggagcagctggctcgggcggaccaatcgggcccccaggcaggccgggccctcagggacctccaggcgcagcgggagaaaagggcgtgccaggagaaaaggggccaattggccccacgggccgcgacggagtacagggccctgtgggtttgcctggccccgccgggcctcctggcgtggctggcgaagatggtgacaagggagaagtcggcgacccagggcaaaaaggcacaaaggggaacaagggtgagcatggacctccggggcctcctggccccatcggaccagttggacagcccggggccgcaggggctgacggagagcccggagcccgtgggccacagggacattttggagcaaaaggcgacgagggaacaaggggcttcaatggaccccctggccccattggcttgcaaggccttccagggccatcaggcgagaagggcgagactggtgatgtgggacctatgggaccgcccggccccccagggccccgagggcctgctggccccaatggggcagacggcccacaagggcccccaggcggcgtgggaaatctgggccctcccggggaaaaaggcgaacccggtgagagtggttcgccaggaatccagggcgagcccggggtgaagggccccagaggagagcgtggagagaaaggggaaagtgggcagcctggcgagccagggcctcccggccctaaagggcctacgggcgatgatgggcccaagggaaatcccgggcctgtgggctttcccggggatcctggaccccccggggagggcgggccacggggacaggacggggcaaaaggggaccgcggtgaagacggagagcctggccagccgggctctcctgggccaaccggcgagaatggcccacccgggcccctgggtaagcgcggtcctgccggcagtccagggtccgagggccgccaaggcggcaaaggagcgaaaggcgacccaggtgccatcggcgcacccggaaaaaccggccctgtcggccccgccggcccagccggcaaaccaggcccagacgggctgcggggactgcctggaagcgtcggccagcaaggtagaccaggtgctactgggcaagccggacctcccggaccagtgggaccacccggactgcctggcctccgcggtgacgcgggagctaagggggagaaagggcatcctggcttgatcggcctcattggaccgcctggggagcaaggcgagaagggagataggggtctgcctggtccgcagggatcaccagggcaaaaaggagaaatggggatcccgggagcaagcggtcctataggaccgggggggcctccaggtctgccaggcccggccggcccaaaaggcgcaaagggcgcaactggtcctggaggacctaagggcgagaaaggagtgcagggtccgcctgggcatcccggacccccaggagaggttatccagcccctaccaattcagatgcctaaaaagactagaaggagcgttgacggatctaggctaatgcaagaagacgaggctatccctacaggcggggccccgggaagtcccggaggcctggaggaaatatttggatcccttgatagcctgcgcgaagagattgaacagatgcgtcggcctaccggcactcaggatagcccggcccgcacttgccaagatctcaagctgtgccatccagagctgccagatggggaatactgggtggacccgaaccagggttgtgcaagggacgcatttagggtcttctgcaactttacggccgggggcgaaacatgtgttaccccacgggatgatgtcacgcaatttagttacgtggactcagagggatctccagtgggagtggtccagttaaccttcctgcggctgttatccgtgtccgcccaccaggacgtctcttacccctgctcgggcgctgcgcgggatggccctctccggttgagaggagcaaacgaagatgaactcagtccagaaaccagtccctatgtgaaagagtttcgggacggttgtcagactcaacaggggcgaactgtactggaggtccgcacgcccgtgttggaacagctgccagttctagatgcctccttctccgacctgggcgctcccccccggagaggtggggtgctgctcggccctgtctgtttcatggggtag

SEQ ID NO: 232491 - DNA, 5148 bp, Artificial Sequence
  derived and/or modified sequence
atggaacgctgcagtaggtgccatcggctgctcttactgttgcctctcgtgttaggccttagtgctgcgcccgggtgggcaggggcccctccagtagacgtcctgcgagcccttcgattccctagcctgcccgacggagtgagacgggcgaaaggaatatgccctgccgatgtcgcttatcgggtagcccgcccagctcaactgagcgccccaacaagacagctgttccctggtggctttccaaaggacttttcgttgcttaccgtagtaaggacgaggccaggcctgcaagccccccttttgactctatactcagcccagggtgtgagacagttgggtctggaattgggacgacccgtcagattcctgtacgaagaccagacaggcagaccacagcctccttcacaaccagtctttcgcggcctgtcacttgctgatggaaagtggcaccgtgtggcagtagccgtgaaaggtcaaagtgtgacccttatagtggactgcaagaaacgcgtcacaaggccattacccagatctgcccgccctgtgctagacactcacggcgttatcatctttggggcccgtatcttggacgaggaggtgttcgagggcgacgtccaggagctagccatagttccaggtgttcaggccgcctacgaatcgtgcgaacagaaagagttagagtgcgaggggggacagagggaacgcccacagaaccaacagccgcaccgggcccagaggtccccccagcagcagccttcaaggttgcaccggcctcagaaccaggagccccaaagccaaccgaccgaaagtctgtattacgattatgaaccaccctattatgacgtgatgacaactggaactacccccgactaccaggaacaaacggatctgcaggtgcctcccacagctgacagattccaggcagaagaatacggagagggggggactgacccccccgaaggaccatacgattacacctacgggtatggggatgattaccgggaggaaacggaactcgggccggccctttccgccgagactgcacatagcggcgcagccgcccatggccccagaggcctgaagggcgagaaaggggagcctgccgtcctggaacccggcatgttagtcgagggtccacctggacccgagggtcctgcagggttgattggtccgcccgggatacaaggaaatcctggacctgtaggagaccctggagaaaggggccctccaggtcgagcagggctcccgggttctgatggggcccccggtcccccaggcaccagcctcatgctgcctttccgattcggctcaggtgggggcgacaagggtcctgtagttgctgctcaagaagctcaggcacaggcaatcttgcaacaggccagacttgccctgaggggaccgccaggccctatgggttacacaggccggcctggtccactcggtcagcccggtagcccagggctgaagggggaaagcggagacctgggaccccagggccccagggggccacaggggctgactggtcccccagggaaggccggccgtagagggcgggccggggccgacggggcacgtgggatgcctggggaccctggcgtaaagggcgacaggggttttgacgggttgcccggtctgccaggagagaaaggacaccggggcgatactggagcgcaggggttgcctgggcctcctggagaggacggcgaaaggggcgatgatggtgaaatcggtcctcggggactgcccggagagtcggggcccaggggactgctgggacctaagggtccccctggaatccctggaccaccaggcgtacggggaatggacggacctcaggggcccaaaggctccctgggcccgcagggcgagccaggccccccaggccagcaggggacacctggtactcagggattgccaggtcctcagggcgcgatcggaccccacggtgagaaggggccccagggcaaacctggactgcctgggatgcccgggtctgacggcccacctggacatcccggaaaggaagggccgcctggcacgaagggcaatcaggggccatctggccctcagggtccacttggatacccaggacctcgcggtgttaaaggagtggacgggattcggggccttaaaggccacaagggggaaaaaggcgaggacggtttccctgggtttaaaggagacattggtgtgaagggagacagaggagaagtaggtgtgcccgggagtagaggggaggacgggccggaaggccctaagggccgcaccggaccgacgggcgatccagggcctcctggccttatgggagagaaaggcaaactgggcgttccaggattgccgggatacccagggcgccaaggaccaaagggatccctgggcttccccggttttccgggggccagcggtgagaagggcgctagaggcctgtccggtaagtcgggacccaggggggagcgtggccccacaggtccgagaggccagcgaggccctcggggagcaacaggaaagtctggtgctaaaggtacgagcggtggggatggtcctcacgggccaccaggggaaagaggcctcccaggcccccaggggcccaacggttttccggggcctaaagggcctcccggcccacccggaaaggatgggcttcctggtcacccggggcagcgcggtgaggtcggctttcagggcaagaccggcccaccaggccctccaggggtcgtgggcccacagggggccgcaggcgagacaggaccgatgggggagcggggccatccagggccgccaggccctccgggtgaacaggggttgcccggcacggccggtaaagagggaactaagggggacccaggtcctcccggtgctccgggcaaggacggtcccgccggactccgcgggtttccaggggaacgtggcctcccagggaccgccggcggccccggactcaaggggaatgaaggaccatccggcccgcctggccccgcagggagccccggagagcgaggtgcagcaggcagcgggggccccattggtcctccagggcgacctggcccccagggcccgcccggggctgcaggagagaagggtgtccccggtgaaaagggaccaattgggcccactggacgggatggggtccaaggccctgtgggcttgcccggccccgccggacctcccggtgtcgcgggtgaggacggtgacaagggcgaggttggggaccccggccagaaaggaacaaaagggaacaaaggagaacatgggcctcctggacctcctggccccataggccccgtgggacagcccggagctgccggagctgacggcgaacccggggctagaggaccccaaggccactttggtgctaagggtgacgagggaaccagaggatttaatggtccacccggtccaatcggcctgcagggactgccaggaccatcaggcgaaaagggagagaccggagacgtcggccccatggggcctccggggccccccggcccgagaggaccggctggccctaatggggctgacgggccccagggcccccccggcggagtggggaatcttggcccccctggcgaaaagggagagccaggcgagtcaggatcacctgggattcagggcgagcccggcgtgaaaggaccacgcggtgaacgaggggagaaaggagaatcaggccagcctggagaaccaggccctccagggcccaagggaccaactggggatgacgggcccaaaggcaaccccggccctgtgggctttcctggggaccctggcccacctggggagggtggcccaagggggcaggacggcgctaaaggagacagaggcgaggatggcgagccagggcagcctggctccccaggaccgaccggagagaatggcccacccgggcccttaggtaaacgcggccctgccgggagccctggaagtgaaggtcgtcagggaggaaagggagctaaaggagaccccggagctataggggcccctggcaaaactgggcccgtgggacctgcagggccagccggaaagccaggacccgatggccttaggggcctgcctggctccgttgggcagcagggaaggcctggagctaccggccaggccggcccgccgggtcccgtgggcccaccgggactcccaggcctgaggggggatgctggggcaaaaggagaaaaaggccaccccggtctgatcgggctaattggaccccccggtgagcagggagaaaaaggagacagaggtctgcctggtccacagggcagcccaggccagaagggggagatgggaatccctggtgcctcaggacccattggtcctggcggccccccagggcttcccgggcccgctggtcccaaaggagcaaaaggggccacaggcccaggcgggcccaagggcgagaagggtgttcagggaccaccaggtcaccccggccccccaggcgaggtaattcagcctttgcctatccagatgcctaaaaaaaccagacggagcgtcgacggctccaggttgatgcaggaggatgaggcaatcccgaccggcggagcaccgggcagtccgggggggctggaagaaatcttcggttccctcgactccctgcgggaagagatcgagcagatgcggcggccgacaggcacacaggactcaccagcccgaacctgccaagacctgaagttgtgtcatcccgaattgcctgatggcgagtactgggtggatcccaaccagggctgtgcccgcgatgcttttcgagtgttctgtaacttcacagcaggtggagagacttgtgtgacaccgcgagatgatgtcactcagttctcctacgtggactcagaggggtctccagtgggcgtggttcagctcacattcctgaggctgctgagtgtgtctgcacatcaggacgtgtcctacccatgctccggagccgcccgggatggacctctgagactcagaggggcaaacgaggatgaactgtccccagaaacttcgccctacgtaaaagaattccgcgacggatgtcagacgcagcagggacgaaccgtgctcgaggtaagaacacccgtgcttgagcaactacctgttctggacgcatccttctctgatcttggcgctccacctcgccgaggtggcgtgcttctcgggcctgtctgtttcatgggctag

SEQ ID NO: 232492 - DNA, 5070 bp, Artificial Sequence
  derived and/or modified sequence
atggagcggtgcagccgctgccatcggctactcctcctgctccctctcgtgctgggactatccgccgcaccaggatgggcaggcgccccgcccgtggacgtgctcagggcgctcaggtttcctagtctgccagacggagtgcggagagctaagggcatttgtccggccgatgtggcataccgggtcgcacgacccgcacaactcagcgctcccacgaggcaacttttcccagggggctttcctaaggacttctccctgctcacagttgtgagaactaggcctggcctgcaggcgcccctgctaacactttactcagcccagggcgtcaggcaacttggactagagctgggcaggcctgtccggttcctgtacgaggaccagaccggaaggcctcagccaccgagtcagcccgtatttagaggtctgagcctcgcagacggtaagtggcacagggttgctgttgcagttaaaggtcagagcgttacattgatcgtggactgcaaaaagagggtgacacgccctctgcctcgaagcgcccggccagtgctggacacacacggagtgataatcttcggagcacgtattctcgatgaggaagtgtttgaaggggacgtgcaagagcttgccatcgtgccgggggtccaagccgcctatgagagttgcgagcagaaagagctggaatgtgaagggggccagcgggaaagaccccagaatcagcagcctcaccgggcacagcgaagtccacagcagcaacccagtcgtctgcataggccacagaaccaggagcctcagtctcaggaacagactgacctgcaggtcccccccactgcggaccggttccaagccgaagaatacggggaaggcggtacagatccgccggagggaccatatgattacacatatggctatggggatgattacagagaggagactgaattagggcctgcactaagcgctgagactgctcattctggcgctgctgctcatggcccccggggccttaaaggagagaaaggggaaccagccgttcttgaacccggcatgctcgtggaggggccccccggccctgaaggccctgccggcttgatcggcccgcccgggatccaagggaatccagggccagtgggggatccgggcgaacgcggcccacccggcagggctggcctcccgggaagtgacggcgcaccggggcctcccggcacctccctgatgctgccattcagattcggctctggaggaggcgacaagggcccggttgtggccgcacaagaagcgcaagcgcaggccatacttcagcaggctcgactagcactccgtgggccccctgggcccatgggatacactggacgcccaggacctctaggtcagcccgggtcccctggactgaagggggagagtggagacctgggaccgcaggggcctcgtggccctcaaggcctaacagggccccctgggaaagctggccgcagggggcgcgctggtgccgatggggcccgtggcatgccaggggacccgggcgtaaaaggcgaccgtggcttcgatggcctgcccgggcttcctggggagaagggacacagaggagataccggcgcccagggtctccccggtccgccaggagaggacggagagcgcggagatgacggagagattggccctcggggcctcccaggtgagagtgggcctcgcggactgctaggccctaaaggtcctccaggcattcctgggccaccgggcgtgcgtggtatggatggcccgcaaggtcctaaaggaagtctggggcctcagggggagccagggcccccgggtcaacaggggacaccaggtacccagggacttccaggtccccagggcgccattggaccgcatggtgaaaaagggcctcaggggaagccaggacttcctggtatgcccggttccgatgggccaccaggtcatccaggcaaggagggacctccaggaacaaaaggcaatcaaggaccaagcgggcctcagggtccccttggctacccggggccaagaggggttaaaggggtggatggtatccggggactcaaggggcacaagggtgagaaaggggaagacggattcccaggcttcaaaggcgatataggggtgaagggagaccgtggcgaggtgggagtgccaggcagtcggggcgaggatggaccggaaggtcctaaagggcggacaggtcctaccggagacccgggccctcccggtctgatgggtgaaaagggaaaactgggcgtccccggcttaccaggctatccggggcgacagggcccgaagggatctctgggattcccaggcttccccggtgcctcaggggagaaaggggccaggggccttagcgggaagtctgggccaagaggggaacggggcccgaccggacctagggggcagcggggccccaggggagccaccggtaagtccggcgcaaaaggtaccagtgggggtgatgggcctcacggaccccccggtgaaagaggcctcccaggcccccagggccccaatgggtttcctggccctaaaggccctcccgggcccccggggaaagacggtctgcctgggcaccctggacagagaggggaagtcggttttcaaggcaagactggccctcctggaccacccggggtagtcggcccacagggggctgcgggggagaccggacctatgggggagcggggacaccccgggcctcctgggcctccaggcgaacagggtctgcccggcacggccgggaaagaagggactaaaggcgatcctggaccccctggggctccaggcaaggatggccctgccggcctcagagggttccctggtgagcggggcttgcccgggacggctggagggcccggattaaagggcaatgagggaccatcagggccaccagggcctgcaggtagtcccggtgaaaggggggcagctggctccgggggccccattgggcctccaggcaggcctggcccacaggggcctcccggggcagctggggagaaaggcgtgccaggcgagaagggccctatcggccctacagggcgcgatggagtacaaggcccagtcggcctgcccggtcctgcaggcccacccggagtggccggtgaagatggggacaagggagaggtcggggatcctggccagaaggggacgaaggggaataaaggtgaacatgggcctccaggaccgccagggcctattggcccggttggccagcccggagctgccggtgccgacggagagcccggggctaggggcccccaggggcatttcggagccaagggcgacgaaggaaccaggggattcaacggcccaccgggccctattgggctccaggggctgcccggtccatctggcgagaaaggggaaaccggggacgtggggcctatgggccctcctggtccccccggacctaggggcccagctggacctaatggggctgacggaccacaggggccgcctggtggggtcgggaatttaggccccccaggagagaagggtgagcccggggagagtgggagccccggaatacagggggagccaggtgtgaagggtccaaggggcgagcggggcgaaaaaggagagtccggtcagccgggggagccggggccacccgggccaaaaggtcccacaggggatgatgggccaaagggcaatcccgggcctgtaggatttcctggagacccaggaccccccggagagggcggcccaaggggacaggacggtgccaagggtgacagaggggaggacggcgagccaggccagcccggctccccaggacctacaggcgagaacggacctccaggtcccctcggaaagcgtgggcccgccgggagcccagggagtgaaggcaggcagggagggaagggggccaagggggatccgggcgccattggagcaccagggaagaccggtccagttggtcctgcagggccagccggtaaaccgggtcctgacggtctgaggggactgccaggctccgtcggacagcaaggacgccccggagccacaggacaggccggccctccaggacctgtgggacccccaggattacctgggcttcgcggtgatgcaggcgcaaagggagagaaggggcacccagggctgattgggttaatcggacctccaggtgagcagggggaaaaaggggataggggcctgccgggaccgcaaggcagccccgggcaaaagggtgagatgggcatccccggcgcaagtggccctattggaccaggggggccacccgggctgcctggacctgccggccctaaaggcgccaaaggcgctactggccccggaggccccaaaggggagaagggtgttcagggacccccgggtcacccaggacccccaggcgaggtcatacaaccgctgccaatccagatgccgaagaagacacgcagatcagttgacggtagccgcctgatgcaggaggacgaagctatccccacaggtggagcccctggttctcccggtggtctggaggaaatcttcggatcactggatagcctccgtgaagagattgagcagatgcggcgccctaccggaacccaagattctcccgcccggacatgtcaggacctcaaactgtgtcatccggaattgcccgatggagaatattgggtggacccaaaccagggatgcgccagagatgcatttagggttttttgtaactttactgccggcggagagacatgtgtcacaccgagggacgatgtgacgcaattttcctacgtcgactcagaaggcagcccggtgggagtcgtccagctgacctttctccggctccttagcgtaagtgctcaccaagacgtctcttatccatgcagcggagcagcccgggacgggcccctgcggctgaggggcgctaatgaagacgagctctctcccgagacatcaccttacgtcaaggagttccgagatggatgccaaacccagcaaggacgcactgtgctggaggtgcggacacctgtgctggagcagctgcccgtgctcgacgcttccttttcagatttgggggccccaccaagaagaggcggcgttctgctaggacctgtttgttttatggggtag

SEQ ID NO: 232493 - DNA, 5133 bp, Artificial Sequence
  derived and/or modified sequence
atggaaaggtgttctcgatgccatcggctgctgcttctgctgccactggtgctcggtctaagcgccgctcctggctgggcaggggccccccccgtggatgtgctcagggctctcaggttcccaagtttgcccgatggggtccgaagagcgaaaggtatctgtcctgccgacgtggcctatagggtcgcacggcccgcccagctcagcgcgcctactagacaactttttcccgggggatttcctaaggattttagccttctgaccgtagttagaacaagaccaggtctgcaggcaccgctcctgactctgtacagcgctcagggagtcaggcagctaggactggagctgggaagaccagtccgctttctgtacgaagatcagaccggcagaccccaaccgccttctcagcccgttttccgcggtctatccctcgcagatggtaagtggcatagggttgctgtcgccgtgaagggccagtcagtgaccctgatagtcgattgtaaaaagcgggttacgaggcctttacctagaagtgcccggccagtcctggacacccatggcgttattatcttcggcgcacggatcttagacgaggaagttttcgagggcgatgtccaggagctggccatcgtacccggcgtacaagctgcttatgaatcctgtgaacagaaggagcttgagtgcgaaggggggcagcgcgagcggccccagaatcagcagccgcacagagctcagcgttcccctcaacaacagccgtcccgcctgcatcgtccacagaatcaggaaccccagtctcaagatccgacccctggagaagaagaggaaatcctggaaagctctttgcttccgccgctagaggaagaacagacagaccttcaggtcccacctactgcagaccgcttccaagccgaagagtatggcgaaggagggacagaccctccggaggggccctacgattatacatacggctacggcgacgactatagggaggagaccgagctgggtccagctttgtccgctgaaacagctcactccggggccgccgctcacggcccccgcggactgaagggcgaaaagggggagccagcggtcctggagcccggaatgctcgtcgagggtccaccaggacctgaaggtccagctgggctgattgggcccccaggcatccagggcaacccgggcccagtcggcgacccaggagagcggggtcctcccgggagggcgggcttacccggtagcgacggagcgccgggcccccccgggacttccctgatgctgccgtttaggttcggttctggtgggggggataaaggcccagtcgtggccgcccaggaggcgcaggcgcaggccatccttcagcaagcacgcctagcactgcgtgggccccccggacccatgggatatacgggcaggccgggtccgttaggccagccagggagcccagggctgaaaggggaatccggcgacctgggcccacagggcccaaggggccctcaagggttgaccgggcctccagggaaggcagggaggagaggccgtgccggggcagatggagcccgtggaatgccaggagatcccggcgttaaaggtgaccgcggtttcgacggtttgccaggcctgcctggagagaaagggcaccggggagataccggggcccaaggtttgcctgggccaccaggagaggacggcgagcgcggagacgacggcgaaatcggaccaagaggattgcccggagagtctggacctagaggcttattaggcccgaaaggtccaccaggcatccctggaccccccggagtccgcggtatggacggcccccagggacctaagggaagtctgggacctcagggcgagcccgggccacccgggcagcaggggactccaggcacacagggcttacctgggcctcagggggctatcggtccacacggcgaaaagggtcctcaggggaagcccggactacctggcatgccaggatccgatggacccccaggccacccggggaaagaggggccccctgggacaaaaggcaaccagggcccctccggtccacaaggtcccttaggatatccggggcctcgcggcgtcaagggtgtggatggcatccgcggcctgaagggacacaagggggaaaagggggaggatggctttcccggcttcaagggtgatataggagtgaagggggaccggggcgaagtcggagtgcctgggagccgtggcgaagatggtcctgagggccccaaaggacgaacgggcccaactggggatcccggccctcccgggttgatgggtgagaagggcaagctgggcgtacctggcctccctggttatcctgggcgccagggtccaaagggctccctgggctttcctggctttccaggcgcttcaggcgaaaagggcgccagaggactcagcggaaagtcaggtccacgcggcgagcggggacctactgggcctagagggcaacggggaccaaggggggccacgggcaagtctggagccaaggggacctccggtggcgatggccctcatggacccccgggggaaaggggcctcccaggcccacaagggcccaatggctttcccggtcccaagggacctccgggcccccctggcaaggacggcctgccgggacacccaggtcaacgcggggaagtgggcttccaagggaagacagggcctccggggccacccggcgtggtcggtcctcagggggccgctggggagactgggccaatgggcgagaggggccacccaggtcctccggggccacccggggagcagggtttgccaggtaccgcgggcaaagaagggactaaaggggacccaggaccacccggtgcaccgggcaaagacgggccggcagggctccggggctttcctggagagagaggtctgccgggcacagccgggggcccaggtctgaagggcaacgagggcccttccggccctcccggaccagctggcagccctggcgaacgcggtgcagcaggtagtgggggacccatcggacctcccggtaggcccggccctcagggccctccaggcgctgccggcgagaagggcgtgccaggggaaaaagggcctatcggcccaaccggccgtgacggggtgcaggggcctgttgggctacccgggcctgccgggcctcccggggtggcaggcgaggacggagataaaggggaggttggcgaccctggccaaaaaggtacaaagggtaataagggcgaacacggtccacccggacccccggggcccattggacccgtgggacagcccggcgccgccggggctgacggagaacccggcgctaggggcccccaaggccatttcggcgccaagggggacgagggtacccggggattcaacggcccacccggcccaattgggctccaagggctgccaggaccctccggcgaaaaaggcgagaccggagatgtgggcccaatgggcccacctggccctccggggccccgggggccagccggcccaaatggcgccgacgggccgcagggtccgcctggcggggtagggaacctgggtccccctggggaaaaaggggaacctggggagtccgggtcacctggaatccaaggcgaacccggcgttaagggaccccgtggcgagcgtggcgagaaaggagagtccggccaacccggcgaacctggccccccaggcccgaaaggccccaccggcgacgatggccctaagggaaatccaggcccggtaggatttccgggggaccccggccctcctggggagggagggccgagaggccaggacggggccaagggagatcgtggtgaggatggcgagccaggccagccaggctcacctggaccaacaggtgaaaacggaccacccggaccattggggaaacggggaccagctggctcgccagggtcagaaggtcgtcagggagggaagggcgccaaaggtgatccaggagcaatcggagcaccagggaagaccggaccagtgggtcccgctggtcccgccggaaaacctggtcccgacggcttgaggggcctgcccggtagtgtagggcagcagggccggccaggcgctactggtcaggccggaccacccgggcccgtgggaccaccaggcctgcccggtctaagaggggacgctggtgcaaagggggagaagggacatcccgggcttatcggtctgataggcccccccggcgaacagggcgagaagggcgatcgagggctccctggcccccaaggcagccctggtcaaaagggagaaatgggtattcccggtgctagcggccccatcggccctggcgggcccccaggcctccccgggcctgctggccccaagggtgctaaaggggcgacaggacccgggggccctaagggagagaagggagtgcaaggacctcccggccatcccggtccgcctggggaagtaattcagccacttcctattcagatgcctaagaaaacaaggaggtcagtcgatggcagtcgactgatgcaggaggatgaagccatcccaacagggggagctcctggctctcccggcggactcgaagaaatattcggcagcctcgattccctgcgtgaagagattgagcagatgcggagacctactggaacacaggattcccctgcccgcacgtgccaggaccttaaactgtgtcaccccgaactgcccgacggggaatactgggtggatcccaaccaggggtgcgctcgcgatgcctttagagtgttctgtaacttcaccgccgggggagagacatgtgtgactccacgcgacgacgtgacccagtttagttacgtcgactctgagggctcccccgtgggggttgtccaactgacttttttgcgtcttttatccgtcagtgcccaccaggacgtgagttacccttgttcaggcgccgccagagacggccccttgcgactgagaggcgcgaacgaggatgaactgtcacccgagacatctccgtacgtgaaagagttcagagacggatgccaaacacaacaggggaggactgtgctcgaggtgcgaactcctgttttggagcagctgcccgtgctggatgcttcctttagcgacttgggcgcgcccccgcggcgcggcggcgtgttgctgggaccagtttgctttatgggatag

SEQ ID NO: 232494 - DNA, 1875 bp, Artificial Sequence
  derived and/or modified sequence
atggagaggtgctctcgatgccacagactccttttgttgctcccactggtcctgggcctgtctgctgcccccggctgggccggcgctcccccagttgatgtactcagagctcttaggtttccctcactgcctgacggcgtccggcgggccaagggtatctgtcccgcagacgttgcctaccgagttgctagaccagcacagctctctgccccgacacgtcagctgttcccaggcggctttcctaaggatttcagcttgctaaccgtggtccggactagacccggcctgcaggctcccctgctgaccctttatagcgctcagggcgtgcgccaattgggcctggaactggggaggccagtgagattcctttacgaggatcagaccggacggccacagccgccttctcaacccgtctttcggggactaagccttgccgacggaaaatggcaccgcgtggctgtggcagtaaagggacagtcagtgaccctaatcgtcgactgtaagaagcgggttacaagaccactgccccgcagcgcccggcctgtcttggacacccacggcgttatcatcttcggcgcaaggattctggacgaagaagttttcgaaggagacgtgcaggagctggcaattgttccaggtgtgcaggcggcatacgagagttgtgaacagaaagagctggagtgcgaagggggtcagcgggagaggcctcagaatcaacagccacacagagctcagcgatccccccagcagcagccgtcgcgactacataggccccagaatcaggagccccagtctcagccgacagagtccctttattatgattacaagccaccttattatgacgtcatgactaccggcaccaccccagattatcaagacccaacccccggggaagaagaagagattctggagtcaagcctgctcccccctttggaagaggagcagacggacctgcaggtgccgcccacggcagaccggtttcaggccgaggagtatggagagggtggaaccgatccgccagagggcccctacgattatacatacgggtatggtgacgactatcgggaggaaactgaactgggccctgcactgagcgctgagacagctcactcaggcgccgccgcccacggtcctcgcggcttgaaaggcgagaagggggagccggctgtgttggaaccaggaatgttggtagaggggccacctggtccagaggggcctgctgggctaataggaccccctggcatccagggtaacccgggaccagtgggcgaccccggggagcggggcccccctggtagagcgggattgcccggctctgacggcgcgcccggccctcctggtacttcacttatgctgccattccggttcggtagcgggggtggcgataaaggacctgttgtggccgcccaggaagcccaagcacaggctatccttcaacaggccagactcgcactgcgtggaccaccaggacctatggggtacacggggcgccctggtccactcggccagcccggaagtccggggttgaaaggggaaagcggagacctgggcccccaggggccccgcggaccacaaggtctcacagggccaccagggaaggccgggagacgggggcgagctggggctgatggggcacggggcatgccaggagacccgggagttaaaggcgatagaggcttcgatgggttgcccgggctgccaggagagaaggggcatagaggggatactggcgcgcagggcctgcctggcccccccggtgaagatggcgagcgcggcgacgacggcgaaatagggcctaggggtctaccaggggaatcaggccccagaggtttgctcgggcccaagggaccgcccggtataccaggtccgccatag

SEQ ID NO: 232495 - DNA, 1875 bp, Artificial Sequence
  derived and/or modified sequence
atggagaggtgcagccgctgccacagactcctgcttctgcttcctctcgtcttgggcctctctgctgctcctggttgggcgggggctcctccagtggacgttctccgagcattaaggtttccctctctcccagatggggttcggagagctaagggcatttgtcctgcggatgtcgcatatcgagtggcgaggccagcacaactgagcgcccctacccggcagctgttccctggcggattccccaaggatttttcacttcttacagtggtcaggactcgccccggactccaggcccctttactcaccctgtactcggctcagggcgtcagacagctcggactggaactcggacgccccgtcagatttctctatgaggaccagactgggcggcctcaacctccaagtcagccagtcttccgcggattgagcctagcagacgggaagtggcatagggtcgctgtcgccgttaaaggccagtctgtgacccttattgtagactgcaagaaacgtgtgacccgacctctcccaaggtctgccaggcccgtcctcgatactcacggcgtgattattttcggcgcccgcatactggacgaagaagttttcgagggtgacgtgcaggagctggctattgtcccaggagtacaggctgcctacgagagttgcgaacaaaaggaactggagtgcgagggggggcagcgcgaacggcctcaaaaccaacagccccaccgggcacagagaagccctcagcagcaaccgtccagattacacaggcctcagaatcaggagcctcagagtcagcctacggagagtctgtactacgactacgagcctccttactatgacgtcatgaccactgggactactcctgactatcaggatcctacccccggcgaagaagaggaaatcctggaatcgagcctgctcccacctttggaggaggaacaaaccgacctgcaagtgcccccgacagctgataggttccaagccgaggagtacggagagggggggaccgacccgcccgagggcccgtacgattacacatacggctacggcgacgactatcgcgaggaaaccgagctgggcccagctcttagcgcagaaaccgctcatagtggggccgcagcccacggaccccggggcctgaaaggagagaagggtgaaccggctgttcttgagcctggaatgctcgttgagggaccacccggccccgagggccctgcagggctgattgggccaccaggtatccaaggcaacccggggcccgtgggggatcctggggaacgggggccaccaggcagggccggccttcccggcagcgatggagcccccgggcctccaggaactagtctgatgttaccatttcgatttgggtctggcggcggggataaagggcctgttgtggctgcacaggaggctcaggctcaggctatcctacagcaagcacggttggccttgcgaggccctcctggacccatgggctatacaggccgcccaggcccactgggacagcccgggagccctggactgaaaggcgaatcaggtgatttaggaccccagggacccaggggtccccagggattgaccgggccaccgggtaaagctgggcgccggggccgcgccggcgcagatggggcaaggggaatgcccggcgatcctggggtcaagggtgacagaggcttcgacgggcttccgggccttcccggggagaagggtcacagaggagacacaggagcccaggggctgcctgggccccctggagaggatggggagcgcggcgacgacggcgagatcggacctaggggcctgcccggtgaaagtggtcctaggggactgttaggccccaagggcccgcctgggattcccggtccaccttag

SEQ ID NO: 232496 - DNA, 1794 bp, Artificial Sequence
  derived and/or modified sequence
tgagccccccccgttgacgtccttagggctttgcgcttccctagcctgcccgacggtgttcggcgcgccaagggtatctgtccagcagacgtggcatatcgagtagcccgacctgcacagctgagtgctcccacccgccaactgttcccagggggctttcccaaggatttttctcttctgacggttgtgagaactcgcccgggacttcaagcaccactgcttacattatattctgcccagggcgtacggcagctgggtctggagcttggccgaccggtgaggtttctgtacgaggatcagacaggccgcccacagcccccatctcagcctgtgttccgcggactgagtctggcagacggtaaatggcaccgcgtagctgtggccgtcaaaggacagtccgtcactcttatcgtggactgtaagaaacgtgtgaccagacctcttccccgatccgcacgccctgttctggacacacatggcgtgatcattttcggagcacgaatcctcgacgaagaagtcttcgagggggacgtgcaggaattggcaattgtgcctggggtccaagctgcgtacgagtcctgtgagcaaaaagagttggagtgtgagggtggacagcgggaaagacctcagaatcagcagcctcaccgagcccagcgctctcctcaacagcagccctctagacttcaccggccacagaaccaggaaccacagtctcagccaacagaaagcttatactacgattataaacctccttactatgatgtgatgactaccggcaccacacctgactatcaggacccgactccaggtgaggaagaggagatcctggaatcctccctgctcccccctctggaggaagaacagaccgacttacaggtgcctccgacggccgacaggttccaagcagaggaatacggggagggcgggaccgaccctcctgaggggccatacgactatacatacggctatggggacgactacagggaggagaccgaattgggacctgccctctccgccgagactgcgcacagcggagccgccgcccatgggcccaggggcctgaaaggcgagaagggagagcccgcggtcctcgagccagggatgctagtcgaggggcctcccggcccagaggggcctgcgggattgataggtccgcccgggatccagggcaatcctggccccgttggcgaccccggggagcgggggcccccagggagagcaggcttgccaggaagcgacggcgcgcccgggccccccgggacgtctctgatgcttcctttccgctttggatccgggggcggggacaagggccctgttgtggccgcccaggaggcccaggctcaagctatcttgcagcaggctcgcctcgctctacgcggacctcccggacccatgggatacacagggagacctggtcctctgggacagccagggagccctggactgaaaggggagagcggtgatctggggcctcagggcccgcggggcccacagggactcactgggcccccaggaaaggcaggacggagaggtagggccggagccgatggagctcgaggtatgccgggggaccctggcgtcaagggcgatcgtgggttcgatggcttgccagggctgcctggagaaaaaggccatcgaggagatactggtgctcagggattgccaggccccccaggagaggacggggaacgaggcgacgatggagaaattggtcctaggggacttcccggagagagcggtcctagggggctcctgggccctaagggtccaccgggcattcctggccccccctag

SEQ ID NO: 232497 - DNA, 1875 bp, Artificial Sequence
  derived and/or modified sequence
atggagagatgctcccgatgtcaccggctcttgttgctgttgcctctcgtattaggacttagtgccgctccgggatgggcaggggctcccccagtggacgtgctcagagcccttcggttcccttctctaccagatggcgtccgaagggcaaaagggatctgcccagcagacgtggcctatagggtagccagacctgcccagctttccgcccctaccaggcagttattccctggcggtttccccaaagacttcagcctgctgaccgtagtccgaaccagaccgggcttgcaggccccgctgttgaccctttatagtgcccagggggtgagacaattagggttagagctggggagaccagtgcgctttctctacgaagatcagacagggcgtccgcagccaccttcacagccagtctttcgaggcctgtccttggcagacggcaagtggcatcgtgtggccgtggctgtgaagggtcaatccgtgactctgatcgtggactgtaaaaaacgagtgacaagaccgctgccgcgctcggctaggcccgtgctggacacacatggagtgattatcttcggcgcccgtatcctggatgaagaggtgttcgaaggagacgtgcaagagctggctatagtgccgggagtgcaggctgcgtatgaaagctgcgagcagaaagaattagagtgcgagggcggccaaagggaaagaccacaaaaccagcagccccacagagcacaacgaagccctcagcagcagccctcccgtctacacaggcctcagaaccaagaaccacaaagccagcccacagagtctctctactacgattacgagcctccgtactatgatgtcatgacaaccggaaccacacctgactatcaggaccctacacccggagaagaggaggagatcctcgaaagctcgcttctgcctcctctcgaggaggaacagaccgacctgcaggtgccacctactgcagaccgttttcaggctgaggaatacggggagggcggcactgatccaccagagggtccatatgattatacatacggatacggcgatgactatcgggaagagaccgaactggggccggcgttatccgccgaaaccgctcattctggtgccgccgcccacggacctcgtggccttaaaggggagaagggcgagccagccgtcctggaacctgggatgttagtcgaaggcccaccaggcccagagggtccggctggcctgatcggtcctcctgggatccaaggaaatcccggccccgtgggcgatcctggagagagggggccccctggacgcgccggcctgccaggttctgacggcgctccaggtccaccaggcacatctctcatgttaccctttcgcttcggttcaggcggcggagataagggccctgtggtggccgcccaggaggcgcaggctcaggccattctgcagcaggccagactcgctctacgagggccccccggccccatggggtatacggggaggcctggccctttggggcaaccgggctcccctgggctcaagggcgaatcaggtgatctgggcccacagggacctcggggtcctcagggtctaacggggcccccaggcaaggcaggccgaagaggtagggcaggggctgatggggcccgcgggatgcctggcgatccaggggtgaagggcgataggggtttcgatggcttgccaggtctgcccggtgaaaagggacatcgtggggacacaggagcacagggacttcccgggcctcctggagaagatggcgaacgaggggacgacggcgagatcggtccaagggggctgcccggcgaatcaggccccagaggtctgttgggcccaaaaggcccgcccgggattcccggacctccttag

SEQ ID NO: 232498 - DNA, 1875 bp, Artificial Sequence
  derived and/or modified sequence
atggagagatgctcccgatgccacaggttgcttctgctgcttcccttggttctaggactgtccgctgctccaggatgggccggcgcacctccagtggacgtcttacgcgccctccggttcccatccctgcccgacggtgtgcgtagagccaagggcatctgtcctgctgatgtggcctatagagtggcccgccccgcccagcttagtgctcccactcgtcaactgtttccaggcggatttccaaaggatttctctttgctgacagtggttaggacccgcccagggttacaggctcccctattgacactttactcagcacagggagtgcggcagctgggactagagctcgggcctccagtgaggtttctctatgaagaccagactggtaggcctcagcctcccagccaacccgtgttccggggtctttctctggccgatgggaagtggcatcgtgttgcggtggccgtcaaaggccaatccgtgaccctcattgtggactgtaaaaagcgggtgacacgaccactgccccgtagtgctcggccagtgctggatactcatggggtgataattttcggcgctagaattctggatgaagaagtcttcgaaggggacgtgcaagagttagccatcgttcccggcgttcaagcagcatacgagagctgcgagcaaaaagaacttgaatgcgagggcgggcaacgggagaggccccagaatcagcagccacatcgagcccagaggagtccccagcagcagccatctaggcttcaccgtcctcaaaatcaagaaccacagagccagccaactgagtcactgtactatgattacaagcctccatactatgacgtgatgacaacaggcactacccctgactaccaggaccccactccgggggaagaggaggaaatcctggagtcgagcctcttacctcccctcgaggaggaacagaccgatttacaagtgcctcctaccgccgacaggttccaagcagaagagtacggggagggcggcaccgatccacccgaaggaccctatgactacacctatggctacggcgatgattaccgtgaggagaccgagctcggccccgctcttagcgccgagactgcccacagcggagcggccgcccacggaccaagaggcctgaagggcgaaaagggcgagcccgcagtgctggagccaggcatgctcgttgaaggaccacccgggccagagggaccagccggtttgatcggaccaccaggcatacaaggaaatcccggacccgttggagatcctggagagcggggccctcctggccgggcaggattaccaggctccgacggtgccccggggccccccggaacatcgctgatgctcccttttcggttcggatccggaggaggtgacaaagggcctgttgtcgccgcacaggaggcgcaggcccaagccatattgcagcaggctcgactggctttaaggggacccccaggaccgatgggatacaccggcagacccggccctctgggccagcccgggtcacccggacttaagggtgaatctggagatctggggcctcaaggacctcggggcccccaggggctgaccggtccacccggcaaagcagggaggcgtggccgggcgggcgccgacggagcccgcggcatgccgggcgatcccggcgttaagggagacagaggattcgacggcctccccggcctgcctggggaaaagggccaccgcggggacacaggcgcacagggtctgcctggccccccaggagaggacggcgagagaggggacgacggcgaaatcggacctcgaggactgcctggtgaatccggccctagagggctactgggacccaaaggccctcctggtatccccggaccaccatag

SEQ ID NO: 232499 - DNA, 1875 bp, Artificial Sequence
  derived and/or modified sequence
atggaaagatgttctcgctgccataggctcctgttgctattacccctggtcctgggtcttagcgccgccccaggctgggcaggcgcacctccagtggatgtactcagagcgctgagatttccttccctgccagatggagttaggcgtgctaagggcatctgtcctgcagatgtggcctaccgtgttgcgcggccagctcaactcagcgcgcccacgcgtcagttatttcctggggggttcccaaaagacttctccttactgacggtggtaaggaccagaccaggcttgcaggcccctctccttaccctgtactcggctcagggcgtgcgacagctcggactggaacttggcaggcccgtgcgcttcctgtacgaagaccaaaccggtcgaccacagccgcctagtcagcccgtgttcaggggcctgagcctagcggacggcaagtggcatagagttgcggttgctgtgaaaggacagagcgtgactctgatcgtggactgtaaaaagcgagtgacccgccccttgcctcgcagcgcccggcctgtattggacacccatggtgttatcatttttggggcacgcattctcgacgaagaggtttttgagggcgatgtgcaggaattagccatagtgccaggcgtgcaagcagcttacgagtcttgtgaacagaaggagttggaatgcgagggaggccagcgcgagaggccacagaaccagcaaccgcaccgcgctcaacgttctccccagcaacagccgtcaaggctgcatcgaccccagaaccaagagccgcagtcccaacccaccgagtctctttattatgactacaaacccccatattatgatgtgatgacaaccggaaccactcccgactatcaggatcccacccctggagaagaagaagagatcctggaaagctctctgctgccccctctggaggaggaacagacagacttgcaggtgccaccaaccgctgacaggttccaagccgaggaatatggcgagggcgggactgacccaccagaggggccctatgactacacatatggatatggggatgattatcgtgaagaaaccgaactgggtccagccctcagtgccgaaaccgctcactcaggggcggccgcccacggcccaagaggcctgaagggagagaaaggggagccagcggtcttagagccaggcatgcttgtggagggtccccccggaccggagggccctgctggcctgatcggaccacccggcatccagggcaacccgggtcccgtcggtgatccgggagagcggggcccaccaggccgtgcaggcctacccggcagtgacggagcacccgggcctcctggtacatccttaatgctgccattccggtttggatccgggggtggtgataaaggccccgtggtcgctgcgcaggaggcacaggcacaagcgattcttcagcaggccagactggcattgagaggcccccccggtccgatgggctatacgggccgtcccggccccctgggccagcctggttctccggggcttaaaggcgagagcggcgatttgggaccgcaaggacctcgtggccctcagggtctaaccgggccgccaggaaaggccggaagaaggggtagggcaggggcagatggggctcggggtatgcccggagaccctggggtgaaaggagatagggggtttgatggcctgccgggtttgcctggagagaaaggccaccgtggcgacacgggagctcaaggactgcccggcccccccggggaggacggcgagcggggagacgacggcgagatcggcccgagaggactgccaggtgagagtggaccgagggggcttctggggcctaagggccctcccggcatccccggaccgccgtag

SEQ ID NO: 232500 - DNA, 1875 bp, Artificial Sequence
  derived and/or modified sequence
atggagcggtgctctcggtgccaccgtcttctattgctgctacctctggttctggggttgtctgcagcacctggttgggcaggagctccaccagtcgatgtgcttagagctctgcgatttccatctctacctgacggcgtgcgaagagcaaagggcatatgccccgctgatgttgcctatagagtggcccgcccagctcagctgagcgctccgactcggcaactcttccccggcggattccctaaggatttttccttgctgacagtggttagaacacgccctggactgcaggcccctttgctaactctctattcagcacagggcgtgcggcagctgggactcgagctcggccggcccgtgagattcctgtatgaggatcagactggaagacctcaaccccctagccaacccgtcttcaggggactttccctcgctgatggtaagtggcacagagtcgccgtggcagttaagggccaatctgtcacattgattgtggactgcaaaaagagagtgacccggccacttcctaggagtgcccgccccgttctcgatactcacggcgtcatcatctttggcgcccggattttggacgaagaggttttcgaaggcgacgtacaggaactggctattgtgccaggcgttcaggccgcatacgagtcatgtgagcaaaaagagttggaatgtgaaggcgggcagagggagcgtcctcaaaatcagcagccacatcgcgcccaacggtccccccaacagcaaccctctcgcctccatcgcccccagaatcaggagcctcagtcacagcccaccgagtcactgtactatgattacgagcccccatattacgatgtgatgactactggcacgacccccgactatcaagatcccacaccaggtgaggaggaggaaattttagaaagctcgctactgccccccctcgaggaagagcagaccgatctgcaggtgccacccactgcggaccgctttcaggctgaagaatatggcgaggggggtacagaccctccggagggaccgtatgattatacgtatggatatggcgacgattaccgcgaggagaccgaactcggcccagcactgagcgccgaaaccgctcacagtggcgctgcagcccacggaccccgcggactcaagggggaaaagggcgagcccgcagtgttggaaccaggcatgctcgtggagggacccccaggacctgaagggccagctggactgattgggcctcctggaatccagggcaaccctggtcctgtgggcgatcctggcgaacgggggccgcccggaagggctggactcccaggatctgatggagcaccaggcccgcccggtacaagcctcatgttaccttttcgctttggcagcgggggaggagacaagggccctgtggtggcagcacaggaagctcaagctcaggccattctccagcaggcccgtcttgccctcaggggtccacccggacctatggggtatacagggcgtccaggaccgctcggccagcccggaagtcctggactgaaaggggaaagtggagacctggggccacagggcccccgtggacctcaggggctcacagggcctcctggaaaggcaggccgacgtgggcgggcaggcgctgatggagctaggggcatgccaggtgaccctggcgtaaagggcgaccgcggttttgatggcctcccaggtctgccaggcgagaaaggacaccgaggggataccggcgcacagggcctgccaggcccccccggagaagatggggaacgtggtgacgacggagaaattggcccgagagggctgcctggcgagtcaggcccgagagggctgctgggcccaaaaggaccacctggtattccaggccctccctag

SEQ ID NO: 232501 - DNA, 5070 bp, Artificial Sequence
  derived and/or modified sequence
atggagcgttgctccaggtgccacagacttctgctacttctgcccctggttctgggattgtcagctgctcccggatgggcaggggcaccgccagtggatgttctgagggcactgagatttccgtcactccctgacggtgtgcggagggcaaagggaatttgtccagctgacgtagcctatcgcgtggctcgtccagcccagctcagtgctccgacgcggcagctttttccgggagggtttcccaaagacttttctttgttgacagtagtccgtacacggcccgggctacaggcgcccttgctgaccctgtacagtgcacagggggtgcggcagctcgggttggagctggggccgccagtcagattcctctacgaggaccagaccggccgacctcagccccccagccaacccgtcttccgaggcttaagtctcgccgacggcaagtggcaccgggtggcggtggctgtaaaaggccagagcgtgaccctgatagtggattgcaagaagcgtgtcaccagacctctgcccaggtctgcccgcccagtcctggatacgcacggcgtgatcatttttggcgcgcgcatcctggatgaggaagtgtttgagggcgacgtgcaggaacttgccattgttcccggggtgcaggcagcgtatgagagttgtgagcagaaggagcttgagtgtgagggcggccagagggagaggcctcagaatcaacaaccacatagagcccagcgtagcccccagcaacagccctctaggttacatcgaccacagaaccaagagcctcagtcccaggagcagacagatctgcaagttccccccactgcagaccgcttccaggccgaggaatacggagagggcggtacggacccgcctgagggtccctatgattacacctatgggtatggagatgattatagggaagagacagagttgggccctgccctgtccgcggagaccgcccattccggagccgccgctcatgggccccggggcttgaagggtgaaaaaggcgagcccgctgtgctggaaccaggaatgctcgtggaaggccctcccggccctgagggcccagctgggctgataggcccccctggtatccagggtaacccaggaccagtaggcgaccccggagagcgagggcctcccggccgggccggcctgccaggatcagatggcgcccctggccctcccggtactagtcttatgctacctttccggtttggaagtggaggtggcgacaagggccctgtcgtcgcagctcaggaagcccaagcccaggcaatcctccaacaggcaaggctagcattacgcgggcctcctggacctatgggttacacagggcgccctggtccattaggccaaccaggaagcccaggcttaaaaggagaaagcggagacctcggcccccaaggtccacggggacctcaaggccttactggccctccagggaaggccggtagacgcggacgagcaggagcggacggagcacggggaatgccaggagacccaggtgtaaagggtgatcgagggttcgacggtttacctggactgcccggagaaaaggggcatcgtggtgacaccggcgcacaggggctcccggggccgccaggggaagatggcgagaggggcgatgatggtgaaatcggccccagaggcttgcctggcgagagcggaccccgaggcctcttggggccaaaggggcccccaggaattcccgggcctcccggagtgcgaggtatggatggcccccaggggcctaagggatctctgggtccgcagggtgaacctgggcctcctggacagcagggcacgcctgggacccaggggctaccagggccccaaggggccatcggcccccacggagagaagggcccacaaggcaaacccggattgccaggaatgccaggttctgacgggccacccggacatcccgggaaagaaggcccgccgggcaccaaggggaaccagggtccatccggcccacaagggccgctagggtaccctggccctcgcggggttaagggggtggatgggattaggggcctgaaggggcataagggtgagaaaggagaggatggctttccagggttcaagggggatattggggtaaagggagacaggggagaagtcggtgttcccgggtcaaggggggaggatggccctgaaggtccaaagggcaggactggcccgactggtgacccaggcccacccgggttaatgggggagaaagggaaattgggtgtgccggggttgcccggttaccccggtcgacagggccccaaaggctccctgggtttccctgggtttcccggggcatcgggcgagaagggagcgcgaggattaagcggaaaaagcggcccccgtggtgaaagagggcccaccggcccacgcggacagagaggtccccggggtgctaccggaaaaagcggtgcgaaggggactagcggcggggatggcccgcacggcccgcccggcgagcgggggctgccgggaccccagggcccaaacggattccctggcccaaaaggccctcccggacctcccgggaaggatggactccctggccaccccgggcagcggggggaggtcggttttcaaggaaagacaggccctcctggcccgccgggcgtggtggggcctcagggcgctgcgggtgagactggaccaatgggagagagaggacatccaggccctcctggccccccaggagagcagggcctgcccggtaccgcgggtaaagaggggactaaaggagaccccgggccccccggtgctccagggaaagacggccctgctggtctgcgcggctttccgggggagaggggactccccggcactgccggcggtcctggcctgaagggcaatgaaggcccatctggtccacccggaccagccggtagcccaggcgaacgtggagccgccggatcaggaggtcccataggccctcctggtcgccccgggccccaggggccccccggtgccgctggtgagaagggagtgccaggcgaaaagggacccattggtccaactggcagagatggagtgcagggccccgtcggattgcccggccccgcaggccctccaggcgttgctggggaggatggagacaagggcgaggtgggtgaccccggtcagaaaggcaccaagggtaacaagggcgaacacggtccacccggcccaccgggtcccattggcccagtagggcaacccggagccgcgggagcggatggagaacccggagcccgggggcctcagggtcatttcggagccaagggtgacgagggcacaagagggtttaatggcccccctggacccatcggccttcaggggctccccgggccatcgggggagaaaggggagacaggcgatgttgggcccatgggccctccaggtcccccaggacctaggggcccagctggacctaacggtgcagacgggcctcagggcccaccaggaggtgtgggtaacctcggtcccccaggcgagaagggtgaacccggcgaatccggatcaccgggcattcagggagagcctggcgtcaaaggtccccggggagagcgcggagagaagggggagtccggccaacccggagagccaggtccaccaggaccaaaaggccctacaggggacgacgggcccaagggcaaccccggtcctgtaggttttcccggtgatcctggaccacctggcgagggcggcccaaggggtcaggatggagccaaaggtgaccgcggagaagacggagagcctgggcaacctgggtcacctggccccaccggcgagaacgggccacctggccctctcggaaagcgaggccccgctggttctccaggcagtgagggacgccagggcgggaagggagccaaaggcgatcctggagccatcggcgcacctggcaagaccggacctgttggacccgccgggcctgcaggaaaacctgggccggacggactccgcggactcccaggcagcgtgggccagcaaggacggccgggcgctacaggccaggctgggccccccggcccggtcggcccacctggcttgcccggtctgagaggagacgcgggtgccaaaggcgaaaagggtcacccaggcctcatcggcctgataggccctcccggcgagcaaggcgaaaaaggagatcgaggactgccagggcctcagggatccccaggacagaagggggaaatggggattcccggagcgtccggtccaattggacccggcgggcctcctgggcttcccggtcccgctgggcccaagggcgctaagggggcaactgggcctggaggccccaagggcgagaaaggcgtgcagggaccacctggacaccccggacctccaggggaggtaattcagccactgcctattcagatgcctaaaaagactaggcgttctgtggacggaagcaggctaatgcaggaagatgaagctattccgacgggaggggcccccgggagccccggcggcctggaggaaatatttggctctttggatagcttgagggaagagatagagcagatgcggaggcctaccggcacacaggattcacccgcccggacgtgccaggatctcaaactttgccaccccgagctacctgatggggaatactgggtcgatccgaaccaggggtgtgctcgggacgcgttccgggtattctgcaatttcactgctggcggagagacttgcgtgacgccacgagacgacgtcacccagtttagctatgtcgattcagagggcagtcccgtgggagtggttcagcttacgttcctgcgacttctgagcgtctccgctcaccaggacgtgtcctacccctgcagcggagctgcacgggacgggccgctcagactgagaggagccaacgaggacgagctgagcccagagacatccccctacgttaaggagtttagagatgggtgtcagacccagcaaggacggaccgtgctcgaggtcaggacccctgtgttggagcagctccccgtgctcgatgcctccttttcggatctaggcgcaccaccccggcgaggcggagtgcttctgggacccgtttgttttatgggctag

SEQ ID NO: 232502 - DNA, 5133 bp, Artificial Sequence
  derived and/or modified sequence
atggagcgctgtagccgttgtcatcggctactcctgctgcttcctctagtgctgggactgtcagccgctccagggtgggctggggctccgccagtcgacgtgctccgcgctctccggttcccttctctgccagacggggtaaggcgtgcgaagggcatttgccctgctgacgtcgcataccgcgttgcccgtccggcacagctctccgccccgacaaggcaactgttccccggaggcttccccaaagacttttcactgttaaccgtagtgcgcactcggcccgggctacaggctccactattgactctgtacagtgcccagggagtgcggcagctgggcctggagctgggtccaccagtgcgatttctctatgaagatcaaacaggacgaccacagcccccctctcagcccgttttcagagggctttctcttgcagacggtaaatggcacagggtggccgtcgcagtgaaggggcagagtgtgacactgattgtggattgcaagaaaagggtcacccggcctctgccaagatcagcacgacccgtccttgacacgcacggcgtgatcatttttggcgcacggatattagacgaggaagttttcgagggcgatgtacaggagctggccatcgtccctggcgttcaggcggcttatgaatcgtgtgagcagaaggaactggagtgtgaggggggacagcgcgaacgcccacaaaaccagcagccacatcgggcccagagatcaccacagcagcagcccagtcggctgcaccgtccgcaaaaccaggagccccagagccaggatcctacacctggtgaggaagaagagatactggaatcttctctgcttccacccctcgaagaggagcagactgatctgcaggttcctcctactgcggacagattccaggctgaagagtatggcgaaggtggaacagacccccccgaggggccatacgattacacttatggctatggagacgattacagggaggagactgaacttggaccagccctttccgccgagaccgctcactctggagcagccgcccatgggcctagggggttgaagggagagaagggtgagccggctgtgctcgaaccagggatgcttgtggaggggccacctgggccagaggggccagctgggctgatcgggccacctgggattcaaggcaatccaggtccagtcggagaccctggtgagaggggccctccaggcagagccgggctgcccgggagtgatggagcaccggggccccctggcacgtctcttatgctgccttttaggtttgggagcggcggaggtgataagggaccggtggtggcagcccaggaagcacaagcacaggctattctgcaacaggcccggctggccctgcgcggacccccaggacctatgggctatacagggaggcccggacccttgggacaaccgggtagtccaggcctcaaaggagagtctggtgacctaggcccgcagggccctcgcggcccacaagggctcaccggacctcctggcaaggctgggagacgcggacgggccggcgctgatggtgccagagggatgccaggcgaccccggtgtcaagggtgacagaggcttcgatggtctccccggactgcccggtgaaaagggccacagaggggacactggggcccaggggctgcctggcccccctggagaggatggagagagaggagatgatggcgagatcgggccccgcgggcttccgggagagagcggtccaagaggcttgctgggccccaaagggccccccggtattcccggtccgccaggcgtgcgcggtatggacggccctcagggcccgaagggctcgctgggcccgcagggggaaccaggcccacccggacagcaggggacacccggaacccagggacttcctggtccccagggggctattggccctcacggggagaagggaccacagggaaagcctggtctgcctggtatgcccgggtcagatgggccacccgggcaccccggaaaggagggcccgccaggtactaagggcaatcaggggccttccggtccacagggtcctctaggataccccggacctaggggggtgaaaggtgtagatggcatccgcgggctcaagggacataaaggcgaaaaaggggaagatggatttccaggctttaaaggtgatattggcgttaagggtgatcgaggcgaagtgggagtaccaggatcacggggcgaagacggacccgaaggtcccaagggaagaacgggtcccacaggtgacccaggacctcccggcctgatgggcgagaagggaaagttgggagtccctggactaccaggatatccgggaagacagggccctaaaggcagcctggggtttcctggattcccaggcgcgagtggcgagaagggcgcaagaggattaagcggaaagtctggcccccgcggcgaacgaggacctaccggaccccgtggtcagcgaggccccagaggcgctaccggcaagtctggcgcaaaaggaacatccgggggcgatgggccccacggccctcccggggaacgcgggctgccaggcccccaggggcccaacggcttccctggacccaagggtccacccggaccaccaggcaaggatggccttcctgggcaccccgggcagagaggagaggttggtttccaagggaaaacgggcccgccgggtcccccaggggtggtcggtcctcagggtgcagccggcgagactggcccgatgggagaaagggggcatcctggtccgcctggcccaccgggggaacagggactgcccggaacagctggaaaagagggcacgaaaggcgatcccgggccccccggggccccagggaaggacggtcctgcagggctcaggggctttccaggggagagagggctacccgggacagcagggggccccggcctgaaggggaatgaggggccctccgggccacctggcccagccgggtcacctggcgagcgcggagccgcaggtagtggagggcctataggcccccctgggagaccaggcccccaggggccccctggcgccgccggggagaagggcgtcccaggtgaaaagggcccgattggaccaaccggacgtgatggtgtacaagggccggttggcctgcccggccctgctggcccccccggcgtagccggcgaggatggcgataagggcgaggtgggggaccctggtcagaaggggacgaagggaaacaaaggagagcatggacctcctggccctccaggaccgattggacccgtcgggcagccaggcgcagctggagcggatggcgaaccgggtgcccgcggcccccaggggcattttggcgcaaaaggggacgaggggacacgtggcttcaatggcccaccagggccgatcggactgcagggactgcccgggccaagcggcgaaaaaggcgagactggagacgttgggcctatgggtccccctgggccacctgggccccgagggccagcaggcccaaatggtgccgacggcccccagggccccccaggcggggtggggaacctgggaccacctggcgaaaaaggggagcccggtgagtctggctcccccggaatccagggagagcctggcgtcaagggccccagaggagaaagaggagagaaaggcgaatctggacagcctggtgagccgggtcccccaggcccgaaaggcccaacaggagatgacggcccaaaaggcaatcccggacccgttggctttcccggcgacccagggcctcctggagagggaggccccaggggacaggacggggccaaaggggataggggggaagacggagaacctggacagcccggcagtcccgggccgaccggcgagaatgggccccctgggccactcggcaagcgcggccctgcagggagtccaggaagcgaaggccgccaaggcgggaagggggcgaagggagatcccggagcgatcggggcccccggcaagacggggccggtagggcccgccggtcccgctggaaaacccggccccgatggactgcggggcctgcctggttcggtcggccagcaagggagacccggggctacagggcaggcaggcccccccgggcccgttggtcccccaggacttcccgggctccgtggtgacgccggggctaaaggggagaagggacaccccgggctcatcggattgattggtcctccaggcgaacagggagaaaaaggagatcgcggtttgccaggaccccagggaagcccgggacagaaaggtgagatggggattcccggggcctcaggaccaatcggaccgggtggaccacctggactgcctggccccgcaggccctaagggggccaagggagctacaggccccggcggccctaaaggcgagaaaggggtccagggaccacccggccaccccggcccccctggagaagttatccagccccttcctatccagatgcccaagaagactcggaggtcggtggatgggtcaaggttgatgcaggaggacgaggccatcccaactggtggcgcgcccggcagtcctggaggccttgaggagatttttggttctcttgactccctcagagaagaaattgaacagatgcgacgcccgacaggaacacaggacagtccagcaaggacttgccaggacctgaagctttgtcacccagagctgccagatggggagtattgggtcgatccgaatcaagggtgcgcacgcgatgcttttagagtcttttgcaattttacggctggaggtgagacctgcgtgacccccagagacgacgtgacccaattttcttacgtggattcagagggctcccctgttggggtcgtgcagttgacttttctgaggctcctcagtgtgagtgcccatcaagatgtcagttatccgtgtagcggagccgctcgagacggcccactccggctgcggggtgctaacgaagatgagctctcacccgaaaccagtccctacgttaaagagtttagagacgggtgtcagactcagcagggaaggaccgtcctcgaggtccgcactcccgttttggagcagctgcctgtactggatgcaagtttttctgatttgggagctccccccagacgcggcggagttctgctggggcccgtgtgttttatgggctag

SEQ ID NO: 232503 - DNA, 5148 bp, Artificial Sequence
  derived and/or modified sequence
atggaacggtgctccaggtgccatcgactcttgctgttgctgcccctcgtgctcggcctctccgctgctcccggttgggctggagcacctccagtggatgtgctgcgagccttgaggtttccgagcttgcctgatggcgtgaggagggccaaaggaatctgccccgctgatgtcgcctatcgggtagctcgccctgcacagctttctgccccaacacgccagctttttcccggggggttcccaaaggactttagcctcttgacagtggtgcgcactcgacctggtttacaggcgccgcttctgacgctttacagcgctcagggcgtcaggcagctgggtcttgaacttgggagaccagtacggttcctttacgaagaccagaccggaagaccccaacctcccagtcaacctgtgttccgaggtctgtccctggctgacggtaaatggcatagggtggccgtggccgtaaaaggccagagcgtaaccctgatcgtcgattgcaagaagcgggtgacccgacccctcccacgcagcgccagacccgtgctagatactcacggtgtgataatcttcggggcccgaatcttggatgaagaagtgttcgaaggagatgttcaagaactcgccatcgtgccgggcgtgcaagcagcctatgaatcgtgtgagcaaaaagagttggagtgtgagggtggacagagggaacgtcctcagaaccagcagccacaccgagctcaacgctcaccccaacagcaaccctcccgactgcacagaccacagaatcaagagccacagtcccagcccactgagtctctgtactatgattacgagcctccctactatgacgtgatgacaactggtaccaccccagactatcaggaacagactgacctgcaggtgccgcctactgccgatcgatttcaggcagaagagtatggtgagggaggcacagacccacccgaaggaccctatgattacacctatggctatggggatgattacagagaggagacggaactcgggcccgccctgtctgctgagaccgcccactctggcgctgcggctcacgggccaaggggtctgaaaggtgaaaagggcgagcccgcagttctagaacctggtatgttggttgaagggcccccgggacccgaggggcccgccggattgatcggcccacccgggattcagggcaacccagggcccgtaggcgatcccggcgagcggggtcccccaggcagggccggtctccccggttctgacggcgcacccgggccgcctggtacgagtctaatgctgcccttccgcttcggcagcggaggtggggacaaagggcctgtagtggccgcgcaggaagcgcaggctcaggccattctgcaacaggctcgcctcgccctgcgggggcccccgggacctatgggctacaccggcagaccgggccctctgggacagccaggtagtcctgggctgaagggggagagcggggatctcggccctcagggaccacggggccctcagggcttaactggacctcctgggaaagccgggaggaggggcagagcaggggccgacggtgcgaggggcatgccaggcgaccccggcgtgaagggagataggggcttcgacggcctgcctggtctgcccggagagaaaggtcaccgcggagatacgggggctcagggcctgcccggcccacctggggaggacggagaacgcggggacgatggtgagatcggcccccgcggacttccaggagaaagcggacctcggggcctattaggccccaagggaccacccgggatccccggaccgccaggtgtgcggggaatggacggtccccagggtcccaaagggtccttgggcccccagggagagcccgggccacctgggcaacagggcacccccgggacccagggtctgccaggtccacagggagccattgggccacacggagagaaaggccctcagggtaagccaggcctgcctggcatgcccgggtctgatggaccaccagggcaccccgggaaagagggcccgccgggtaccaaagggaatcaaggtccaagcgggccccaaggccctcttggataccccggcccacgaggtgtgaaaggagtcgatgggataaggggtcttaaaggacacaagggcgagaaaggcgaggacggcttcccaggtttcaagggagatatcggcgtcaaaggtgaccgcggcgaggtaggagtgcccggatcccgcggagaagatggcccagaaggcccaaagggccggactggccctaccggggaccctggacctcctgggttgatgggggagaaaggcaagttgggggtgcctggtctcccaggataccccggacggcagggccctaagggctcgttaggcttccccgggttcccaggggcctcgggagaaaagggggccaggggcctctcaggcaaatcaggcccacgaggtgaaagggggccgacagggccaagaggacagcgaggaccgcggggcgccaccggaaagagtggggcaaaaggaacttcgggaggcgacgggccgcatggaccccctggggagcggggcttaccaggcccccagggacctaatggttttcccggtccaaagggccctctgggccctcctggaaaagatggactgcccggacaccctggccagagaggggaagtggggtttcagggaaagacaggacctcctgggccgcctggagttgtggggcctcagggggcagccggcgaaactggccccatgggtgaacgtggacatcccggcccccccggccctccaggagaacagggattgcccggtacagccggcaaagaagggaccaaaggcgatccggggcccccgggggccccggggaaggacggcccagctggcctgcgtggcttccccggcgagcgggggctacccgggactgcaggcggcccaggtctgaaaggcaacgaaggccctagtgggccccctgggccggcaggatcacccggggaacgcggggccgctgggtctggcggccccattggccccccggggcggcccggaccgcaaggcccgccgggagccgctggagaaaagggggtgcctggagaaaaagggccaattgggccaaccggtcgggacggggtgcaggggcccgtcgggctccctggtcctgccggacctcccggggtggccggggaggacggggacaaaggcgaggtgggagaccctggccaaaaaggcacgaaaggtaataagggtgaacatgggcctcccggaccccccggacccatagggccagttggccaaccaggtgccgccggcgccgacggcgaaccaggggcgcgggggccccagggacactttggagcaaagggggatgagggaactagaggcttcaacggccccccgggtcctattggactacaggggctccccgggccctcaggagagaagggggaaaccggcgacgtgggtcccatgggtccgccgggccctcctgggccgagaggaccagccggacccaatggtgccgacgggccgcaaggccccccggggggagttggcaacctgggcccacctggtgaaaagggagagccaggcgaatctggctctcccggcatccagggcgaacctggggttaaggggccaaggggggagcgcggcgagaaaggagaaagcggccagccgggagagcccggccccccaggccccaaaggcccaactggtgatgacggcccaaaagggaatcccggccccgttgggtttccaggcgatcctgggccaccgggggaggggggtcctaggggacaggacggagcaaagggagatagaggagaggacggggaaccaggtcaaccgggcagtcctggaccaaccggagaaaacgggccaccgggccctctgggtaagcgtggcccagccggctctccgggcagcgaagggaggcaaggaggaaagggagctaagggagatccgggcgcaattggagcaccaggcaaaacaggcccagtcggtcccgccggccccgctggcaaacctggcccagacggtctccggggcctgcctggaagcgtgggacagcagggccgccctggggctaccggtcaggccgggccccctggacccgtcggccctcccggattaccaggactgcggggcgacgccggcgcgaagggcgagaagggtcacccaggactgatcggcttgatagggccaccgggtgagcagggggagaaaggtgatcgtgggctcccaggcccccagggctcaccaggccaaaaaggcgaaatgggtattcctggagctagcgggcctatagggcccggaggcccccccgggctgccaggaccagcgggacccaaaggtgctaagggggccacaggcccaggtggcccgaagggagagaaaggagtgcaggggccgcccggacaccctggccctcccggcgaggtcatccagcctcttcctatccagatgccaaagaaaacgaggaggtcagttgacggaagccgcctaatgcaggaagatgaagcaattccaacgggaggcgctccgggaagcccaggcggactggaagaaatatttggcagcctggacagtctaagggaagagatcgagcagatgcgccggccgactggtactcaggattcgcctgcgaggacatgccaggacctaaaactgtgccatcccgaacttcccgatggcgaatattgggttgaccctaatcagggctgcgcgagggacgctttcagagtgttctgtaattttacggcgggcggagagacgtgtgtgactccgagggatgatgttactcagttttcctacgtcgatagcgaggggagcccagttggtgtggtacagctgacattccttcgacttctgagcgtatcagcgcaccaagatgtgtcctatccctgctccggagcagctcgcgacggccctctgcgcctacgcggagctaatgaagatgaactgagccccgaaacctccccttacgtgaaagagtttagagacgggtgtcagacccagcagggcagaactgtgctggaagtccgcacacctgtcctggaacagctgccagtgctggatgctagtttcagcgaccttggtgccccccctcgccgtggaggagttttactgggcccggtatgcttcatgggttag

SEQ ID NO: 232504 - DNA, 5052 bp, Artificial Sequence
  derived and/or modified sequence
ggcgcaccaccagtggatgttctccgagccctgcgctttccttcactgcccgacggagtgcggagggcaaaagggatctgccccgctgacgtagcctatcgggtcgcccggcctgcgcagctgtcggcacctactcggcagctctttccgggcggattcccaaaggacttttcgcttctgacagttgtccgaactcgaccaggattgcaggcccctctgctgaccttgtactctgctcagggagttagacagctgggccttgagctgggtaggcccgtacgatttctgtatgaggatcagaccgggcgaccccagcctccttcccagcctgtcttcaggggcctgagcttagcagacggcaagtggcatagggtggccgtagccgtcaaaggacagtctgttactctgatcgtggactgtaagaagagagttactcgacctcttccccggtccgccaggccagttctggatacccacggcgtgataatctttggagccagaatcttggacgaagaggtttttgaaggtgatgtccaggagttagcaatcgtgccgggagtacaagccgcgtacgaatcctgcgagcagaaggagcttgaatgtgaggggggccagcgagaaaggccacagaaccagcagccacatcgggcccagagatccccgcaacagcagcctagtagactacaccgccctcagaaccaggaacctcagtcccaagatcctacccccggagaggaagaagagatactcgagtcgagcctacttcccccactcgaagaagagcagactgatcttcaagtgccaccaacagccgacagattccaagccgaggagtacggcgaaggcggtacagacccaccagagggtccatatgattatacttacggatacggcgatgattaccgggaggagacagagctaggccctgctctgagtgctgagacagcacatagtggtgcggcagcacacggacccagaggcctgaaaggggagaagggcgaacctgccgtgctggaacccggaatgttggtggagggacccccgggaccagaggggccggctggcttgattggccccccgggtattcagggaaatcccggacccgtgggcgaccccggtgaacgggggccacccggacgggccggacttcctggctccgacggggcaccagggccccctgggacaagcctgatgctccctttcagatttggaagcggcggcggggacaagggaccagtggtcgccgctcaggaagcccaggcccaggccatcttacaacaagctcggctcgcattgagaggtccaccagggccaatgggctacacaggcagaccaggtcccctcggccagcctggatcccccggtctcaagggcgaatcaggggacctggggccacagggccctagggggcctcaggggttgaccgggccccccggaaaagctggcaggagaggcagggccggggctgatggggctcgcgggatgccgggcgaccctggcgtcaagggagacagggggttcgatggactccccggcttgcccggtgagaaaggccataggggtgacacaggggcccaggggctgccgggaccccctggagaagatggcgagaggggagacgacggggagattggacctcggggactaccaggggagagtggaccaagagggctcttgggaccaaaggggcctccagggatccccggccctcctggggttcggggtatggatggacctcaaggtcccaaggggtcactggggccacagggcgagcccgggcccccgggccagcaggggacccctgggacccagggactgccaggaccgcagggagccatagggcctcacggggagaagggcccccagggcaaaccaggactgcctgggatgcctggaagcgacgggcctccaggacaccccggcaaagaaggacctccggggactaaagggaatcagggcccttcgggccctcaaggaccactggggtacccaggcccccgaggagttaagggtgtagatggaatcaggggtctcaaagggcacaaaggcgaaaaaggtgaagacgggtttccggggttcaaaggagacattggagtgaagggtgatcgtggggaagtgggcgtgccaggctccaggggcgaggatggccccgaaggtcctaaggggcgtaccggccctaccggtgaccctgggccccctggcttgatgggggagaagggtaagttgggggtgcctggcctgccaggttatcccggcagacaaggaccaaagggaagtcttgggtttcccgggttccctggcgcctctggagaaaagggggcacgcgggctgagcggaaagagcggtccacgcggagaaagaggacccactggaccacgcggccagaggggacctaggggggccactggcaagagtggggcaaaggggacatccgggggagacggccctcatgggccacccggcgaacgcggcttgccgggcccacagggtccaaatggttttcccggtcctaagggaccccctggtccaccgggtaaggacgggctgcccgggcacccggggcagagaggggaagttgggtttcagggcaaaaccggacctcccggtccacctggcgtggtaggcccccagggggctgcaggggagacgggtccgatgggggagcggggccatcccgggccccctgggccccctggtgagcagggcctgcctggtacagcaggaaaggaaggtaccaaaggtgatccgggcccccccggtgcaccaggcaaagatgggcccgcagggcttcgcgggttccccggcgagagagggctgccaggcactgccggcgggccaggcctcaagggaaacgagggcccctccggccctcctggacccgccggaagccctggcgagcggggagcagctggttccggggggccaataggtcccccaggcaggccaggcccgcagggtcctccaggcgcagctggagagaaaggcgtgccgggggaaaaagggccaataggcccaactggccgtgatggagtccagggaccagtgggcctccccggcccggccggtccccccggggtggcaggtgaagatggcgataaaggcgaagtcggcgatccagggcagaaaggcacaaagggcaataagggagagcacggtcctcccgggcctcccggacctattggccctgttgggcaacccggggcagccggtgctgacggtgaaccgggggcacgcggcccgcaggggcacttcggggctaagggagacgagggcactcgcggcttcaatggcccaccaggacctattggcctccaggggctgcccggcccgtccggagaaaagggagaaactggcgatgtgggccctatgggaccccctggtccaccaggaccgcggggtcccgccggtccgaacggggctgacggcccccagggaccaccgggaggggtgggcaatctggggcccccaggcgagaaaggtgagcccggtgagtcgggctcccctgggatccagggggaacctggcgtgaagggaccccggggggagcgcggcgagaagggagagtccggccaacctggtgaacctgggccaccaggacccaaaggccccaccggagatgacggtccaaagggtaatccaggccccgtcgggttcccgggcgatcctgggccacccggggaggggggtcctcgagggcaggatggtgctaagggagatcgcggagaggacggagaacccggtcagcctggctctccagggccaaccggggaaaatggaccccccggcccgctcggcaagaggggtccagctgggagtccgggttcagagggtcgacaggggggcaagggggcaaaaggggaccccggagccatcggagcacctggtaaaacaggccctgtaggccctgctgggcccgcaggtaaacctggccccgacggcttgagaggcctgcctggaagcgttgggcaacaaggccgtcctggcgccaccggtcaggccggacctcccggtcccgttggaccaccagggctgccaggcctcaggggtgatgccggtgctaaaggcgaaaaggggcaccccggattgattggactgattggacccccgggcgaacagggagagaagggagacagaggcttgcctggcccccaaggctcgccagggcagaaaggagagatggggattcctggtgcctcaggacctattggcccagggggtccccccggcttaccaggacctgccgggcctaagggagccaagggagccacaggaccaggagggccaaagggtgagaaaggagttcaaggcccccctggccaccctgggccccctggggaggtcattcagccgctccctatccagatgccaaaaaagacgaggcgatcagtagacggctctcgactgatgcaggaagatgaagctattcctacagggggggcgccagggtctcctggtggcctagaagagatattcgggagcttggactcacttagggaagagatcgagcagatgcgcaggccaaccggtacccaggactctccagcccggacttgccaggacttaaaactctgtcaccctgagttacctgacggagaatactgggtagatcctaatcagggatgtgcacgggatgcctttcgtgttttctgcaactttaccgcaggtggagaaacttgcgtgaccccaagggatgatgtcacccagttctcatacgtggatagcgagggcagccccgttggcgtcgtccaacttacttttttgcgactcctcagcgtgagtgcccaccaggatgtctcatatccatgctcaggggctgccagggatggaccccttagacttcgaggagccaatgaagatgagctgtctccagaaaccagcccatatgtgaaggagtttagagacgggtgtcagacccagcaagggcggactgttctcgaggtgcggacacccgtgctggagcaactgccagtgctggatgcaagcttcagtgatctgggggcaccacctcggagagggggagtactgctgggaccagtgtgtttcatgggctag

SEQ ID NO: 232505 - DNA, 5133 bp, Artificial Sequence
  derived and/or modified sequence
atggaacgctgctcccggtgccatcgactcctcctactcctgccccttgtcctgggcctgtctgctgccccggggtgggcaggggcaccccccgtggatgtgctccgagctttaaggttcccctccttacccgacggggtgcgacgggccaaggggatctgtcctgccgatgtcgcataccgcgtcgccagaccagcgcaactgtctgctccgacccggcaactgtttcccggcggcttccccaaagacttcagcctgctcaccgtggtccggacacgtcctggcctgcaggcgcccctactgacactttatagcgcacagggtgttaggcagctgggtcttgagcttggtagacccgttagattcctgtacgaggatcagaccggtaggcctcagccaccctcacagccggtctttagggggctgtcactggcagatggcaaatggcatagggttgctgtcgctgttaaggggcaaagcgtgaccctgatcgttgattgcaaaaaaagagtcacgcgccctctgccccgttctgctcgcccagtgctcgatacacatggagtcattattttcggagcccgcattctggacgaggaagtgtttgaaggagatgttcaggagttagcaattgtgcccggtgtgcaggcagcctacgaatcgtgcgagcagaaggaattagagtgtgaggggggccaacgagagcggcctcagaatcagcaaccgcacagagcacaacgaagcccacagcagcaaccctctcggctccaccgaccgcagaaccaggaacctcaaagtcaagaccccacaccaggcgaggaggaggaaatacttgagtcatcactactaccgccactggaggaagagcagaccgacttgcaagtgccaccaacagctgataggttccaggccgaggagtacggggaggggggtaccgaccctcctgaggggccctacgattacacctatggctacggagatgactacagagaggagacagagctgggccccgctctctcagccgagacagcacacagcggagctgcagcacacgggccacggggtttaaaaggggaaaagggagaacccgctgtgctcgagcccggaatgctggtcgagggaccaccaggtcccgagggccctgctggactcattggacccccaggcatacagggtaatcccgggcccgtcggtgaccccggggaaaggggaccccccggacgcgccggattgcctggctctgacggagctcccggtccgccaggcacgagcctgatgttgcccttccgatttgggagcggtggaggcgacaagggccctgtggtcgctgcacaggaggcccaggcccaagctattctgcagcaagcaaggctcgctctgcgaggacctcctggacctatgggatacaccggacggcccggaccactgggccagccgggctcgcctggcttgaagggtgagagcggcgacctgggtccacaaggaccaagaggaccgcaagggctgaccggccccccaggaaaagccggtcgcagaggaagagcaggggctgatggagcccgcggcatgcccggggatcctggcgttaagggggacagggggttcgacgggctgcctggtctgcctggagaaaaagggcataggggagatactggggcccagggtttgcccggccccccaggcgaagacggcgagcggggggacgatggtgaaatcggacctcgcgggctccccggcgaatcagggccgcggggcctgctgggccccaaaggcccacccggcatccctggccctcctggggtacgggggatggatggcccccaaggccctaagggatcactgggcccgcagggggagcccggcccaccaggacagcagggcacccctggtactcaaggcctcccaggaccacagggcgcaattggacctcacggagagaaaggaccccaggggaagccagggctcccgggtatgcccggctctgacggtccccccgggcatcctggaaaggagggaccaccaggaactaaaggcaatcagggccctagtggtccacagggtccactggggtatccgggcccacgcggtgttaaaggggtcgacgggattcgggggttgaaaggacacaagggggaaaaaggcgaagatggcttccctggttttaagggggacataggcgtgaaaggagaccgcggcgaggtgggggtccccggatccaggggagaagacgggcccgagggccccaagggtcggactggtccgaccggtgatccaggtccccccggactcatgggcgaaaaggggaaacttggcgtgcctggcttacctgggtatcccggcaggcaagggccaaaaggttctctggggttccctggctttcctggagcctctggagaaaagggcgcccggggcctttccgggaaatccggccctcggggggaacggggcccaacgggacccagaggacagcgaggccctcggggcgcgactggaaagagcggcgctaaggggactagtggcggggacgggcctcacggcccccccggcgagagaggtctacctggacctcaaggccctaatggatttcccggcccgaaaggaccacctggaccccccggtaaggatggcctgcctggccaccctgggcagcggggagaggtcggcttccaaggaaaaacaggaccacctgggccacccggcgtggtcggaccccagggggctgccggggagaccggccccatgggcgagcgagggcacccaggcccgccgggaccccccggcgagcaaggactgcctggcaccgctgggaaggaaggtactaagggcgaccccggccctccgggtgcaccggggaaagacgggccggcggggctgagaggcttccccggcgaacggggattgcccggaacagccgggggaccagggctgaagggaaatgagggcccatccggccccccaggacccgctgggagtcctggtgaacggggagccgccggctctggagggccaattgggcctcctggccggccgggaccccaggggcctcccggcgctgctggcgagaaaggcgtgcccggcgaaaaggggccaatcgggcccaccgggcgtgacggagtgcaggggcctgtcggcttgccagggccagctggaccccccggggtggcgggcgaggacggcgacaagggcgaggttggcgatccgggccagaaaggaacaaaaggtaacaagggagaacatggcccgcccgggccaccaggaccgattggaccggttggacagcccggagccgcgggcgctgacggcgaaccaggagccagaggaccccaaggccacttcggcgccaagggcgatgaaggcacaaggggatttaacggccctcccggtcccatcggactacaggggcttcccggaccctcaggtgagaagggagagaccggcgacgttggtccgatggggccgcctggaccccccggccctaggggaccagccgggccaaacggagctgacggccctcagggcccgcctggtggcgtagggaatctgggcccacctggcgagaagggtgagcctggggagagcggctctccaggaatccaaggggagcccggtgtcaaaggtcctcgcggcgagcgaggggagaagggagagtctggccaaccaggggaacctggaccacctggcccaaaggggcctacaggcgatgacggtccgaaaggcaaccctgggccggtgggttttccaggagatccaggcccgccaggtgagggcgggcccaggggccaggacggtgccaaaggggatcggggagaagatggagaacccggacagcccggctcacccggccctacaggggaaaacggacccccaggacctttaggtaagcgtgggccagcgggaagccccggatcagagggcagacaggggggaaagggggcaaagggcgaccccggcgcgataggcgcccccggcaagacgggaccagtgggtccagcaggacccgcaggtaagccaggccccgatggattaagaggactgcctggttcggtcggccagcagggcaggccaggggctactggacaggctggcccgcctggccctgtcggcccacctggcctccccggactccggggagatgccggggctaagggagaaaagggccatcccggactgatcggcctaatcggacctcccggtgagcaaggcgagaaaggagatcgaggccttccaggcccacaggggtcccctggacagaagggagaaatgggcattcctggagctagcggccccattggcccaggggggccccctgggctccccggccccgccgggcccaagggcgcgaagggcgcgacgggacctggcggacccaaaggcgagaagggagttcaaggccccccagggcatcctggcccaccgggcgaggtgatccaaccactgcctattcaaatgcccaaaaagacacgaaggtcggtcgatggctccaggctaatgcaggaggatgaagccattccaacgggcggggcacctggatcgcccggcggtctggaggagatcttcggaagtctggacagcctccgagaggagatcgaacagatgaggaggcctaccggaacgcaggatagccccgccaggacatgccaagatctcaagttatgccacccggagttgccagatggtgagtattgggtcgacccaaaccagggatgtgctagggatgccttcagagtgttctgtaacttcactgccggtggagagacgtgcgtcacacctcgggatgacgtgacccagttttcctatgtcgattccgagggcagcccggttggagtggtgcagcttactttcctacgtctgctttctgttagtgcacaccaggacgtcagctacccctgcagtggcgccgcaagggatggccctctgcggctgagaggggccaatgaggacgagttgagtcctgaaaccagtccctatgtgaaagagttccgggatggttgccagacacaacagggcaggaccgtgcttgaggtccgcacccctgtcctcgagcagttacccgttcttgatgcctcattctctgatcttggggctccaccgcggcgtgggggtgtcctgctgggccccgtttgcttcatgggttag

SEQ ID NO: 232506 - DNA, 5133 bp, Artificial Sequence
  derived and/or modified sequence
atggagcgatgttcacggtgccacaggctgctgttacttctgcccctagtcctggggctctccgctgcccctgggtgggcaggtgcgccacctgtcgatgtcctgcgggctctgaggtttcctagcctgcccgatggtgttcgacgcgcgaagggtatatgcccagccgatgtggcctatcgtgttgccagaccggcacagttatccgcccctacccgtcaacttttccctggcggattccccaaagacttttctctgctgactgtcgtgagaacccgtccaggtctgcaagctccactgctgaccctgtattcagctcagggagtaagacaactgggcttagagctcggacgtccagttcggtttctttatgaggatcagacaggacgtccgcagccgccgtcacagcccgtgtttcggggactctcccttgcggacggtaaatggcatagagtggcagtggcagttaaaggccagagtgttacactcatcgtcgactgcaagaaaagagttaccagacctttgcctcgctcggcgagacctgtcctcgacacccatggggtgatcatctttggcgcccgtatcctggatgaggaagtgttcgagggggatgttcaagagctggcgatagtcccaggagtgcaagccgcctatgaatcctgcgaacagaaagaactggagtgcgaaggtggccaacgcgagaggccgcaaaaccagcaaccccaccgagctcagcgttccccccagcaacaaccctctagattgcatagacctcagaaccaagagccacagagtcaagatcctaccccaggcgaggaggaagaaatcttggagtccagcctgttgccgcctctcgaggaagagcagactgatcttcaggtgccaccaacagccgacagatttcaagcagaggagtatggggagggaggtacagacccaccagagggaccatacgactacacctacgggtatggtgacgattatagggaggagaccgagctcggacccgcgttgtcagccgaaacagcccacagtggagcggcggcccacggaccccggggcctgaagggggaaaaaggcgaacccgcggtgcttgagcccggtatgcttgtcgagggcccccctgggcccgaggggcctgccgggctgatcggtccaccaggcatccaggggaacccgggtcctgtgggcgatccaggcgagaggggtcccccaggaagagctggactcccaggaagcgacggtgctccgggtccgccggggacttccctgatgttgcctttccggttcggtagtggagggggcgataaaggtcccgtggtggctgctcaggaggctcaggcgcaggcaatcttacagcaggcgcggctggcccttcggggcccacccggacctatgggatacactggccgccccggtcccttgggacagcccggaagccccggcctgaagggggaatcaggagacctcgggcctcaaggccctaggggtccacaggggctgactggaccgcctggcaaggctggcagacgcggtagggcaggcgcagacggagccagaggcatgccaggcgaccccggggtgaaaggtgatcgtggctttgacggtttacccgggctgccaggggagaaaggtcacagaggcgacactggggcccagggactcccagggccaccgggggaagatggtgaaaggggggatgacggcgagatcggcccaaggggccttcccggtgagagtggacctcggggcttgctgggacctaaaggacctccaggaattccagggccgccaggagtaaggggcatggacgggcctcagggcccgaagggctctctcggcccccagggggagccggggccaccaggacaacagggcacgcctggaacgcagggtctgccgggccctcagggagcaattggcccccatggagagaaaggcccacagggcaagcccgggctgccggggatgcccggcagcgatgggcctcctggccacccaggcaaagagggccctcccgggactaagggaaatcagggtccttcgggacctcagggccccctcggatatccaggtccccggggtgtcaagggcgtggacggcattcgcggcttaaaggggcacaaaggggagaaaggagaggacggcttccccgggtttaaaggcgacattggcgtgaagggcgataggggagaagtcggcgtgccaggcagccggggggaagacggtcctgaaggcccgaagggccggaccggtcctactggggatcctggccccccgggcctgatgggtgaaaagggaaaactgggggtgcctggcctgcccggatatccagggcgccaagggccaaagggaagtttgggatttccaggctttcccggcgcctctggagagaagggggcccggggcctcagtggaaagtcaggccccagaggagaacgcggtcctacaggcccgagaggacaacggggtccgagaggcgctacaggaaaatctggtgccaaaggtacatccgggggcgacggtccccatggaccccccggcgaacgcggattacctggaccgcagggccctaacggatttcccggacccaaaggaccacccggtcccccagggaaggacggcctgccagggcacccaggccagcgaggcgaggtgggttttcagggcaaaacaggtccaccgggtcctcccggagtagtgggcccccaaggcgctgcaggggaaacaggacccatgggagagcggggtcaccccgggccccctgggccacccggtgagcagggcttacctggcacagccggtaaagagggtactaaaggggatcccggccctcccggtgccccggggaaagatggtcctgccggtctgcggggcttccctggcgagagggggctaccggggaccgccgggggacccggtttgaagggcaacgagggccccagcggtcctccgggtccagcaggctctcccggcgaaagaggagccgccggaagcggtgggcccattggccccccaggcaggcccggaccccaggggccgcctggggctgcaggagaaaagggcgttcctggggagaaaggaccaattggacccaccgggcgtgatggtgttcagggccccgtcggccttcctgggcccgccggacctcccggtgtggccggtgaggatggcgacaaaggggaggtcggcgacccaggccagaagggtacgaaaggtaacaaaggcgaacacggccctcctggccctcccgggcccatagggcccgtgggccaacctggcgcggcaggggccgacggcgagcccggagctcgcggtcctcagggacactttggcgcaaagggggacgagggtaccaggggattcaacggacctcccgggcctattggtctgcaggggctacccggtccttccggcgagaagggcgagacaggtgatgtggggccaatgggaccccccgggcctcctggacctcggggcccagctggacccaacggcgcagatggaccacaggggcctccagggggcgtcggcaacctcggaccccccggcgaaaaaggcgaacccggggagagtggctccccgggaattcagggcgagccaggtgtgaaaggacctcgcggggaacgaggcgaaaagggtgaaagtggccagcccggcgaaccgggccccccaggccccaagggccccacgggagacgatgggccaaaagggaaccctggtcccgtgggcttcccaggagatcccgggccccccggagaaggaggccctaggggtcaagacggggccaaaggtgacaggggcgaagacggggagcccggccagcccgggagcccagggcccaccggcgagaacggacctcctggaccactcggaaagagaggacccgccggctcacccgggagtgagggaaggcagggcgggaaaggggctaagggtgatcctggagcaataggcgcccccggcaaaactggaccagttgggccagccggcccagccggaaagcccggtccagacggcttaaggggcctgcccggcagtgtcgggcagcagggtagacctggcgcgacaggccaggccgggccaccaggcccagtcggccctccgggtctacctggcttgaggggagacgctggcgcaaagggggaaaaggggcatcctgggttgatcgggctgatcggccctcctggcgagcagggagaaaagggtgatcgcggattgccaggaccccagggcagtcctggacagaaaggcgagatgggcataccaggcgctagcggtccaatcgggcccggtggacccccgggcctgcctggaccagcggggcctaagggagcgaagggagctactgggccaggcggacccaaaggcgaaaaaggagttcaggggcctcccggacatccggggccacccggcgaagtgatccaaccactgccaatccaaatgccaaagaaaacgaggcgcagtgtggatggaagccggctaatgcaggaggacgaagccatccccacaggcggagcccctggaagtcctggtggactggaggaaatttttggcagtctggacagcctccgtgaagagatcgagcagatgcgccgccccacgggaacccaagatagcccggcacgcacatgccaagatctaaagttgtgccacccggagctgcctgacggggaatattgggtcgaccctaatcaggggtgtgcaagggacgcctttagagtcttctgcaatttcaccgctgggggtgagacttgtgtgacaccgcgtgatgacgttacccagtttagttacgtagactccgaaggctcaccggttggagtcgtgcaactgacattcttacgcttattgagcgtgagtgcccaccaagacgtgagctatccttgctcgggcgccgcacgcgatggaccgctgcggctgcgaggagccaacgaggacgagttatcacccgagacttccccttacgtaaaagagttcagagacgggtgccaaacccagcagggaaggacagttttggaggtccggacacctgtgctggaacagctgccagttctagatgcctccttcagtgatttgggggcgcctcccaggagagggggcgtactcctggggcctgtatgtttcatgggatag

SEQ ID NO: 232507 - DNA, 5070 bp, Artificial Sequence
  derived and/or modified sequence
atggagcgctgtagccgatgtcatcggttactgctattgctgccactggtgctcggcctgagcgcggcacccggttgggcgggagcaccgcctgtagatgtgctgcgagccctgcggtttcccagtctcccggacggcgtccgaagagctaagggcatctgccctgctgacgtcgcttaccgggtggcacgtccagcgcagttgtcggcccccaccaggcagttgttccccggcggttttcccaaggatttttctctattgaccgtggtgcgcacacggcccggactccaagccccactactcacattgtattccgcgcagggagtgcggcaactgggactggagctcggtcgcccagtgaggttcttgtacgaagatcaaaccggccggcctcagcccccctcacagccagttttccgcggactttctttagctgacggaaaatggcaccgcgtggctgtagctgttaaagggcagtcagtgaccctgatcgtcgactgtaaaaaacgggtcactcggccgcttcccaggtccgcacgcccggtgttagacacacatggtgtaatcatcttcggcgcgagaattcttgatgaagaagtctttgaaggggacgtccaagaattggcaatagtgcccggtgtgcaggctgcttatgagtcctgcgagcaaaaggagctggagtgcgagggcgggcagcgggaacggccccaaaaccagcagcctcacagggcccagcgctctccacagcagcagccttcacgcctgcatcgcccacaaaatcaggagccacagtctcaggaacagactgatctgcaggtgccacccactgccgacagattccaggcagaggaatatggggaaggcggcacagacccacctgagggaccttatgattacacctatggatacggcgacgactacagggaagaaactgagctggggcccgctctgtccgcagaaaccgcccatagcggggccgctgcccacgggcccaggggactgaagggggaaaagggggaacctgcggtgctggagcctggtatgttggtggagggcccaccagggcccgaaggcccagccggcctaattgggcctccaggcatacagggcaacccgggaccagtgggtgaccccggcgagcggggaccaccaggtagggcagggttgcctggaagtgacggcgctccggggccaccaggtaccagcctcatgctccccttccggtttggtagtggaggcggggacaaaggccctgtagtggccgcgcaggaagcccaagcccaagctatactgcagcaagccaggctggcactccgaggtccacctgggcctatggggtacacaggccgccccggccccctcggacaacctggatcgcctgggctcaagggggagtctggggacctgggaccccagggacccagggggccacagggacttaccggcccgcctggaaaagcaggaagacgtgggagagccggcgccgacggcgccaggggaatgccaggggaccccggggttaaaggggacagaggcttcgacggcctgcctggattaccgggggaaaaagggcatcgaggcgataccggcgcccaagggctccccggtccaccaggggaggatggcgagcggggggatgatggcgagattgggccacgcggtctgcctggtgagagtggtcccagaggcctactgggccccaaggggccacccggaatacctgggccacctggtgtgagaggaatggacggaccccaaggacctaaaggtagcctgggaccccagggtgagccgggcccaccaggacagcagggtacacctggtacccaggggctccctggaccgcagggcgcgatcggcccccacggcgagaaagggcctcaaggcaagcccgggctgcctggaatgcctgggtcagacggaccaccagggcatcccggaaaggagggacctccagggacaaagggaaatcagggaccctcgggccctcaagggcctctaggctaccctggccctcgtggggtaaaaggcgttgacggtatcaggggtttgaaagggcataaaggagaaaaaggtgaagatggctttcctgggtttaagggcgacattggcgttaaaggagatcgcggggaagtgggcgtgcctgggagccggggagaagacgggcccgaaggtcctaaaggaaggactggccctacaggggaccctggcccaccggggctcatgggagaaaagggaaaactcggtgtgcctgggctgccggggtatccaggccggcaaggcccgaagggttccttgggattccctggatttcccggagctagcggcgagaaaggcgcccggggactgtctggcaaaagcggccctagaggcgaaagaggcccaactggtcctcggggtcagcggggccctaggggggccactggtaagagcggtgcaaagggcacgtccggcggtgacgggcctcatggcccccctggggagagaggactccctggtccccagggccctaacgggtttcctgggcctaaaggtccactagggccacccggcaaggacggtctgcccggtcacccagggcaacggggcgaggtgggattccaaggaaagacgggccctccgggtccgccaggagtcgtgggtccgcaaggagcagcaggcgaaacaggtccaatgggcgagagggggcaccccggtcctccaggcccacctggcgaacagggcctgcccggcactgcaggcaaagagggcacaaagggcgatcccggcccaccaggcgcacctggtaaagatgggccagcgggacttaggggtttccctggggagaggggtctccctggcactgctggtggaccagggctaaagggtaacgaaggaccatctggccccccgggcccggccggctctcccggggagcgcggcgcggctgggagcggaggacccatcggaccccctgggcggcccgggccacaagggccccccggcgccgcaggtgagaagggagtcccaggtgaaaaaggccccataggtccgacgggcagagatggggtgcaaggcccagtgggcctcccaggccccgccggccctcccggagtggctggtgaagacggagataagggagaagtcggcgacccggggcaaaagggcactaaaggcaataaaggggagcacgggccccccggtcccccagggcctattggccccgtaggccagcccggagcagctggcgcggatggcgaacctggggccagggggcctcagggtcatttcggcgccaagggagatgaagggactagaggattcaatgggccccccgggccaattggacttcaaggtctcccggggccatctggtgagaaaggagagaccggtgatgtgggccccatggggccacctggccctcccggtccacgcgggccggctgggcctaatggggcagatggtcctcaaggcccgcccggtggggttggtaatctcggaccccccggtgaaaagggcgaacccggggagagtggcagccccggcatccaaggtgagcccggagtcaaggggccaagaggtgagaggggcgagaagggggagagtgggcagcccggcgagccaggaccaccaggtcccaaagggcccacgggggatgatggtcctaaggggaatccagggcccgtcggtttcccaggcgatcccgggccaccgggtgaaggcggcccccgcggacaggatggtgctaaaggcgaccgcggggaagatggagaaccgggacagcccgggtctccgggtcctacgggagagaacggcccgcctggacccctggggaagcgaggtccagctggctccccagggagtgagggtcgtcaaggggggaagggagccaaaggagatcctggtgccatcggagctccgggcaagaccggcccagtcggacctgccggccccgccggcaagcctggccctgatggccttcgcggtctgccgggctcggtcggtcagcaaggtagacctggagccacaggccaggcaggccctccagggcctgtgggcccacctggcttgccggggctaaggggcgatgcgggtgctaagggcgagaaggggcaccccggtttgattgggctgataggacctccaggcgagcaaggggagaaaggcgaccgcgggctgccaggcccacaggggtctcctggccagaaaggtgaaatgggtattcctggagcgagcggccccatcgggccgggggggcctccgggcttgccaggacctgccggcccaaagggtgctaaaggcgccaccggaccagggggacccaagggggagaagggcgtgcagggccctccgggtcacccaggcccaccaggggaggtgattcagcctctgcccattcaaatgcccaaaaagacgcgacgctctgtagacgggtcacggttgatgcaggaagacgaggccattcccacagggggcgccccgggatctccaggaggcctcgaggagatctttggctctctggattctctgagagaagaaattgagcaaatgaggcggccaactggcactcaagattcaccagctcgtacctgtcaggacttgaagctttgccatcctgaattacccgacggcgagtattgggtggatcccaaccagggatgcgctcgagatgcattccgggttttttgtaatttcactgctgggggagaaacatgcgtgaccccaagggatgatgttacgcaattttcatacgttgatagcgaaggctcaccagtcggagtcgtgcagcttactttcttgaggcttctatcggtgtctgctcatcaggatgtctcctacccatgctctggtgcagccagagacggccctctgcggctccgcggcgccaatgaggatgagctgtctcccgaaacttccccctatgtgaaggaattcagggatgggtgccaaacacagcagggaaggactgtgctcgaggtgcggacccctgtgctggagcaacttccagttctggatgcttctttctctgacttgggcgcacctcctaggcgcggcggcgtcctccttggaccagtctgttttatgggctag

SEQ ID NO: 232508 - DNA, 5211 bp, Artificial Sequence
  derived and/or modified sequence
atggagagatgcagtagatgccaccgactgttgctgctcttgcccctcgtgctgggccttagcgccgcacccgggtgggctggcgccccaccagtggacgttttgcgcgctttgcggttcccctctctgccggatggggtgcgccgggccaaggggatctgtcccgcggatgtggcctaccgcgttgccagacctgctcagctgagcgcccctacccggcagctgttccccgggggctttccaaaagacttttccctgctgactgtcgtccgcacacgaccaggcctacaagctccacttctcaccctatacagtgcacagggagtgcgccagctgggcttagagctcggcagacccgtgcgctttctgtacgaggaccagaccggccggccccaacctccgtcccaaccagtctttcggggtttgtccttagccgacggtaagtggcaccgggtggccgtggccgtcaaggggcagagtgttactctgattgtggactgcaagaaaagggtgacccggcctcttccaagatctgcgcgcccagtcctggatacacatggggtcataatctttggcgcccggatactcgatgaagaggttttcgagggtgacgtacaggaactcgccatagtgcccggtgtgcaggcagcctatgaaagctgcgaacagaaagaactggaatgtgagggcggccaacgtgagagacctcagaaccagcagccccaccgggcacagcggagcccacaacagcaaccttcacgactccatcggcctcagaatcaggaaccgcaatcgcaacccactgaatctctgtactacgactacgaacctccctactacgatgtgatgaccacaggaactacaccggactatcaggatccgactcccggggaggaagaagagattctagagagcagtctgttgcctccgttggaggaggagcaaactgatctccaggtacctcccacagctgatcgcttccaggctgaggagtatggagaggggggaaccgatcccccagaaggaccttatgattatacctatggatacggcgacgattacagggaagaaaccgagctggggcctgctttgtcagctgagaccgcccactctggggccgcagcacacgggccgaggggcctcaagggcgagaagggtgagccagccgtcttggagcctggcatgcttgtcgagggaccgccgggtcccgaaggtccggccgggctcatcggcccaccagggatccaggggaaccccgggcctgtgggcgaccctggagaaagggggcctccagggcgtgcgggtctgcccggatccgacggggcccccgggccccctgggacaagccttatgctgcccttcagattcggatcagggggaggcgataaaggccctgtggtggccgcgcaggaagctcaggcacaagcaatcctccagcaggctagactggctctgagaggcccccctggccctatgggctacacgggacgccccggccctcttgggcaacccggcagcccagggctgaagggcgagagtggcgacctcggtccgcaggggccacgagggccacagggtctgactggccccccaggtaaagcagggcgtagggggagagctggagcagacggagctagaggaatgccgggggaccctggggtgaagggtgaccgcgggtttgacggactgccaggcttgcctggggagaaagggcacagaggagacacaggagcacaggggctccccgggccaccgggagaagacggcgagcggggggacgacggtgaaatcggacctcggggattacctggagaatccggacctcgcggacttctcggcccaaaagggcccccggggatccccggccccccaggcgtacgaggcatggacgggccacagggccctaagggctctctcgggccacaaggagagcccggccccccgggtcagcaggggacccccggaacccaggggcttcctggaccacaaggagcgatcgggcctcatggcgagaagggccctcagggcaaacccggtctgcccgggatgcccgggtctgacggtcctcctggtcatcccgggaaagaaggccctccagggactaagggcaatcagggcccttcagggccgcaggggcccttgggctatccgggtccgcgtggcgtcaagggggtcgacggaattcgcgggcttaaggggcacaaaggagagaagggagaagacgggtttccgggattcaaaggcgatatcggcgtgaagggggacagaggagaggttggggtgcccggcagcaggggcgaggatggacctgaagggccaaaggggagaaccggaccaaccggcgatcctgggcctcctggcttgatgggcgagaagggtaagctgggcgtgcccggactccccggatatccagggagacaggggccgaaaggtagccttggcttccccggattccctggagcatctggggagaaaggcgcccgcggcctgagcggcaagtctggaccgcggggggaaaggggcccaactggacccagaggccaacgtggacccagaggcgccactgggaaaagcggcgctaaaggtacatctggtggggatgggccccacggccctcccggcgaaagaggcctgcctgggcctcagggccctaacggcttccctgggccgaaggggccactgggtcccccagggaaagacggcctgcccggacacccgggacagcggggagaagtcggttttcagggcaagacagggccaccaggacctcctggcgtggtcgggcctcagggcgctgccggcgagacgggtcctatgggagaacgcggtcatccaggaccccctggcccgccaggagaacagggactgcccggaaccgccggtaaggagggcacaaaaggggatcccggccccccaggagcccccggcaaggacggaccagcggggcttagggggtttccaggagagagaggcctgccgggcaccgccgggggaccagggctgaaaggcaatgaggggccgtccgggccccctggaccagcgggatctcccggtgaaagaggggccgcaggctcaggcggcccaatcggtcccccaggtcgcccaggccctcagggacctcctggagcggccggcgaaaagggcgttccgggtgaaaaaggtcccatcggcccgactgggcgcgatggtgtgcaggggcccgtaggattaccaggcccagctggcccacccggcgttgctggcgaggacggtgataagggcgaggtgggcgaccccggccagaaggggacaaaaggcaataaaggggagcacggaccccctgggccacctgggccaatcggccccgtcgggcagcctggagccgccggcgcagatggagagcctggggcaagaggaccgcaaggccacttcggagccaaaggcgacgagggaactcgtggcttcaatgggccaccagggcctattgggctccaaggcctgccggggccatcaggggagaagggcgagaccggggatgttggtccaatgggacctcccggacccccaggccctaggggtcccgccggcccaaatggcgctgatgggcctcagggcccccctggcggtgttgggaacttgggcccaccaggcgagaaaggggagccaggagaatcaggtagtcccgggattcagggcgagcctggtgtgaaggggccacgtggtgagcgcggagaaaagggcgagtctgggcagcccggggagcctgggcctccaggccccaaaggtcccaccggagacgatgggcccaaagggaatcccggtccagttggatttccaggggatccaggacctcctggcgagggcgggccaagaggccaggatggagcaaagggagaccggggcgaggacggcgagccaggccagcccggttcacctggacctacaggagagaacggacctcctggcccactgggaaaacgcgggcccgccggaagccccgggtccgagggccgtcagggtggcaagggagcaaagggcgaccccggcgctatcggtgccccgggcaaaacaggacctgttgggccggccggcccggccgggaaacccggccccgatggactgcgtggactcccaggatcagtgggtcaacagggaaggcccggtgcgaccggccaggcaggcccgcccggtccagttggaccccctggtttgccaggactgaggggggatgccggcgccaagggtgaaaagggacacccagggctgatcggactcatcgggccccccggggaacagggagagaagggtgaccgcggtctgccaggccctcaaggctcacccggccagaagggtgaaatggggatccctggcgctagcggacctatcggacctgggggtccacctggtctcccagggcccgccggcccgaaaggagcaaagggggcaacagggcccggaggtcctaaaggcgagaagggtgttcagggtcctcctggccacccaggccctccaggagaggttatccagcctctccccatccagatgcctaaaaaaaccagacggtctgtggacggtagtagactaatgcaagaagacgaggctataccgaccggaggggctcccggaagcccaggcgggctggaagagatcttcggatcactagattcacttagagaggaaattgaacagatgaggcgcccaaccggaacacaggattccccggccaggacctgtcaggacctcaaactctgtcatcccgaactacctgacggagagtactgggtcgatccaaatcagggttgcgcccgcgacgcctttcgggtgttttgcaacttcactgcggggggcgagacgtgcgtgacccctcgagatgacgtgactcagttttcctacgtcgattcggaaggatcccctgtgggagtagtgcaactgacgtttctcagactcctgtccgtgtcggctcaccaggacgtgagctatccatgcagcggtgccgcaagggatggaccccttaggttgcgaggagctaatgaagatgaactcagtccagaaacttccccctacgtgaaggaatttagggatgggtgtcaaactcagcagggtcggactgtgctggaagttagaaccccggttctggaacagctacctgtcctagacgcttccttctccgatctaggggctccgccccgtcgcggaggggtattattgggacctgtgtgttttatgggttag

SEQ ID NO: 232509 - DNA, 5211 bp, Artificial Sequence
  derived and/or modified sequence
atggagcggtgtagcaggtgtcacaggctcttactcctgctccccctggtgctggggctgtccgcggctccaggttgggctggcgcgccgcctgtggacgtgttgcgggctttgcggttcccctcgcttcccgatggggtaaggagagctaaggggatctgccctgcagatgtggcatatcgagtggcccgacccgcccagctcagcgctccaacgaggcagttatttcctggcggcttcccgaaagacttctctcttctaactgttgttcgcacccggccaggacttcaagccccacttctcactttatactccgcccagggcgtccgccagcttgggctggagcttggacggccagtgcggtttctgtacgaggatcagaccggacggcctcaacctccctcccagcctgtgtttcggggactgtccctggccgacggaaaatggcacagagtggctgtggcggtgaaaggccagagcgtgaccctgattgtggactgcaagaagagagtcacccggcccctcccaagatccgcccggccagtgctggacacacatggggtgatcatcttcggggcacggatcttagacgaggaggtctttgagggtgatgtgcaagaactggctatcgtgcccggagtgcaggccgcatacgagtcatgtgagcagaaagagcttgaatgcgaggggggtcagagagagcggccgcagaatcagcagccacatcgggcacagcgcagccctcagcagcagccttcacgactgcacagaccacagaatcaggagccacaaagccagccaacagagtcgctctactatgattataaacctccctattacgacgtgatgactacaggcacaacccccgattatcaggatcctacacccggagaggaggaagaaatcctggagtccagcctcttgccacccttggaggaggaacaaacagacctgcaagtgccccccactgcggataggtttcaggctgaagagtatggcgaaggaggcacagaccctcccgaggggccttatgactatacatatggatatggcgatgattatcgcgaggaaaccgagctggggcccgcacttagtgccgagaccgctcatagtggtgccgccgcccatggaccccgtgggcttaaaggggagaagggggaaccagccgtattggaacctggcatgttggtggaaggtccgcctggcccagagggtcctgccggcttaatcgggcctccaggaattcaggggaaccccgggcccgtcggggaccctggagaacggggtccgcccggacgagcgggtctgccgggcagcgatggagcccctggtccaccgggcacatctctgatgttgcctttccgctttggcagcggaggaggcgacaaagggcccgtcgtggccgctcaggaggcccaggcccaagcaatcctccagcaagcgcgactggctctgcgggggccccctgggcccatgggctataccggcagacctggcccgctggggcagcctgggagccctgggcttaagggagaatcgggcgacctgggcccacaagggcctagaggaccccagggccttaccgggcccccgggtaaggctgggagaaggggtcgcgccggcgctgacggagctcgcggaatgcccggagatccaggggtgaaaggcgatcgaggctttgatgggctccccggattgcctggcgagaaaggccatcgcggagatactggagcgcagggcttaccgggacccccgggcgaggatggggaaagaggtgacgatggggaaattggcccaaggggattgcccggtgaaagcggcccaagaggtcttctcggacctaagggaccaccggggatcccaggtccgccgggcgtccgtgggatggatggtccccaaggccccaaaggatcattggggccccagggggaacctgggccccctggacagcagggaactcctggcactcagggccttcctggccctcagggcgcaatcgggcctcatggggaaaaagggccccaaggcaaacctggccttcccggcatgccagggtccgacgggcctccgggtcatccaggaaaagaaggtcctccgggtaccaaaggcaaccagggcccttccggcccgcaggggcccctcggctatcccggaccaaggggagtgaaaggagttgacggtattcggggtctgaagggtcataaaggagagaagggcgaggacggctttccgggttttaagggcgatatcggggtgaaaggcgatcgtggtgaggtgggggtgccaggatccaggggtgaggatggtccagaaggacccaaagggaggaccggaccaactggggaccctggaccacctggcctgatgggagaaaagggtaaattaggggtgcctggcctcccaggatacccagggcggcagggtcccaaggggagcctgggcttccccgggtttccgggtgcatccggagaaaagggcgccagaggcctgagcggcaagtccggtcccaggggggagagagggccaaccgggcccaggggccaacggggccctcgcggggctacgggcaagtccggcgctaaaggaacatctgggggcgacggtccacatggcccaccaggcgaacgcggattgccagggccacagggcccgaatgggttcccaggaccaaaaggccctcccggcccaccgggcaaggacggactgccagggcacccaggacagagaggtgaagtggggttccagggaaaaacagggccacccggcccgccaggtgtggtggggccacagggtgctgccggagagacaggtcctatgggtgagcgcggtcacccgggtccacctggccccccaggcgagcaggggctgccgggtaccgccggaaaggaaggcaccaagggcgatccgggcccaccaggcgctcccggaaaagatggacctgccggccttcgaggcttcccaggagaacgcggactacccggcaccgctggtggtcctggacttaagggtaacgagggtccttccggaccccccggaccggcaggatcccccggagagcggggcgctgctgggtcaggcgggcctatcggtccccccggaagacccggacctcaggggcctcccggtgcagctggggagaaaggtgtgccaggcgagaagggcccaattggtcctactgggcgggatggggtgcagggacccgtgggtctcccagggcccgccggaccccctggcgtggctggggaggacggcgacaagggagaagtcggagacccaggacaaaagggaactaaaggcaacaaaggagagcatggccctcctggtcctcctggcccgatcggcccagttgggcaacctggcgcagctggggccgacggggagcctggagctcggggaccacagggtcattttggagctaagggggatgagggaacacgaggcttcaacgggcctcccggtcctattggcctccagggcttgcctggcccttccggggaaaagggcgaaacaggcgatgtgggacccatgggtcctccagggcccccgggacctagaggcccggcaggacccaacggcgccgacggcccccagggcccgccggggggagtcggcaacttgggaccccctggagagaagggagagcccggggagtccggtagtcccggaattcaaggcgagcccggggtaaagggacctagaggagagaggggggagaagggggaaagcggccaaccaggcgagccaggcccacccggtccaaagggccccaccggggacgatggaccaaaaggcaaccctggacccgtagggttcccaggtgaccccggacccccaggcgagggaggtccaaggggccaggacggtgcgaagggcgataggggcgaagacggggagcctgggcaacccgggtcccctggccctacaggagaaaacggaccacctggcccactggggaagaggggacctgctgggagccccggctccgagggtcgccaaggaggaaagggcgctaagggagaccccggggcgattggggcccccggtaaaacaggcccagtggggccggctgggcccgcgggcaagcctggtccggacggccttagaggcctgcctggaagtgtcggacagcaaggcaggcctggtgccacaggccaggctgggcctccggggcccgttgggcctccaggcctcccaggccttagaggagacgctggcgctaaaggagaaaaagggcacccagggctcatagggctgatcggccctcctggcgagcagggcgagaaaggggatagggggctgccgggccctcaagggagccccggtcagaaaggcgagatgggcattcccggcgcctccgggcctatcgggcccggcgggccgcccgggctacccggaccagctggcccgaaaggtgccaaaggagcaaccgggccaggcggcccgaagggcgagaagggtgtccaggggccacctggacaccccgggccaccaggtgaagtgatacagcctcttcccatccagatgccaaaaaaaacgagaagaagcgtagatggctcgcgcctgatgcaggaggacgaggccatacccactggaggcgccccaggatcgcccgggggactggaggaaatattcgggtccctagattcccttcgcgaagagattgagcagatgagacgccccacaggaacacaggattctcccgctcgcacctgccaggacctgaagctctgccatccggaattaccagatggggaatactgggttgaccctaaccagggctgcgccagggacgcgtttcgagtcttctgtaacttcacagccggtggcgaaacttgcgtaacccccagggacgacgtgacgcagttttcgtatgtcgactcagagggatctcctgtgggggtggtgcagctgactttcttgcgcctcctgtcagtgtccgcacaccaggatgtgtcatatccgtgcagtggagctgctagagacggacctctgcgacttaggggcgcgaacgaggacgagctgagtcccgagacaagcccctacgtgaaggagtttcgcgacggctgtcagacacaacagggcaggactgtgctcgaggtgagaacgccagttcttgagcagcttcctgtcctagatgcctccttcagtgacctcggtgcgcccccacgcagagggggcgtgctgttaggacccgtttgctttatgggttag

SEQ ID NO: 232510 - DNA, 5211 bp, Artificial Sequence
  derived and/or modified sequence
atggaacggtgctctagatgccatagacttctcctcctgctaccgctggttctcggcttatctgccgctccgggctgggctggtgccccaccagtcgacgtcctcagagccctgcgcttcccatcactgccagacggcgtaagaagggccaaaggaatctgccccgccgatgtcgcttacagagtggcgaggccggctcaactgtcagcccccacgagacagcttttccccgggggttttcctaaggatttcagtctcctcaccgttgtcaggacaagacccgggctgcaggcaccactgctcactctgtacagcgcccagggtgtgagacaattggggttggagctgggtcgacccgtgaggttcttatacgaagatcaaactggccgcccccagcccccctcccagcccgtattccgtggcctgtcgcttgccgacggcaagtggcaccgggttgccgtggctgttaaaggacagagcgtcacactaatcgtagactgcaagaaaagagttacacggccgcttcccagatccgctcgcccagtgctcgatactcacggagtcataattttcggggctcgcattttagatgaggaggtctttgaaggtgacgtgcaggagctggcaatcgttcccggcgtgcaggccgcctacgaatcatgcgaacagaaagaactggaatgtgaaggagggcagagagaaagaccccagaaccagcagccacatcgtgcccagagaagcccgcaacagcagccatccagactgcaccgccctcagaaccaggaacctcaatcccagcctactgagagtctctattacgactataagcccccatattacgatgtgatgacaacaggcactactccagattatcaggaccctacacccggcgaggaggaagaaatactggaatctagcctgctcccgcctctcgaggaagaacagaccgacctgcaggtaccccctactgccgatcggttccaggcggaggagtacggcgagggcgggactgaccccccagagggaccttacgattatacatacggctatggcgatgactatagggaagagacagagctggggcctgctctgtcagcggagaccgcccatagcggggccgctgcccacggaccacgaggactgaagggtgagaaaggcgagccagccgtcctcgagcccggtatgctggtggaaggacccccggggcctgaggggcctgccggtctgatcgggccccccggaattcagggcaatccaggaccagtgggagatccgggcgaaagagggccacctgggcgggcggggctgccagggtcagatggggcccccgggccacctggcacttccttgatgctgccattcaggtttggaagtggaggcggtgacaaggggcccgtcgtggctgcccaggaggcacaggcacaagctatactccagcaagctagacttgcactgagaggcccaccagggcctatgggttacacaggcaggcccgggccactggggcagcccggctcaccggggctcaagggcgagagtggtgatcttggcccacaggggccccgggggcctcagggcctcactggaccacccggcaaggccgggcggcgaggacgcgctggagccgacggagcacgggggatgcccggggaccctggagtgaagggcgatcgcggatttgatgggctccccgggctccccggagagaaaggccatcgtggtgataccggagctcaagggctgcccgggcctcccggggaggacggggaacggggtgatgacggggaaataggccctaggggcctccccggcgagtcagggcctaggggtcttctcggccccaaaggccccccaggcattccaggacccccaggcgtcagaggcatggacggacctcaggggccgaagggatccctgggaccacagggggaacccggccccccaggtcagcaggggacccctgggacgcagggactcccgggcccacagggtgctatcggcccgcatggggagaaaggcccacaaggcaaacctggattgcccggcatgccggggtccgatgggccgcctgggcaccccggcaaggaaggtccccctggcaccaagggcaatcagggcccttccggaccacaaggcccactggggtaccccgggcccaggggagtgaagggggtggatggtatcagaggactcaaagggcataaaggcgaaaaaggagaggacgggttccctggatttaagggggatatcggtgtcaaaggtgatagaggggaggtgggagtgcccggaagccgaggtgaagatgggccagaaggccctaagggccgtaccggacccacaggcgatccagggcctcctggattgatgggagaaaaaggcaaactgggagtccccggcttacccggctaccctgggagacaaggacctaagggctcactggggttcccggggtttccgggggcctcgggggagaagggcgcaagggggctgagcgggaaaagtggccctcgcggagagcgtggaccgaccgggccccgcggtcagagaggcccacgcggtgctactggcaagtcaggggcaaaaggtacctcaggtggggatggtcctcacggcccccctggagagcgcggactgcccgggcctcagggccctaacggcttccccgggcccaaaggtccgcccgggccccctggcaaagatgggttaccgggacacccagggcaacggggcgaggtgggcttccaaggcaaaacaggccccccagggccaccgggggtcgttggtccacagggggcagctggagagacaggccccatgggggaacgcggtcatcccgggcctcctgggccacccggtgagcagggcctgccggggaccgctggtaaggagggcacaaagggggaccctggtcctccaggtgcgcctggcaaggacgggcctgccggtctgcggggctttccaggagaacgaggacttccgggtacagccggaggaccaggcttaaagggcaacgagggccccagcggccctcctggacctgcaggaagcccgggagagaggggagctgccggctcaggtgggccgatcggcccccctggccgaccagggccccagggccctccgggcgctgcaggcgagaaaggcgtccctggcgagaaagggccaatagggcctacagggagggacggggtgcagggcccagtgggactacccggccccgcagggccccccggggtcgctggggaggacggagacaaaggggaggttggggacccaggtcagaaaggcactaaaggaaataagggcgagcacggcccacctggacccccgggccccattggacctgtgggtcaaccaggtgccgccggcgccgatggcgaacctggagcacggggaccacagggccatttcggagctaaaggagatgagggaacgcgtggtttcaatggccctccagggcccatcgggcttcagggtttgcccggtccctccggcgagaaaggcgaaactggggacgtcgggccaatgggtcctccagggcctcctggcccaaggggccccgccggacccaacggcgctgacggccctcagggcccacccggaggggtgggaaatctgggaccccctggcgagaagggcgagcctggcgaatcaggctcccctggtatacagggggagcctggagtaaagggtcccaggggcgagcgaggcgaaaaaggggaatccggccaaccaggtgaacccggccctcccggccccaaaggtcctacgggggatgatggcccaaaagggaacccaggcccagtaggtttccccggggatcctggcccccctggtgaagggggcccgcgcggccaagacggcgccaaaggtgatcggggagaggacggcgagcccggtcaacctgggagtccaggccccaccggcgaaaatgggcctccaggccctctgggtaagcgaggccccgctggctctcctggttccgaagggcgccagggtggcaagggagccaaaggcgatcctggcgctataggggccccagggaagacagggccagtgggcccggcagggccggcaggcaagcctggtcctgacggactccggggccttcctggcagcgtggggcagcagggaaggcctggcgccaccggtcaggcaggccctcccgggcccgtaggcccgccaggcctccccggcctgaggggagatgccggtgccaaaggtgagaagggacaccccggactgatagggctaattgggcccccaggtgagcagggggaaaagggtgatagagggctccccggtccacagggcagccctgggcaaaagggagagatggggatacctggagccagcggtcccatcggccccgggggccccccaggcctcccgggacctgccggcccaaagggcgctaagggggccactgggcctggcgggccaaaaggcgagaaaggagtgcaggggcctcccggtcacccaggcccccccggcgaagtgatacagccccttcccattcagatgccaaagaaaaccagaagatcggttgatggatctaggcttatgcaggaggatgaggccattcccacaggaggagcacctggttcacccgggggactggaggaaatttttggctccctggattcgctgcgcgaggagatcgagcagatgaggcggcctacagggacccaagacagccccgccagaacctgtcaggatctcaagctatgtcatccggaactgcctgacggcgaatactgggtggatccgaatcagggttgtgccagagatgcttttcgcgttttctgcaactttacagccggcggcgagacctgcgtcactcctcgggatgacgtcacacagttcagctacgttgatagtgagggttccccagtcggagtcgtgcaactaaccttcctccggctgttatctgtttcggcgcaccaagacgtgtcatacccatgcagtggggctgcacgggacggaccgctgcgactgcggggagccaacgaggacgagctgtcaccagaaacctcaccctatgtgaaggagttcagggatggttgccaaacacaacaggggaggacggtgctggaagtgaggacaccagtattagagcagctgcctgtgctggatgcgagtttcagtgatctcggcgcccctccgcggcgaggtggcgtgttgctggggcctgtctgcttcatgggctag

SEQ ID NO: 232511 - DNA, 5070 bp, Artificial Sequence
  derived and/or modified sequence
atggagaggtgtagccgctgccatcgactgctgctgcttctgcctctggtcctcgggttgtccgcagcccccgggtgggccggggccccacctgtggatgtattacgcgctttacgtttcccgtcattgccggacggcgttagacgcgcaaaagggatttgccctgccgatgttgcttaccgggtcgcaaggcccgcccagttaagcgctcccaccaggcagctctttccaggtggcttccctaaagatttctcccttctgactgtggtacggactaggcccggcttgcaggcccccctcctcacactctacagtgcacaaggggtccgccagctgggtctggagctaggtagaccagttagatttttgtacgaggaccagaccgggcgacctcagcctccttctcagcccgtattcagggggctgagcttagctgatgggaagtggcatcgagttgctgtagcagtcaaaggccagagcgtgacacttatcgtagactgcaaaaagagagtgactagaccactgccccggagcgcccggcccgtgctcgacacgcacggcgtgatcatattcggggcaaggatcttggatgaagaagttttcgaaggggacgtgcaggaactggcaatcgtgcctggcgtacaggcagcgtacgagagctgtgaacaaaaggagctggaatgtgagggaggccaacgcgaacgcccacagaaccagcagcctcatcgcgctcagcgctctccgcaacaacagccaagcaggctgcacagaccccagaatcaggaacctcagtctcaggaacaaaccgaccttcaggtgccacccacagctgacaggttccaggcggaggaatatggcgaggggggaactgatcccccggagggcccttatgattatacttacggttatggagacgattaccgggaagagactgagctaggaccagccctgagcgctgagacggcccactctggggccgccgctcacggccccaggggccttaaaggcgagaagggcgagcccgctgtgctggaacctggcatgctggtggagggcccgccgggtccagaaggtccagcaggactcatagggccacccggtattcaggggaatccaggtcctgtgggggatcccggcgagaggggcccccctggccgggccggcttgccgggtagcgacggcgcccctggcccccccggaacctctctgatgctgccatttagattcggctctgggggcggcgacaagggccctgttgtcgccgcccaggaagcgcaggctcaggctattcttcaacaggctcgccttgcacttcgggggccaccagggccaatggggtataccggtcgccccggcccgctgggccagcctgggtcaccaggcctgaagggagagtctggtgatctgggaccccagggcccccgcggtcctcagggccttacgggacctcccggcaaggccggccgccgggggagggctggggccgatggggccaggggcatgcctggtgacccaggggtgaagggtgacagagggtttgatggcttacctggtctgccgggagaaaagggccacaggggcgatacgggagcccagggcctgcccggacctcccggggaggatggggagcggggagatgacggagagatcggaccgcgcggcctgcccggcgaaagcggaccacggggactgcttgggcctaaaggccctccagggatccctggaccgcccggcgtcaggggtatggacggaccccagggccctaagggcagtctgggacctcagggggagccaggcccacctgggcagcagggtacaccaggaacccaggggttgccagggccccagggcgccattggcccccatggggaaaagggtccacagggcaagcccggtcttccagggatgccaggttcggacggcccacccggccatccagggaaagaagggccacccgggactaaaggaaaccagggaccctcaggccctcagggtccgctgggatatcctggacctaggggcgtgaagggggtagacggaatccgaggcttaaagggtcacaaaggcgaaaagggcgaagacgggttccccgggtttaagggcgacatcggagtcaagggggaccgcggcgaagtgggagtccctggcagtcgtggcgaagacgggcctgaaggccccaaaggtcgcaccgggcctaccggtgaccccggcccgccggggctgatgggggagaaaggaaagctgggcgtacccggtctccctggttaccccgggcgacagggcccaaagggatccctgggatttccaggtttccccggggcatctggagagaagggggcgcgggggctctctggcaagagcggcccacgcggcgaaaggggtcctacgggtccccgcggccagcgtggcccaaggggagcaacaggaaagtccggagctaaggggaccagcggaggagatggtccccacggacccccaggcgagcgtggattaccaggccctcagggacctaacggctttccagggcctaaggggccacctgggccaccaggcaaagacggattgcctggccacccgggacagagaggtgaggtaggatttcaaggaaagaccggtcctccagggcctccaggcgttgttggcccccagggcgctgcaggtgaaactggcccaatgggcgagagaggacaccccgggccgcctggcccccctggagagcaaggtttacctggaaccgcggggaaagaaggtactaaaggggacccaggacctcccggcgctccaggcaaagacggcccagcagggctgagaggatttccaggcgaacgaggtctgccaggaacagccggcggacccggactgaagggtaacgaaggccccagtgggcctcccggcccagccggttcaccaggcgagaggggcgccgccggatcaggcggcccaattggccctcctggacgtccagggccccagggcccgccgggggccgctggagagaaaggcgtcccaggcgaaaagggccccatcggtcctacaggacgcgatggtgtgcagggaccggtagggctgccaggccccgctggcccgcctggcgtggcaggagaagatggtgacaagggagaggtgggtgatccgggacagaagggaactaaaggaaataagggcgagcacggccctccgggaccacccggaccaattggcccagtggggcagccaggcgctgcaggcgccgatggggagcccggtgctcgcggcccacagggacatttcggggcaaagggagatgagggcacccgcgggttcaacggacctcccggcccaattggactgcagggtttgcctggccccagcggcgagaagggcgagaccggggacgtgggacccatgggacccccagggccacccgggccccggggaccagccggccctaatggcgccgacggaccgcagggcccgcctggaggcgttggaaacttgggtccacccggagagaagggggagcccggcgagagcggctcaccgggaatccagggcgaacccggagtcaagggccctcgtggcgaaaggggtgagaagggtgaatccggccaaccaggcgagccagggccccctggtcccaagggacccaccggggacgacggacccaaggggaatcctggccccgtaggcttcccaggagatcctggaccaccaggagagggtggcccccgaggacaggatggggccaagggagaccgaggggaagacggggagccaggtcagccgggcagcccgggccctacaggcgagaatgggccccctgggcccttgggaaaaagaggtcctgcagggagccctgggtcagaaggccgccagggcgggaaaggcgctaaaggagaccctggggcaatcggcgctccagggaagacaggtccagtgggcccagcgggccctgcgggcaagcccggccctgacggcctgaggggattgcccgggtcagtgggccagcagggcagacccggagctaccggccaggcaggtcctccaggtcctgtggggccgcccgggctgccagggctgaggggggatgctggtgcaaagggcgagaaaggtcacccaggcttgatcggcctgattggcccgccaggagaacagggggagaagggagatcgcgggttgcccggcccccaagggtcccctggccagaagggagagatgggcatcccaggggcctcgggccctatcggtcctggaggcccaccaggacttcctggccccgctggccccaagggcgctaaaggcgctaccgggcccggaggcccaaagggcgagaagggcgtccagggtcctccaggtcacccaggcccccctggcgaagttattcaaccgctgcccattcaaatgcctaagaaaacgcgaagatccgtggacggctccagactgatgcaagaagacgaagcaatcccgacaggcggagcacccggctctccagggggcctggaggagatcttcggttcgctcgactcactgagggaggaaattgagcaaatgcgaagacctacaggaactcaagacagtcccgcacgtacttgtcaggaccttaaactgtgccatcccgagctgcccgatggcgaatactgggtagacccgaaccagggatgcgctcgagatgccttcagagtgttctgtaattttaccgcagggggagagacatgcgttaccccacgagatgatgtaacccagttctcttacgttgacagtgagggttctcccgtgggagtggtgcagctcacgtttttacggctgctatccgtctccgcccaccaggatgtctcatatccctgcagcggcgcagcccgcgatggccctctcagactcagaggcgcgaacgaagacgaactctcgcctgagacgtcaccctacgtcaaggagttccgtgatgggtgccagacccaacaggggagaactgtgctcgaggtgcggaccccggttttagagcaactccccgtcttggacgcctcattttctgatctcggagcccctccaaggcgggggggtgtgctcctagggccagtgtgcttcatgggctag

SEQ ID NO: 232512 - DNA, 5133 bp, Artificial Sequence
  derived and/or modified sequence
atggagcgttgttcgcggtgtcaccgcttacttctccttctaccactcgttctagggttgtccgcagctccgggctgggccggcgcccctccagttgatgtcttaagggcgctcagattccccagcttgccagacggagtcagaagggctaagggcatatgccctgctgatgtcgcttaccgggtggccagaccggcccagttaagcgcccccacaagacaactgtttcctgggggttttcctaaggatttctccctcttaacagtcgtcagaaccagacctggacttcaagcgccactgttgactctatactccgcacagggagtcaggcagctcggcctagaactgggccgcccagtgcgcttcctgtatgaggaccagaccggcaggccacagccccctagccagcctgtcttcaggggcctgagtttagctgatggcaagtggcaccgggtggccgtggccgtgaaggggcaatccgttaccctcatagtcgactgcaagaagcgcgtgacaaggcccctgccgaggagtgccagacctgtcctcgacactcacggcgttatcattttcggcgcgcggatcctggacgaggaagttttcgagggcgacgtgcaggagctggccatagtgcccggtgtccaggccgcatatgaatcatgtgagcagaaggagctagaatgtgaggggggccagcgagagcggccacagaaccagcagccacaccgggcccagcgctccccccaacagcagccgtctcgtctgcaccgcccacaaaaccaggagcctcagagccaggacccaacgccaggtgaggaagaagagatattggagtcgagtcttctaccccctctcgaggaggagcagaccgatctccaagttcccccaaccgctgatcgattccaggctgaggagtacggggagggcggcaccgaccctccagaaggaccttatgactatacctatgggtacggggacgactatagagaagagaccgagttagggcccgcactctccgcagagaccgcacactctggcgccgctgctcacggaccccgaggactcaagggcgaaaagggcgagcccgcggttcttgaaccaggaatgctggtcgagggcccgcctggccccgagggccctgccggtcttataggcccacctgggatccagggaaatcctgggcccgtgggcgatccaggagagagaggacccccaggaagggcgggtctccctggctctgatggggccccaggtccaccaggcacgagcctgatgctccccttccgctttggcagtggcgggggggacaagggtcccgtagtggccgcccaagaggcccaggcccaggccatcctgcagcaggcacgtcttgccttaagggggcccccaggtcccatgggctataccggcagacctggtcccctgggacagccagggtctcccggtctcaaaggcgaatctggggacctgggcccgcagggcccaagggggccacaaggacttactggccctccgggaaaagctggccgccgaggacgcgccggcgctgacggtgcccgtggaatgccgggagatccaggagtgaaaggtgatcggggtttcgacggtctccctggacttccgggcgaaaagggccataggggcgacacgggtgcacagggattgccaggccccccaggcgaggacggggagcgcggcgatgatggagaaattggacctaggggtcttcccggtgaatccggtccacggggtctgttagggcccaaaggtccaccaggtattccagggcctccaggcgtccgggggatggatggaccgcaggggcccaaggggagccttggcccgcagggcgaacccggccctcccggtcaacagggcactcctggcacccaaggactccctggaccccagggcgccatcgggcctcacggagagaaaggtccccagggcaagcctggactgccaggtatgccgggaagcgacgggccaccgggacaccccggcaaggaggggcctcccggcacaaaaggcaatcagggtccatcaggccctcagggaccgctcgggtatcctggcccccgcggggttaagggggtagatgggatccggggactaaaaggacataaaggagagaaaggagaggatggctttcctggatttaagggagacatcggagtcaaaggtgatcgaggagaggtgggagtgccgggcagtcggggagaagatggtcccgaggggcctaaagggcgtacaggcccaacaggcgatccaggcccacctggacttatgggtgagaagggcaagctcggtgtgccagggctgcctggctaccccggccgtcagggccctaagggctcccttggattcccaggcttccccggggccagcggagaaaagggggcacgcggtctgagcggcaagagcgggcctcgcggagaacgcgggcccaccggccccagaggccagaggggacccagaggcgccaccggaaaaagtggcgcgaaagggacgagtggcggagacggcccgcacgggccccctggcgaacgtggacttcccggccctcagggcccaaacgggttccctgggcctaaaggcccacttggtccacctgggaaggacggtctccccgggcatcctgggcagcgtggcgaggtcggttttcagggaaaaaccggtcctccggggccacccggcgtagttgggccgcagggggctgcaggagagaccggccctatgggggagcgtggccaccccggcccacctgggcctccgggtgagcagggactacccgggactgctggcaaggagggcacaaaaggggatccagggcctcccggcgcccccggaaaggatgggccagctggtttgcggggctttcccggcgaaaggggcttgcctggcaccgctggcggacctggcctgaagggcaatgaaggtccttccggtcctcccggacccgccgggagtccaggagaacggggagccgcagggtcagggggcccaataggccccccgggccgaccaggaccccagggtccgccgggcgcagccggggaaaagggggtccctggggagaaaggtccaatcggtccaactggaagagacggagtgcaggggccagtaggactgccgggaccggcgggacccccgggggtagccggcgaagatggagataagggcgaggtgggcgaccccggtcagaagggtacaaaaggaaataagggcgaacatggccctcctgggccgcctggaccgattggccctgtgggccagcccggcgcagccggtgctgacggcgaacccggggcccgtggaccccagggccacttcggcgccaagggagacgagggcacgagaggttttaacgggcccccgggccctatcggtttgcagggattacctggtccgagcggtgaaaagggcgagaccggcgacgtcggacctatgggacccccaggcccccccgggcctagaggaccagctgggccaaacggtgctgatggtccacagggccctcctgggggggtcggcaaccttggtccaccaggtgaaaagggtgaaccgggcgagtctggtagccccgggattcagggcgagccgggcgtgaagggtcctcgcggagaacggggtgagaagggggagagcggacagcccggggaaccggggcctcctggcccaaagggccctaccggagacgacgggcccaagggaaacccagggccagtggggtttccgggagacccaggccccccaggcgaggggggtccacggggacaagatggtgcaaagggggatcggggtgaagatggagaacctgggcagccaggatcacccggacctactggtgaaaacggacctcccggcccattgggcaagaggggcccagccggctcacctggttctgagggaagacaaggaggcaagggggccaagggggatccaggtgcgatcggggcccccggcaagaccggacccgttggtcctgcagggccggccggcaagcccgggccagacggacttcggggcttgccaggttcagtggggcaacaggggcgacccggcgctacaggtcaggctggtcctccaggtccagtcgggccgcctggtcttcccggactacggggtgacgccggggccaaaggggaaaaaggccacccggggctcattgggctgattgggccccctggcgagcagggtgagaaaggggatcgaggactgcctgggccgcaggggtctcctggacagaagggcgagatgggcattcccggtgcatccggaccaatcggccccggagggcctcccgggctgcctggccccgcgggacctaagggggctaaaggcgctactggacctggaggacccaaaggcgaaaaaggagtacagggtccccccggccacccggggcctcctggggaggtgattcagccccttccaattcaaatgccaaaaaagacacgccgttctgttgacggaagcaggctgatgcaagaggacgaagctatacctacgggaggcgcacccggctcacctggcggtttggaggaaattttcgggtccctcgactctctgagagaagagatcgaacagatgcggagacccacaggcacccaggatagtccggcccgcacctgtcaggatctgaagctgtgtcacccagagctccccgacggagagtattgggtggaccctaaccagggttgcgcccgtgacgcttttcgggtgttttgcaacttcacagctgggggtgagacttgcgtgacaccccgcgatgacgttacacaattctcttatgtcgatagtgagggtagccccgtcggcgtggtccaactcaccttcttgcgcctactgagcgtctctgctcatcaggacgtctcctacccgtgctcaggcgcagcccgagacggccctctgcgccttcgcggcgcgaatgaggacgagctttctccagagactagcccctatgtgaaggaattcagggatggatgtcagacgcagcaagggaggaccgtcttagaggtgcgcactcccgttctagaacagctccctgtgctagatgcctcttttagcgatctgggagcccccccccgaagagggggtgtactgctcggcccagtttgttttatgggctag

SEQ ID NO: 232513 - DNA, 5070 bp, Artificial Sequence
  derived and/or modified sequence
atggagaggtgctccagatgtcatcgtttactgctattactccctctggtactgggcctatctgctgcacccgggtgggcgggcgccccgcctgtggacgtccttcgtgctctgcgttttccctctctgccagacggcgtgcgacgggccaaaggaatctgccctgccgacgtggcttatagagtggcacgcccggctcagttatcagcccccaccagacagctcttccctggcggttttccaaaggatttctctttgctgacagtggtgaggacaaggcctggactgcaagccccattgctgaccctgtattccgctcagggcgttaggcagctcggcctcgagctggggcggcctgtccgatttctctacgaggatcagaccggaagaccccaaccaccaagtcagcccgttttccgcgggttgagcttggcggacggcaagtggcaccgcgtggcagttgcggttaaagggcagtccgtaacccttatcgtcgactgtaaaaagcgggtcacacgacctctgccacgctccgcaagacccgtgttggacacacatggcgttataatcttcggagcaagaatacttgatgaagaagtgttcgaaggggacgtccaggagttagcgatagtgccaggggtccaagcagcttacgaatcttgtgaacaaaaagagttagaatgtgagggcggtcagagagagcggccacaaaatcagcagccccacagagctcagaggagtccccagcagcagccttctcgcctacatcggccacagaaccaggaaccacaaagccaggaacagaccgacttgcaagtgccccctactgccgatcgtttccaggccgaagagtacggagagggcggtaccgatccccccgaaggcccgtatgattacacctacggttacggggacgactatcgagaggaaacagagctcggaccagctctgagtgcagagaccgcccacagtggcgctgctgctcacggcccacggggtttaaagggcgagaagggagagccagctgttctcgaacccggtatgttagttgaaggtccacccgggccagaaggccccgctggcctgataggcccaccagggatccagggaaatcccgggcccgtcggcgacccaggggagcgcggacctcctggacgggcaggcctgcctggttcggacggtgctcccgggcctcctgggactagcctgatgctgccattccggtttggcagtggcggtggcgacaagggaccggtcgtggcagctcaggaagcccaggctcaggccattctgcaacaggccaggttggctctgcggggtccaccagggcccatgggctatacaggtcgacctggaccgttaggacagccaggtagcccgggcctgaaaggcgagagcggcgatctgggaccacaaggaccccgcggccctcagggtttgacagggcctcccggcaaggctgggagacggggccgcgcaggcgccgacggagctagaggcatgccgggggatcccggggtcaaaggagatcggggtttcgatggtctccccgggttgcctggagagaaagggcacaggggcgataccggagctcaggggcttcctgggcctcccggagaagacggcgaacgaggagatgacggggagatcggaccccgcggcctgcccggcgaaagtggccctaggggcctccttgggccgaaagggccccctggtatccctggcccccccggcgtgcgtggcatggatggcccccaagggcccaagggctctctcgggccccaaggggaaccaggtcctcccggacaacaaggaacccctggtactcagggcctgcctggaccacagggtgcgattggaccacatggcgagaaaggacctcaaggaaagccgggtctcccaggtatgcctggctctgatggacctcccggacaccccggtaaagagggcccaccaggaacaaagggcaatcagggccctagcggcccgcagggacccctgggctaccccggcccccgcggggtgaagggcgtggatgggatacgcggtctgaagggccacaagggagaaaagggggaagacgggtttcctggtttcaagggagatattggtgtgaagggcgataggggggaggtgggcgttccagggagccgcggggaagacggacctgaggggcccaagggccgcactggacctactggtgaccctggcccccctggcctgatgggggaaaagggaaaactgggggtccctggcctgccaggatatcccgggcgccaagggcctaagggatcgctcgggtttccgggcttccccggagccagcggggaaaaaggcgcccgcggactgagcgggaaatctgggcccagaggtgagcgcggtcccactggcccaaggggtcagcgggggcctcgtggggctacgggcaaatcaggcgctaagggaacttcaggaggagacggacctcacggtccccctggggaacgaggactgcccgggcctcaggggccaaacggcttcccaggcccgaaaggtccaccaggtcctccaggaaaggacgggctgcccggccacccaggacagcggggcgaggtaggatttcaaggcaaaactgggcctcctggcccccccggcgtggtgggccctcaaggggccgcgggcgagaccggtcctatgggggaaagggggcacccaggaccgcctggtccacccggtgagcagggcctccccgggaccgcgggtaaagagggaactaagggggacccaggaccccccggggcaccagggaaggacggtccagctggtctgcgcggatttcctggggagagaggactcccgggtactgccggcgggcctggcttaaaaggcaatgaaggcccaagcgggccacctggccctgcgggtagtcctggtgagaggggcgctgccggcagcggcgggcccatcggcccacctgggcgcccggggcctcagggacctccaggtgctgccggagagaaaggggttcccggagagaagggcccaatcggacccactgggagagacggtgtccaggggcccgtgggcctacctggcccagccgggcctcctggggtggccggcgaggatggagataaaggagaagtcggggatcccggccaaaaaggtaccaaaggaaacaagggtgaacacggaccgcctgggccccccggaccgattggccccgtcggccagcctggggcagccggggccgatggcgagcctggtgctagagggcctcagggacactttggtgccaaaggagacgaggggactcgggggtttaacggacccccagggccaataggtctgcagggcctacccggaccctcaggagaaaagggcgaaaccggcgatgtggggcccatgggtcctcctggcccaccaggacctagagggccagcgggtcctaacggagctgatgggcctcaagggccaccggggggagtcggcaatttggggccacctggggagaagggcgagccaggagaaagtgggagcccagggattcaaggagagccaggcgtcaagggtccgcgtggcgaacgaggtgagaaaggggagtctgggcagccaggcgagccagggccaccgggaccaaagggccctacgggcgacgacgggccaaaagggaatccaggccccgttggattcccaggcgaccctggaccaccgggagaggggggcccgaggggacaggacggcgccaagggtgacaggggggaagacggcgaacccggacagcccggctccccagggccgaccggcgagaacggccccccgggcccactggggaagcggggtccagccggtagtcctggttccgaagggcgtcaaggcggaaagggtgcgaaaggcgatccaggagccattggggctccaggaaaaactggtcctgtgggtcccgccggccccgccgggaagccgggcccagatggcttacgtggcctgcccggcagcgtgggtcaacagggtagacctggagcaacagggcaagctggcccaccaggcccagtaggaccaccgggcctgcccggtttaagaggggacgccggtgctaagggggagaaaggccatcccggcctgatcggactaatcggtccaccaggagagcagggagagaaaggggatcggggcctcccggggcctcagggatccccaggacagaagggagaaatgggaattcctggtgcttcaggaccaataggtcctggtgggccgccgggcctacctgggcccgctggaccaaagggtgccaaaggagctacaggtcctggaggccctaaaggtgaaaaaggagttcagggtcccccagggcaccccgggccccctggagaagtgatccagccactgcctattcagatgcccaagaagacacggcgtagcgtggatgggagtagacttatgcaggaggatgaagcaattcccacggggggtgcccctggctcccccggggggctcgaggaaattttcgggtccctggacagtctccgagaagagatcgaacagatgcggaggcccaccgggacccaggactctcctgctcggacctgtcaggatcttaaattgtgtcatccagagctacccgacggtgagtactgggtagaccctaaccagggttgtgcaagagacgcgtttcgagtgttttgtaattttacggccggcggtgagacgtgcgtgactccccgagatgacgtgactcagtttagctacgtagattccgaggggtctcccgtgggagtggttcaacttacgtttctgaggttgctgagcgttagtgcacaccaggatgttagttatccctgcagtggggctgctcgcgatggacctttacggcttcgaggagcaaatgaggacgagctgtcacccgaaacaagcccatacgttaaagaattccgagatggatgtcagacacagcaaggccggacagtgctcgaagtgcgtacccccgtgttggaacagttgcccgtcctggatgccagcttcagcgacctgggagcacccccgcgcagaggcggggtcctcctggggcctgtgtgttttatggggtag

SEQ ID NO: 232514 - DNA, 5211 bp, Artificial Sequence
  derived and/or modified sequence
atggagcgttgctcgcgatgccatcgtctcctgctgctcttgccactagtgctggggctctccgctgcacctggctgggccggggcacctccagttgatgtgcttcgggctctccggttcccgtctctgcccgatggtgtccggagggccaaggggatatgccctgcagacgtcgcatatagggtggctagaccagcccaactcagcgctcctacccgacagctattccctggtggctttcccaaggatttttcccttctgacggtcgtgagaacccgccccggacttcaggctcctctgctgacactgtattccgcccagggggtacggcagttggggctggaactggggcctcccgtgcgattcctgtacgaagatcagaccggtaggccgcagcctccttcccagccagtgttcaggggcctatccttggctgacgggaaatggcaccgtgtggcagtggccgttaagggtcaatccgtgacactgatcgtggattgtaaaaagagagtgacacggcccctgccacgaagtgcccgacccgtgcttgacacccacggcgtgattatttttggcgcaagaatcttggatgaagaagtgttcgaaggggacgtgcaggagctagccatagtgccaggggtccaggcagcctatgagagctgcgagcagaaggaactggaatgcgagggaggacagagggagcggccccaaaaccagcagccgcatagggcccaacgctcccctcagcagcaaccaagtcggctacacagaccacagaaccaagagccccagagccagcccactgagtcactttactacgactataagcctccctactacgacgttatgactacgggtacaacccccgactaccaggatccaacccccggagaagaagaggaaatcctggaatcttcactgctgcctcctctggaggaagaacagacagacctacaagtcccacctaccgccgacagatttcaggctgaagaatacggtgagggtgggacagatcctccagaaggcccatacgattacacctatggttacggagacgactatcgagaggagactgagcttggcccagccctgtccgcggagacagctcattcaggtgctgccgcccatggcccccgggggttgaagggtgagaaaggggagcccgcagtcctggagcccggcatgcttgtagagggccctcccgggcctgaaggacccgcgggactgatcggtccaccagggatccaaggcaatccgggaccagtcggagaccctggagagcgaggtccaccaggacgcgctggtctgcccggttctgacggcgccccaggccctcctggaaccagtctcatgttacccttccggttcggctcgggtggaggggacaagggccctgtcgtggcagcccaggaggcacaggcgcaagccatcttgcaacaagcacggctggctttgcgcggaccccctggtcccatgggctatacaggcaggcctggtcctctcggccagccagggagtcccggtcttaaaggtgaaagtggagacctgggtcctcagggcccccgcgggcctcagggactaactggtcctcctggcaaggccggtcggagaggccgcgccggagcagacggcgctcgtggaatgcctggagatccaggcgtgaaaggcgacaggggctttgatggtctgcccggcctccctggtgaaaaaggacacagaggcgacaccggtgcacagggcctgcctggtccacctggtgaggacggcgaacggggtgacgatggagaaataggtcctagaggtttacccggtgaatccggacctcgaggccttttagggcctaaaggacctcccggcatcccagggccaccaggggttcgagggatggacggaccacagggccccaaaggatcactgggtccacagggagaacccgggccaccaggccagcaagggacccctgggactcagggtttgcccggcccccagggcgctattggcccacatggcgaaaaaggaccgcagggcaaacctggcctcccaggcatgcctggatctgacggacccccgggacatcccgggaaagaaggaccccccggcactaagggcaaccagggtccatccggaccgcaggggcccttgggttatcccggaccccggggggtgaaaggggtggatggcatccgagggctgaagggacacaagggagagaaaggagaggatggatttcccggctttaagggggacatcggggtaaagggagacagaggagaggttggggtcccagggtccagaggtgaagacggcccagagggccccaaagggcgcaccggcccgacaggagatcctggtccccccggattgatgggcgagaaggggaaacttggagtaccgggtctaccgggctatcccggacggcaggggcccaaaggatcactgggtttccctggattccctggagcctccggcgagaagggtgctcgaggattgtcaggaaaatccggtccaaggggggagaggggtcctacgggacccagaggccagaggggtccccggggtgccactgggaaaagcggcgcaaaaggaacatctggcggagatggaccgcatggtcctccgggtgagcggggattgcctggaccacagggacccaatggattccccgggcccaagggcccccccggcccacccgggaaggacggtcttcccggccatcccggtcagcgcggcgaagtgggtttccagggcaagactggaccacccggacccccaggggtggtcgggcctcagggcgctgcaggcgaaactggcccaatgggtgagaggggtcatccaggaccccccggtccccctggagagcagggcttgccaggaaccgctgggaaagaggggacaaaaggcgacccagggccacctggggcgccagggaaagacggtccggccgggctgaggggctttccaggtgagaggggcctgccggggacagcaggaggccccggcctgaagggaaacgagggcccctcaggacccccaggccccgctggctccccaggtgaacggggggcagctgggagcggaggacccatcggccctccaggaagaccggggccccaagggcctcccggggccgctggggaaaaaggcgtacccggcgaaaaagggccgattggacctacagggagagacggagttcagggccccgtgggcctgccagggcccgcgggccctcctggggttgctggagaggatggagataagggtgaagttggagaccccggacagaagggaaccaaagggaataagggggagcacgggccgccgggccctccagggcctatcggccccgtcggccaaccaggggctgccggtgcagatggggagcccggagcaaggggcccccagggtcacttcggggctaaaggcgacgaggggactcgcggcttcaacggaccacctggaccaatcgggctgcagggcctccccggaccatctggtgagaaaggcgaaacaggtgacgtggggccaatgggacctcccggcccacccgggccgcgcgggcctgcagggcctaacggcgctgacgggcctcagggaccccctggaggtgttggtaacctgggtcccccgggcgagaaaggggagcctggcgaaagcggatctcccggtatacagggcgagccaggagtcaagggaccccgcggcgagagaggcgagaaaggtgaaagtggtcagcccggggagcccggccctccggggccgaagggcccaaccggcgatgacggcccaaagggcaacccaggcccggtcgggtttcccggggacccagggccccccggagaggggggcccgcggggacaggacggggccaaaggagaccgcggcgaggatggcgagcccggccagccaggatcccctggacccactggggagaacgggccccccggcccattgggaaagcgcggaccagcagggagccccggctccgagggaaggcagggtggcaaaggggctaagggagaccccggtgcaattggggcgccgggtaaaaccggacctgtaggtcccgctggcccagccggcaagcctggtcccgatggactccgagggctccctggaagtgttggtcagcaaggcaggccaggggctacaggccaagctggcccacccgggcctgtgggcccgccaggcctgcccggtctcaggggtgatgccggtgccaaaggcgagaaggggcaccccggcctgatcggtctcatcggcccccccggcgagcagggggagaaaggcgacagagggttacctggccctcaagggtcccccggtcagaaaggagagatgggaatcccaggggcttcaggcccaatcggtcccgggggtcctccaggcctgcctggacctgcaggccccaagggagccaagggtgcgacgggaccggggggacccaagggggaaaagggcgttcagggaccacccggccaccccggcccaccaggggaggttattcaaccactgcctattcagatgccaaagaaaactcggaggagtgtcgatggcagccggcttatgcaggaggacgaagctatccctacaggcggggcacctggcagcccaggcggacttgaggagatctttggaagcctggactccctcagggaagaaatcgagcagatgaggcgcccgacagggacccaggatagccccgcaagaacctgtcaggatctcaagctgtgccaccctgaattgccagacggggaatactgggtcgaccctaaccaggggtgcgcccgtgatgcatttcgtgtgttctgcaactttactgcggggggggagacatgtgtgacacctcgggacgatgttacccagttttcctacgttgactctgagggttcccccgttggagtggttcagttaaccttccttcgtcttctgtccgtgtccgcccatcaggacgtttcctatccctgctccggcgcagccagagatggacctcttaggctgcgaggcgcgaacgaggacgaactcagtcccgagacttccccctacgtgaaggagtttagagacggatgccaaactcagcagggacggacggtgctggaggtgcggaccccagtgctggagcagctgcccgtgctggacgcttcttttagtgacctgggagctcccccccggaggggaggagtgctcctgggaccagtatgtttcatggggtag

SEQ ID NO: 232515 - DNA, 5148 bp, Artificial Sequence
  derived and/or modified sequence
atggaacgctgctctcgatgtcataggttgctgttgctgctgcccctggttctgggcctgagtgccgctcctggttgggcaggtgcgcccccggtggatgtcctgagggcactgcggtttccttcactcccagacggggtcaggcgtgcgaaaggcatttgccctgccgacgtggcttatcgcgtggcccgcccagctcaactctctgcacccactcgccagctattcccaggcggattccccaaagacttcagcctcctcaccgtggtgcggacccggcctggccttcaagcacccctgctgacactgtattcagcccagggtgtccgtcaacttgggctcgagctgggacgaccagtgcgatttctctacgaggaccagacgggacggccccagcccccctctcagccagtcttcagaggattgtccctcgccgatggcaagtggcatcgcgtggccgtggcagttaagggacaatctgttacgctgattgtggactgcaaaaagcgggtaacacggcctcttccccgcagcgcccggccggtgctcgacacgcacggagttataattttcggcgccaggattcttgacgaggaagtgtttgagggcgacgtacaggagctggctatcgtaccaggagtacaagcagcatatgagtcatgtgagcaaaaggagctcgagtgcgaaggaggtcagcgggagagaccccagaatcagcagccccacagagcccagagatctcctcagcaacaaccaagtcgattgcacaggcctcagaatcaggagccgcagagccagccaaccgagtcgctctactacgattacgaaccaccctattacgacgtgatgactacaggcactacccccgattaccaagagcagaccgacctgcaggtcccaccaaccgctgataggttccaggcggaggagtacggagaaggcggtactgacccccccgaagggccgtacgattacacgtacgggtatggcgacgactaccgcgaagagaccgagctgggtcccgccctctccgccgaaaccgcccatagcggagccgccgcacatgggcccagagggctcaagggagagaaaggggagcccgccgtgctagaaccaggaatgctcgtggaaggaccaccgggccctgagggacctgccggcctcataggtcctcctggcatccaagggaaccctggccccgttggggacccaggcgaacggggccctccagggagagccggcctgcccggctcagacggagcccccggacctccaggaaccagcttaatgctgccctttcgctttggatccggaggcggagacaaaggaccagtcgtcgccgctcaggaggctcaggcccaggccatacttcagcaggctaggttagcactccggggccctcccggcccaatgggctatacgggccgaccaggaccgttgggccaacccggatctcccggactgaagggtgagtctggagatctgggcccccagggaccacggggaccccaaggactgactgggcccccagggaaggcaggtaggcggggtagagccggggctgatggagctcggggcatgcctggcgaccccggtgttaagggcgatagggggttcgatgggctgcctgggctccctggagagaaaggccataggggagataccggtgcgcaaggtcttccagggccccccggtgaggacggggagcgtggggacgacggtgaaatcgggccgcgtggactcccgggcgagagtggcccgagagggctgctggggcccaaaggccctccaggtattcccgggccgcctggggtgcggggtatggacggaccccagggtccaaaaggctcattggggcctcaaggggaaccaggtccacccggccagcagggaaccccaggaacccaaggtctgcctggtccccagggcgctattgggcctcacggtgagaagggtcctcaggggaagcctgggctgccagggatgccagggtccgacggcccacccggacacccagggaaagaagggcctccagggacgaagggtaatcaggggccttccggtccacagggccctttggggtatccagggcctcggggggtgaagggggtggacggaatcagaggtttaaagggtcataaaggggagaaaggtgaggatggctttccaggatttaagggggacattggggtcaaaggcgacagaggggaagtgggggttccaggaagtcggggcgaagacggtccagaagggcccaagggacggacaggccccacgggtgacccgggtccccccggcttaatgggggagaaggggaaactgggagtgcccggtctcccgggttatcccgggaggcagggcccaaaaggatccttggggtttccgggcttccccggggcgtcaggcgagaaaggcgccagagggctgagcgggaaatcagggccacgaggcgagagagggcctacgggtccccggggtcagcggggcccgagaggagccaccggtaagagtggagccaagggcaccagcggcggggacggcccccatggaccccctggtgagcggggacttccagggccccagggtccaaatgggtttccaggaccaaaggggcccccgggtccgcctggcaaagatgggctgccaggccaccctggccagaggggagaagtgggtttccagggcaagaccggcccccctgggccccctggtgtcgtcgggcctcagggcgcggcaggggaaacgggccctatgggagaaaggggacaccccggacctcctgggccacccggtgagcaggggttacctggcaccgccggaaaggagggcaccaagggggatcccgggccccccggcgctccaggcaaggacgggccggcggggttacgaggttttcccggggaacgggggctccctggaacagctggcggtcccgggcttaagggcaatgagggcccatcgggccccccaggccccgccggtagcccaggtgagcgcggggctgctggatcaggtggacctataggaccacccgggaggccaggacctcagggcccacccggggcagcgggggaaaaaggcgtacctggcgaaaagggccccatcggccctaccggcagagacggcgtgcagggacccgtgggcctgcccgggccggctgggcccccaggagttgccggcgaagatggtgataaaggggaagttggagatcccggccagaaagggacaaagggaaataaaggcgaacatggacctcctggccccccgggacctatcggtccggtgggccagccgggggccgctggggcagatggcgaaccgggcgccagagggccgcagggccattttggggccaaaggggatgagggaaccaggggattcaacggccctccaggacctattggattgcagggccttccgggcccttccggcgagaagggagagaccggagatgtggggccaatgggcccgcccggccccccaggtcctcggggacctgcgggcccgaatggagctgacggacctcaaggccctccaggtggcgtgggcaacttgggtccccccggagagaaaggcgagcccggggaatccggctcaccgggcatacagggcgagccaggggtgaagggcccccgtggagaaaggggggagaagggtgagtccggtcagccaggagaaccggggccaccaggcccaaagggaccgaccggcgatgacggccctaaaggcaaccccggccccgtgggatttcccggcgatcccggaccacctggagaaggtggcccccggggccaggacggagcgaagggcgaccgtggggaagacggggagccagggcagcctggttctccagggccaacgggtgagaatggccctcccggccctcttggaaagcggggccccgcaggatctccaggaagcgaaggccgccagggaggcaaaggcgctaagggagatccgggtgcgatcggcgcacccggcaagaccggtcccgtggggcccgctgggccagcgggtaagccaggacccgacggactacgcggtcttcctggctcagtcggccaacaagggcggccaggtgctaccggccaggccgggccccccggtccggtaggcccacctggtctccctggcctcagaggcgacgctggagcaaaaggcgagaaggggcatcctgggctaattggtctgataggcccaccgggcgagcagggagaaaaaggggacagaggccttccaggcccacagggaagccccggtcaaaagggcgagatgggcatcccgggggccagtgggcccatcggtccgggcggccctcccggcctcccggggcctgcaggtccaaagggggcaaagggcgccaccggtccgggtgggcccaagggcgaaaaaggcgtccagggccctccagggcaccctggacctccaggagaggtcattcaaccacttccaatacagatgccaaaaaaaacccgtcgcagcgttgatgggtcgaggcttatgcaggaggacgaagccattccaactgggggagccccgggcagtcctggcggtttagaagagatctttggctcacttgatagcctccgcgaagaaattgagcagatgaggcgccccactggcacgcaagactcacccgcccgcacttgccaagaccttaagctgtgccaccctgagctgccggacggtgaatactgggttgatcctaaccagggctgcgctcgggatgcattccgagtgttctgtaactttacggccggtggtgagacgtgcgtgacaccacgggacgacgtcacccaattctcttacgtggatagtgaagggtcgccagtgggagtggttcaactgacctttctgcggttgttgagcgtaagtgcccatcaggatgtgtcctacccatgcagcggggccgcgagagatggccctctgagactgcgaggcgcaaacgaagatgagctgtctcctgagacatccccctacgtcaaggaattccgtgacggatgccagactcagcaggggcgaaccgtactggaggtgcgcaccccagtgcttgagcagctgccagtcttggacgcttcattttccgatctcggagcaccaccaagacggggcggcgttttactcggacctgtgtgctttatgggctag

SEQ ID NO: 232516 - DNA, 5211 bp, Artificial Sequence
  derived and/or modified sequence
atggaacgctgttcacgctgccatcggctgctgctattgctgcccctggtgcttggactgtcagccgctccagggtgggccggtgcaccccctgtcgacgtcctgcgtgcattgagatttccgagccttcctgatggcgtgcgccgggcaaagggaatctgtccagcggatgttgcctaccgagtggctcgccccgcccaactctcggctcctacgcggcagctcttccccggaggatttcctaaggacttttctctactgaccgtcgttcgcacaaggcccgggttacaggctccacttctgactctgtactcggctcagggcgtccgccagctcggattagagctcggaaggccagtgcgcttcctgtacgaagatcaaaccgggcgtccgcagcccccttcacaacctgtgtttcgaggtctctcactggcggatggtaaatggcacagagtcgccgtcgctgtgaagggccagtccgtcaccctgatagtcgattgcaaaaagagagtgactagaccactgcctcgtagtgcccgccctgtattagacacacatggcgtgattatttttggagctcggattctggacgaggaagtgtttgaaggggacgtgcaggagctggctattgtacctggtgtccaggccgcgtatgaatcttgtgaacaaaaggagttagagtgcgaaggcggccagagagagcgccctcagaaccagcagcctcaccgcgcccagcggtctccccaacagcaaccgtcacggctgcaccgcccacagaaccaggaaccccagtctcagcctaccgagtccctttattacgactatgagccaccctactacgatgtcatgacaacaggcactactccagattaccaggacccaactcccggcgaagaagaggagatcctcgagagttcactgctcccaccccttgaggaagagcagactgacctgcaggttccccctaccgcagatagatttcaggcggaagagtatggcgaaggcggaacagacccaccagaaggaccctacgactacacatatgggtacggggatgattacagggaagaaacagagcttgggcccgcgctgtccgcagaaaccgctcactcaggcgccgccgcacacggcccacgcggcttgaaaggtgagaaaggcgaacccgcggtgcttgaaccaggcatgctggtggaggggcctccaggacccgaagggcctgctgggttgatcggcccccccgggattcaggggaacccaggtccagtgggagacccaggagaaaggggacccccagggagagcaggcctgcctggtagcgacggcgctccaggaccccccggaacaagcctgatgcttccgtttcggttcgggagcggcggcggagataagggacccgtcgtagctgcccaggaggcacaagcccaggccatcctccagcaggctcgactcgccctcagaggtcctccaggcccaatgggttatactggtaggcctgggccactggggcagccgggctctcccgggctgaagggtgaatccggggacctggggcctcagggtccccgagggccacagggcctcacgggcccaccaggcaaggctggacgcaggggccgtgcaggggccgacggggcgcgaggaatgccaggagaccctggcgtgaaaggggaccgcggatttgacggtctccctgggctccctggcgaaaaggggcacaggggtgacactggagcccagggcctgcccggcccaccaggagaggacggtgagagaggcgatgatggagaaattggaccccgcggcttgcccggtgaatctggacctcgggggcttctcggaccaaagggaccgccaggaatcccaggcccacccggtgtgcgtggaatggatggcccccagggcccaaaaggttctctgggtccccagggggaaccaggcccacccgggcagcagggcactccaggcacacagggcctaccgggaccccagggggctattgggcctcatggagaaaagggtcctcagggcaagccaggcctccccggaatgccaggcagtgacgggccgccaggccacccgggcaaggaagggccccccggcactaaaggcaaccagggtccaagcggcccccagggccctctcggatatcctggtccaagaggggtgaagggtgttgatggcatcagaggtctcaagggccataagggggagaagggagaggacggctttcccggattcaaaggggacataggagtcaagggggatcgtggggaagtgggagtaccagggtctcgcggggaggatggtcccgagggtcctaagggcaggactgggcccactggagacccagggcctccagggttaatgggcgagaagggtaaattaggggttcccgggctgccgggctacccgggaagacagggtccgaaaggcagcttggggttcccgggcttccctggggcctcaggcgaaaaaggcgcaagaggcctgagtgggaaaagtggtccaagaggtgaacggggccccaccggcccacggggccagcgtggtccccgaggcgccacaggcaaatccggggccaaaggcacctctggcggtgacggcccacatggacctcctggggagaggggactgcctggccctcagggtccgaacggcttccccgggccaaagggaccgcccggccctccaggcaaagatggtcttcccgggcatcccggccaaaggggcgaggtgggattccaaggaaaaacagggccacctggtcctcccggagtggtgggaccccagggcgcagccggcgaaaccggcccaatgggagaaagagggcacccagggccccctggacctcccggcgagcaaggcctgccggggactgcagggaaggaaggaacgaaaggcgatccgggccccccaggcgcgcctgggaaggacggacccgcaggtcttcggggcttccccggtgaaagggggctccccggcaccgccggtggtcccgggctgaaagggaacgagggcccaagcggcccccccggcccagcgggctccccaggtgagcggggcgcggccgggagtggcggaccgatcggtccccctggccgacccggccctcagggcccccccggcgctgctggcgagaagggggtgcctggcgaaaagggccccataggtcctactgggagggacggcgtccagggacccgtggggcttcccggtccagcggggccacccggagttgcgggagaggatggtgacaaaggagaggtgggcgatcctggccagaaagggaccaagggaaacaagggcgagcacgggcccccagggccccccggcccgatcggcccagttggtcagccaggcgccgctggtgccgacggcgagccaggcgctcgcgggcctcaggggcatttcggcgcaaaaggtgatgaaggcactcggggcttcaacgggcctccaggtcccattggactccaggggctgcctggcccgtctggagagaaaggggaaactggggatgtcggtcccatgggcccgccgggccctcctggccctcgaggcccggccggaccgaacggagccgacggcccccagggcccacccggcggtgtgggaaacctgggcccgcccggcgaaaagggggaaccaggcgagagcgggtctccggggatccagggcgagccaggggtgaaaggcccaaggggagagcggggagagaaaggggagtctggtcagcctggcgaaccgggtccacccgggcctaaggggcctacaggcgatgatggcccaaaaggcaaccccgggccagttggtttcccaggggacccaggcccccccggggaaggcgggcctaggggccaagacggcgccaagggcgatcggggggaggacggagagcctggacagcctgggtcccccgggccgactggcgaaaacggaccacccggaccactggggaagagagggcctgctggcagcccggggtcggaggggcgccaaggcggaaagggggcgaaaggggaccctggtgctatcggtgctcccggaaagaccgggccagtgggacccgccggccctgctggcaagccaggtcctgacggcttgaggggcttacccggaagcgttggccagcaaggccgcccaggtgccaccggccaggcgggaccacccgggcctgttggaccccctgggctcccagggctcaggggagacgccggggcaaaaggggagaagggtcatcccggactcattggcctgattggaccccctggtgagcagggtgagaaaggcgatcggggattgcctggaccacaaggcagcccggggcagaagggggagatgggtataccaggcgcttccggcccgattggcccaggcggtcctcctggattaccgggacctgccggacctaaaggggctaaaggggccactggtcctggtggacccaaaggtgaaaaaggagtccagggtccccccggccaccctgggccccccggggaggttattcagcctctgccgattcagatgcctaaaaaaacccgtaggtctgtcgacggctcacggctgatgcaggaggatgaagcaatccctacaggcggcgcccctggcagcccaggagggctcgaagagattttcggaagcctggacagcctcagggaagaaattgagcagatgcgacgcccgactggaactcaagacagtccagctcgaacctgtcaggacttgaagttgtgtcaccctgaattgccagatggcgagtactgggttgaccctaaccagggctgcgcccgggatgccttccgcgtcttctgtaactttacagccggaggcgagacctgcgttacaccaagagatgacgttacccagtttagctacgtggatagcgagggttcaccagtgggtgttgtacagctcacttttctgcggctgctgtcggtgtctgcacaccaagatgtgagctatccctgcagcggggcggccagagatggtccactgagacttagaggcgccaatgaagatgagcttagccctgagacttcaccatatgtcaaggagtttagagacggttgtcaaactcagcaagggcggactgtactggaagtcagaactcccgtattggagcagcttcctgtgctggatgccagtttctctgacctgggcgcccccccaagacgcgggggcgtgctgctgggcccggtctgtttcatgggttag

SEQ ID NO: 232517 - DNA, 5070 bp, Artificial Sequence
  derived and/or modified sequence
atggagaggtgtagtaggtgccaccgactactgctactgctccctctggtcctgggcctctccgccgcccctggctgggcgggagcaccacctgtggacgttcttagggcactgcgatttccgagtctgcctgatggcgtccggagagctaaggggatttgtcccgccgacgtggcttacagagttgccagacctgcacagcttagcgccccaacaagacagttatttcccggcggcttcccaaaggacttctctctactgactgtggtcagaacacgacctggactgcaagcccctttactcactctttattctgctcagggcgtgcgccagcttggactggagctgggtcgcccagtgcgtttcctatatgaagatcagactggaaggccccaaccaccctctcagccagtctttcgcggtctcagcctcgcagatgggaagtggcatagggtggcggtagctgtgaaagggcaaagcgtcactttgatagtggattgtaagaagcgggtgactaggccactgccacggtccgcgaggcccgtactggatacccacggcgtcatcattttcggcgctaggatcctggacgaggaagtgttcgagggcgatgtgcaggaactcgccatcgtgccaggagttcaggcagcgtacgaaagttgcgagcagaaagaactggagtgcgaagggggtcagagggaaaggccccagaaccagcagccccatagagcacagcgctcaccacagcaacagccctctcgactgcatcggccgcagaaccaggaaccccagagtcaagaacagacagacctgcaagttcccccaaccgcagacagattccaagcagaggaatacggcgaaggcggtaccgacccccctgaaggcccatatgattatacctatggatatggcgatgattacagggaagaaacagagttgggacccgctttgtcagccgagactgcacatagtggggctgccgctcacggccctagaggcttaaaaggagaaaagggagagcctgcggtgctcgagccaggaatgctggtggaagggccacctggtccggagggccctgctggcctcattgggcctcctgggatccagggtaatcctggacccgtaggagatccaggcgaacgagggccacccgggagagcaggcctgcccggttcagacggggcgcctggcccccctggtacatccctgatgttaccgtttcgtttcgggagcggagggggagacaaggggccagtggtcgctgcacaggaggcgcaggcacaggccattctccagcaggcccgtctggccctgcggggaccacctgggcctatgggatacaccggcagaccaggccctcttgggcagcctggctcacccgggctgaagggagaaagcggcgacctcggcccgcagggtccaagaggtccccaagggttaacaggacctccgggcaaggcggggaggagagggcgtgcaggggccgatggagctcgcggaatgcctggtgacccaggtgtgaaaggcgatcgggggtttgacggtctgccagggcttccaggcgagaagggacataggggggatacaggtgctcagggtctcccgggaccccccggagaggatggtgaacgtggagatgacggggaaatcgggcctaggggcctgcccggggagagcggcccaagggggctgctcggccccaaggggccgcctggtatccccggaccaccgggggtacggggtatggacggaccccagggtcccaagggcagcctgggtccccagggggagccgggccctccgggtcaacaaggcacacctggtacccaaggactccccgggccacagggagcgattggcccgcacggtgaaaaggggccccagggcaagcctgggctcccaggaatgcccggatccgatgggcctcccggacaccctgggaaggaaggccccccgggtactaaaggtaaccagggcccctccgggcctcaaggaccgctgggttatcccggtccaaggggcgtcaaaggggtcgacggtatcaggggcctgaaaggccacaagggcgaaaagggagaagacgggttcccgggttttaagggcgacattggtgtaaaaggagaccggggggaagtgggggtgcccggcagcagaggcgaggatggacctgaaggacccaaaggaagaaccgggccaactggagatccaggaccacccggactgatgggcgagaagggaaagctgggggtccctggtctgcccgggtatcccggccgccaggggcccaaaggaagtcttggatttccaggctttccaggggcttcaggagagaagggcgcccgcggcctgtcgggcaaaagcggacccaggggagaaagaggcccaacgggtcctcgcggacagcgggggccaaggggggctacgggaaaaagcggagccaagggcaccagtgggggcgatggtccccatggtcccccaggagaacgtggcctgcctgggccgcagggaccgaatggcttccctgggcccaagggcccaccaggcccacctgggaaggacggcttgcccggacacccggggcagcgcggagaagtggggtttcagggaaaaacagggccacccgggccacccggcgtggtcggacctcaaggggcagccggcgaaaccggccccatgggtgagcgcggccacccaggcccgccgggcccacctggcgagcaagggctgcccggcacggcagggaaggagggtacgaagggcgatcccggtcctcctggcgctccaggcaaggatgggcccgccgggctccgaggctttcctggagagagaggcttgcctggtaccgcagggggtccaggcctcaaaggtaatgagggtccaagcgggccacccggcccggcagggtcacctggggagaggggggcagcaggatccggggggcccatcggtccacctggtcgccctgggcctcaaggccctcccggcgctgccggggagaagggcgtgcccggcgagaaagggcctatcggacccacgggtcgggacggtgttcaaggccctgtaggcttgccagggcctgcgggacctccaggggtggcaggcgaagacggcgacaagggggaggtgggcgatccaggccagaaagggacaaagggcaacaagggagaacatggccctcctggacccccaggcccaattggtcctgtgggacagccaggagccgctggcgcagatggagagccaggtgcccgtggtcctcaggggcattttggtgccaagggggatgagggcactcgaggcttcaatggacctcccggtccgattggactccaagggttacccggacctagcggcgaaaagggagagacaggcgacgtgggcccaatgggtcctcctggcccccctggacctagaggccctgctggtcccaacggcgccgatggaccccagggacctccaggcggagttggaaacttaggccccccaggggaaaaaggtgagcctggtgagtctgggagccccgggatccagggcgaacccggcgttaagggaccaaggggggaaaggggcgaaaagggcgagagcggtcagcccggggaacctggtccccccgggccaaagggtcctacaggtgatgatggcccaaagggaaatcctgggccggtggggttccctggcgacccaggtccgcccggggaagggggccctagaggccaggacggagcaaagggcgatcgaggagaggatggagagccgggacagccaggttcaccgggccctacgggcgagaacggcccacctggtcccttaggcaagagaggcccggcggggtcacctgggagtgagggccggcagggggggaagggagccaaaggcgacccgggcgccatcggagcccctggaaagacaggcccagtagggcctgccggtcccgcaggcaagccgggccctgacgggctcaggggcctgccgggctccgttggccagcaaggtaggccaggcgcgacggggcaagccggaccgcccggaccagttggcccacccggactgcccgggctacgcggagacgccggagctaagggcgagaagggtcaccctggcttgataggcctgattggaccgcctggggagcagggagagaagggtgaccgcggccttcccggaccccaggggtcccccggccagaagggcgagatgggtatccctggcgcaagcgggcccataggaccaggaggtcctcccgggctgcctggccccgccggcccaaagggggcaaaaggtgcaactggtccaggaggacccaaaggcgaaaagggcgtccaagggccccctggtcatccagggcccccgggtgaggttattcagccgctgccaatccaaatgcctaaaaagacccgaagatcagtcgatgggtccaggctgatgcaggaagacgaagcaatcccgacgggcggcgcgcctggaagtcccggtggactggaagaaatcttcgggagtctggattctctccgagaggagatagaacaaatgcgcagacctacagggacacaggatagccccgcccggacctgtcaggacttaaaactgtgccatccggaactgcctgacggtgaatactgggttgatccaaaccagggatgtgcccgggatgcctttcgcgtcttttgtaattttacagccggcggagagacttgcgttactccccgagacgatgttacccaatttagttacgttgattctgaaggcagccctgtgggcgtcgtacaactaaccttcttgcgactcctgagcgttagcgcacatcaggacgtgtcttatccatgtagcggcgccgcacgtgacggccccctgaggttgagaggagcgaacgaggatgaactgtcccctgagacgtctccttacgtgaaggagtttcgggacggttgtcaaacacagcaaggccgcaccgtcctggaagttcgcactcctgtgctggagcagctacccgtcctcgacgcatccttttctgatctgggcgctccaccaagaaggggcggtgtgcttctggggccagtttgttttatggggtag

SEQ ID NO: 232518 - DNA, 5133 bp, Artificial Sequence
  derived and/or modified sequence
atggagaggtgtagtaggtgtcatagacttctgcttctgctgcctcttgttttgggactctccgcagctccaggttgggccggagcccctcccgtcgatgtgctgcgagctctgaggttcccgtcactccctgatggagtgaggcgcgccaagggaatctgtccagcggatgttgcttaccgcgtggcccgaccagctcagctctccgcccccaccagacagctctttcctggtggattcccgaaagacttctctctgctgactgtagtcagaacccgccccgggttgcaggctcctctgttaaccctgtactctgcccagggagtgcggcagctcggtttggaactgggaagaccagtgcgctttttatatgaagatcagactggacgcccacagcccccttctcaacccgtctttcgcggtctatccctggctgatgggaaatggcaccgtgtggcggtggccgtaaagggccagtctgtgactttaatcgtggattgtaagaaaagagtaactcgccctctgcctcgctctgctaggccagtgcttgatacacatggggttatcatatttggcgcaagaattttggacgaggaggttttcgaaggcgatgtgcaggagttagccatagtgcccggcgtgcaggccgcctatgagagttgtgaacagaaagagcttgaatgcgaaggaggccagagggaaaggccccagaaccaacagccccatcgcgcacagaggtcccctcagcaacagcctagtcggctgcaccgcccacagaaccaagaaccccagtcacaagacccaacccctggtgaggaagaggaaatcttggagtccagtctgctgcccccattagaggaagaacagaccgacttacaggtgccccccaccgcggatcgattccaggcagaggagtacggagagggcggcaccgacccgccagaagggccatacgactacacgtacggatacggagatgactatagggaagagaccgaattgggacctgccctgtctgcagagactgcccattctggcgccgccgcgcatggacctagaggtcttaagggagaaaaaggagaacccgccgtgctggaaccagggatgctggttgaaggcccacccggtcccgagggaccagccggactgatcggccctcctgggatccaaggtaatcccggccccgtcggcgaccccggtgaaaggggcccccctggtcgagctgggttgcccggcagcgatggagccccaggccccccgggaaccagcctcatgttaccattccgctttggcagcggtgggggcgacaagggccctgtagtggccgcccaggaggcacaggcccaggcgatactccagcaagcacggctggcgctcagaggtccacccggccccatgggctacacgggtagacctggccctttggggcagccaggctcccctggcctaaagggagaatccggagacctgggccctcaggggcctagaggaccccagggtcttacaggcccacccgggaaggcgggacggaggggaagagcgggagcggacggagctcgcggcatgccaggcgacccaggcgtgaaaggcgatcggggctttgacggactgccaggcctgcccggtgagaagggccacaggggagataccggtgcgcagggtttgcctggaccccccggggaggacggtgaacgtggcgacgatggtgaaatagggccccgcgggttaccaggagaatctggaccacgtgggctgctgggccccaaaggccccccaggaataccaggccccccaggcgtacgaggaatggatggtccacagggtcctaagggatccctgggcccacaaggggagcccggaccacccgggcagcagggcacgcccggcactcagggcctgccgggaccgcagggtgccatagggccacacggcgagaaggggccccagggtaagcctggtttgcccggaatgcccggcagcgacggacctcccggccacccaggaaaagaaggccccccggggacaaaggggaaccaggggcctagcggtcctcagggcccgttgggataccccggtccccgcggggtgaaaggagtagatggcattaggggcctgaagggacataagggggaaaaaggagaagatggcttccctgggtttaaaggagacatcggcgtcaagggcgaccgaggggaagtcggggtccctggcagtagaggggaggatggtcctgagggacccaaagggcgtacagggccgacaggggacccaggacctcccggactcatgggcgagaagggtaaattaggcgttcctggactacccggctatcccggcaggcagggaccaaaggggtcactcggcttcccggggtttcctggggcctctggggaaaagggggcccgagggctgtctggcaagagcggcccccgaggtgagagaggacctaccggcccgaggggccagaggggaccacggggagcgacaggaaagtcaggtgccaagggcacctccggaggggacggaccccacggaccccctggcgagcggggcttaccgggcccccagggacccaatgggtttccggggcctaagggtcctcctggccccccaggtaaggatggcctgcctgggcacccaggacagagaggagaggtaggcttccaagggaagacaggacctccaggaccacccggtgttgtggggccccagggggccgccggcgaaacggggcctatgggtgaacgtggtcaccccgggccaccggggcccccgggtgagcaaggactgccaggcacggctgggaaagaagggacgaagggagacccagggccccccggcgctcctgggaaagacggacctgctgggctccgggggttccccggcgagcgcggattgccagggaccgcggggggccccggactgaaggggaacgagggaccgtcaggtccaccagggccggccgggtcacccggcgagcgcggcgccgcaggtagcggaggaccgattggcccccctggccgccctggacctcaggggccccctggtgctgcaggcgaaaagggcgtgccaggggaaaaaggacccatcggcccgacaggcagggatggggtgcaagggcctgttggtctgcctggaccggcaggtcctcctggagtggctggggaagacggggacaaaggggaggttggggacccaggccagaagggcactaagggcaacaagggggaacatggaccccccggcccccccggcccaatcggtcctgtggggcagcccggcgctgcaggcgctgacggtgaaccgggagccaggggtcctcaggggcactttggtgctaagggtgatgaggggaccaggggattcaacggacctcctggtcccattggcctccaaggactgccgggtcctagtggcgagaagggagagacgggggacgtaggtcccatgggcccccccggcccaccgggccccagaggccctgctggacctaacggagccgacggcccgcagggcccccctggcggtgtgggcaatctcggccctccaggagaaaaaggagaaccgggtgagagcggctctcctggtattcagggtgaaccgggggtgaagggcccccgcggcgaacgcggcgagaaaggggagtctgggcaacccggagaaccgggacctccaggaccaaagggaccaaccggggacgacgggcctaaggggaaccccggaccggtgggttttccaggtgatcccggaccacccggggagggaggccctaggggccaagatggtgcgaaaggcgatcgaggcgaggatggcgaaccagggcaacctggctccccaggacccaccggcgaaaacggcccccctggtcctttggggaaaaggggccctgccggctcgcctgggagtgaggggcgccagggaggcaaaggagctaagggggaccccggtgcaataggcgcccccggaaagaccggcccagtgggtcccgcaggtcccgccggcaaacctggtccagatggccttaggggtctcccaggttctgtggggcagcagggtaggccgggcgcgaccggacaggccggtcccccgggcccagttggtcctcccggactgccagggctccgcggcgatgcaggcgccaagggagagaaagggcaccccggtctgatcggcttgatcggcccccctggcgagcagggtgaaaagggagatcgagggttgccagggccccaagggagtccaggtcagaagggcgagatgggaatacccggagccagcggccccattggcccgggaggaccgcccggtctgcccggccccgcaggaccgaagggcgctaagggcgccacagggcctggcggccctaaaggcgagaagggagtacagggcccccctggacatcctgggcctcccggcgaagtgatccagcccttgccaattcagatgcccaagaagacccggagaagtgtggatggcagcagactcatgcaagaggacgaagcaatacccaccggaggagcccccggttctcctggtggactggaggagatctttgggtctctagactctctacgtgaggagatcgaacagatgcgccgaccaactggcactcaggacagcccagcacggacatgtcaggatcttaaactctgtcacccagaactgcccgatggggagtactgggtggacccaaatcaaggttgcgcccgagatgcctttcgcgtgttctgtaacttcacagccggaggcgagacctgcgtgacaccacgggacgatgtaactcagtttagctacgtggatagcgaggggtctcccgtgggagtggtccagctcactttcctgcgtttactctcggtatcagctcatcaagacgtctcttacccttgctctggtgcagcccgagacggcccacttaggcttcgaggagccaacgaggacgagctaagcccagaaactagcccttatgttaaagaatttcgggatgggtgccagactcagcaggggcgcactgtcctcgaagttcggacgcctgtgctagagcaactaccagttctggatgcgtcattcagcgacctgggtgcccctcccaggaggggcggggtgctcctgggccccgtttgctttatgggctag

SEQ ID NO: 232519 - DNA, 5148 bp, Artificial Sequence
  derived and/or modified sequence
atggaaagatgctcgaggtgccataggttgctgttgctgttaccccttgtcctggggctctcggccgcccccggctgggccggtgcgccccctgttgatgttctgcgggcactgcggtttccaagcctgcccgacggagttcgacgggccaagggtatttgtcccgccgacgtggcctatagagtggcccgacctgcacaactgtcagccccaacccggcagttgtttccaggcggcttcccaaaggatttctcactgctgacggtggttcggacacgcccaggtcttcaagcaccgctcttgacactttattctgcccagggggtgcgtcaacttgggctcgagctggggaggcctgtgcgattcttgtacgaagaccagacaggcaggccccagcctccttcacagcccgtattcagaggcctcagtctggctgacggtaagtggcaccgcgtcgctgtggcggtgaagggacagtcagtgacattgatcgtcgactgtaaaaagcgcgtaacccgacccctgccacgctctgcaaggcctgtgctggacactcacggcgttattatatttggagcaagaatccttgatgaggaggtgtttgaaggagatgtccaagagttggccatagtgccaggtgttcaggccgcctatgaatcttgtgagcagaaggagctggagtgcgagggcggacagcgagaacgcccacagaatcagcagccccatcgcgcccaacggagcccccaacagcaaccaagtaggctccacagacctcagaaccaagagccccagtcccagcctaccgagagtttgtattacgactacaaacccccctactatgacgtgatgactacaggaacaactcccgattatcaggagcaaactgacttgcaggtaccccctaccgcagatcgcttccaagcggaggaatatggtgaaggcggaaccgacccccctgagggcccttatgattacacctacggctacggtgacgactaccgggaggaaacagagctgggcccggccctgagtgccgaaacagcccacagcggtgccgcggcacacggtccacgaggcctcaaaggggaaaagggtgagcctgcggtgctggagccaggcatgttggtcgagggacccccaggtccggagggcccagccggcctcatcggaccacccggaatccagggaaatccgggccctgtgggcgatcccggtgaaagggggccaccaggcagagccggccttccgggatccgacggtgcccccgggcctccggggacgtctcttatgctgccattccgctttggctcaggaggcggggacaagggacctgtggtggccgcacaagaagctcaggcacaggcgattctgcagcaagcaagactggcactgagaggacctcccggtccgatggggtatactgggcgtccgggccctcttggacagccaggcagtccaggcttaaagggagagtccggcgacctcgggcctcaggggcctagagggccacaaggacttactgggcctcctggcaaagcaggcagaagaggacgtgccggagccgacggcgccagagggatgcctggagacccgggagtgaagggtgatagggggttcgacgggttgcccggactgcctggcgagaaaggccaccgcggagacaccggcgcgcaggggttgccaggcccccctggcgaagatggcgagcggggtgacgatggagaaattggaccacgggggctgcctggagagtccggaccccgtggactcttgggccccaaggggcctcctgggatacctggccctcccggtgtccggggcatggacgggccccagggaccaaaaggatcattgggaccacagggtgagcctggtccccccggccagcaaggcacgccgggaacccagggcctccccggccctcagggtgccatagggcctcacggggagaaaggtccgcagggaaagccgggactgcctggcatgcccggaagtgatggtcctcctggccatcctggaaaagagggaccccctggcactaagggaaatcagggtccttctggaccacaaggccccttaggctatcctggccctaggggagtgaagggagttgacgggattagaggtctgaagggacataagggggaaaagggcgaggacggctttccaggcttcaaaggcgacattggcgtgaaaggggatagaggggaggtcggggtgccagggtcgcgaggggaggacggccccgagggtcccaaaggaagaactggtccgacaggtgaccccggaccgcccggcctcatgggcgagaagggaaagctcggtgtccccggattgccaggctatccgggtcgtcaaggcccgaagggtagcctgggcttcccgggcttccccggcgcttccggtgaaaaaggggccaggggactctctggcaagtcaggtcccagaggggaaaggggccctacagggccaaggggccagagaggccccagaggggccacgggaaaatctggcgccaaaggtacttccggaggagatggccctcatggcccaccgggagaacgcgggttgccgggcccgcagggtcctaatggcttcccaggcccgaaaggccctcctggcccccctggcaaggatgggcttcccggccatccaggtcagagaggcgaggtaggctttcagggaaagaccggacccccggggcctccaggtgtcgtggggccccaaggcgcagccggggagactggtcccatgggggaacggggtcatccaggcccccctggccctcccggagagcagggactgcccggcaccgcgggcaaggaggggaccaagggggatcccggccccccaggcgctcccggaaaggatggacctgctggcctgcggggcttccccggcgagagaggtctgcccgggacagcaggcgggcctggtttaaaagggaacgaaggcccatccggcccgccaggaccagcgggaagtccaggagaacggggcgcggccggcagcggcggtcccatcggaccacccggtaggcctggccctcaggggccgcccggagcagcaggggagaaaggagtgcccggggaaaaggggccaatcggccccacagggagagatggagttcagggacctgttgggttgcccgggcccgccggtccccctggcgtggcgggcgaagacggggacaagggtgaggtgggagatcccggacagaaaggcacgaaaggtaacaagggtgagcacggccctcctggacctcctggaccgattggtccggtcggtcagccgggcgctgcaggcgccgacggagagcctggtgcccgaggtccccagggtcacttcggggccaagggggacgaaggcacccgcgggtttaacggtccccccggccctattggcctgcaagggcttcctggccccagtggggaaaaaggggagaccggggatgtggggccaatgggccctcctggcccccccgggcctcgcggccctgcagggcctaacggagcagatggcccacagggtccaccagggggggttgggaacctcggccctcccggcgaaaaaggtgagccaggcgagtccggaagtcccgggatacagggcgaacctggggttaaaggaccgagaggcgaaaggggcgaaaaaggtgagtcggggcagcccggcgagcccggccctcccgggcccaaaggcccaaccggagacgatggaccaaaaggaaaccccggcccagttggtttccccggggaccctggtccccctggcgaaggaggtcccaggggacaagacggggcaaaaggagacagaggtgaggacggggaaccgggccagccagggagtcctggccctacaggagaaaatggcccaccggggcctctaggtaaacgcggtcccgctggcagtcctggctccgagggtcgccagggagggaaaggggcgaaaggtgaccctggcgccatcggcgccccaggaaagaccggtcccgtgggaccggcagggccagccggtaagccggggcctgacggtttgagggggctacccggttctgtagggcagcagggcagacctggagcgaccggccaggccggtcctcctggtccggtcggcccacccgggctgccgggtctacgcggtgacgcaggagcgaagggtgagaaaggacatcccggactgattggcctgattgggccgcccggggaacagggagagaagggagaccgaggactgcccggacctcagggcagtcccggccagaagggtgaaatgggcatccctggtgcgagcgggcctatagggcccggaggcccacccggattgcccggccctgctgggccaaaaggagctaaaggcgctacaggcccagggggcccgaaaggcgaaaagggagtgcagggccctccaggacatcctggccctcccggagaggtaattcagccactgcctatacaaatgcccaaaaaaaccagacgcagcgtcgacggtagtaggctcatgcaagaagatgaggctattcctacaggaggagcccctggctctccggggggtctggaggaaattttcggctccctggacagtttgcgggaggagatcgagcaaatgcgccgacctactggaacccaagatagtcccgcccgcacttgccaggacctcaaactgtgccacccagagttacccgacggcgagtactgggttgatcccaaccagggatgcgctcgggatgcctttagggtcttctgcaacttcacagctggtggggagacgtgcgtcaccccaagagatgatgtcacccagttcagctacgtggacagcgaggggtccccagtcggcgtcgtacagctgactttcctccggctgctcagtgttagcgctcatcaggacgtgtcctatccttgttctggcgccgcccgtgatggtcctctgagacttcgcggagctaatgaggatgagctgagtcccgaaaccagtccctatgttaaggaattccgcgacgggtgccagacccagcagggccgtactgtgctggaggtgagaacaccggtgttagaacaactgcctgtcctcgacgcctccttttcagacctgggggcacccccccggcgcgggggagtactgctcggtcccgtctgcttcatgggttag

SEQ ID NO: 232520 - DNA, 5148 bp, Artificial Sequence
  derived and/or modified sequence
atggagcgatgcagcagatgtcataggctcctgcttcttctaccccttgtcttgggactgtctgcagccccagggtgggcaggcgcgcctcccgttgacgtgttgcgggcccttcggtttcctagtctgcctgatggcgttcggcgggccaagggcatatgccccgctgacgtcgcttatagggtagcacgacccgcacagttaagcgcccccacaagacaactatttccagggggctttccaaaggatttctccttgctaacggtggttaggacgcgacctggcttgcaggccccgctcctgaccctttactctgcacaaggggtccggcagttggggttggagctgggaccaccggtccgatttctgtatgaggaccagaccggtcggccgcagccaccttcccagccggtgtttcgcgggctatccttggcagatggaaagtggcacagagtggccgtggcagtgaagggccagtccgtcaccctgattgttgattgtaaaaaacgtgtgaccaggcctctacccaggagcgcgcggccggtactcgatacacacggggtgatcatttttggagctaggattcttgatgaggaggtgtttgagggtgacgtccaagaactcgccattgttcctggggtacaagctgcttacgaaagctgcgagcagaaggagctggaatgcgagggaggacaacgagaaaggcctcagaatcagcagccccaccgcgcacagcgaagccctcagcagcagccctctagactgcatagaccacagaatcaggaaccacagagccagcccacagagagcctgtattacgattacaagcccccctattacgatgtgatgacaactggtaccacaccagattaccaggaacagaccgatctccaggtgccacctaccgccgatcgttttcaagctgaggagtacggcgaagggggcactgaccctccagaggggccctacgattatacatacggatatggggatgattatagagaggagacagagctggggccggcactctcggccgaaaccgcacattctggggccgcggctcatgggccgagaggactgaaaggagagaaaggtgaacccgccgtgctcgaaccggggatgctggtggaaggcccccctggacctgagggacctgccgggctgatcggacccccagggatacagggaaaccccgggccggtcggtgatcctggcgagcggggcccccccggccgcgcaggtctgccaggcagcgacggtgctccaggaccacctggcacctcactcatgcttccttttagattcgggtcaggaggcggagacaaaggtcccgttgtggctgctcaagaggctcaagcacaagccatactacagcaggcgagattggcactgcggggccccccagggcctatgggctacaccgggcgtccaggacctctggggcagccaggttcgcctggcctcaaaggggaatcgggtgacctcggcccacagggcccacgggggcctcaggggctcacaggccctccgggcaaggctggccgccgagggagggcaggcgccgacggtgccagaggaatgccaggtgatcctggcgtcaaaggagatagaggttttgacggtcttccagggctccctggtgagaaaggacatcggggagatacaggcgcccagggactgcccggtccccctggtgaagacggagaacgaggcgatgacggagagataggaccacgcggactcccaggagaaagcgggcctcggggtctcctcggacccaaaggtccacccggaataccaggacccccgggcgtacggggcatggacggtccccaagggcccaagggtagcctggggcctcagggagagcccggaccgcctggacagcaggggactccgggcacacaggggctccccgggccacagggtgccatcggcccccatggcgaaaaaggcccccaggggaagccaggtctcccagggatgcccggttcagacggacctccggggcaccccggtaaggagggtccgcctggaaccaagggaaaccagggccccagcgggccccagggccccctcggatacccagggcctagaggcgttaagggcgtagacgggattcgaggtctgaaaggccataaaggtgaaaaaggagaggacgggtttcctggttttaagggcgatattggcgtcaagggagaccgcggagaggtcggggttcctgggtcaagaggtgaagacggaccggaggggcctaaaggccggacagggcctaccggcgacccgggaccgcctggtctcatgggtgagaagggaaagttgggggttcccgggctgcctggctaccctggacgacaaggacctaaaggcagtttaggcttcccgggattcccgggtgctagcggagaaaagggcgcgcggggcttatccggaaagagtggaccgcgcggggagcggggccccaccggccctaggggccaacgaggccctaggggagctaccggcaagagcggagccaagggcacctcagggggcgacggcccccacggcccccctggggaaagagggttacccggcccccaggggccaaatgggttccccggacccaagggacctcctggccctcccggcaaggatggcttgcccggccacccaggacaaagaggcgaggtgggctttcagggaaagaccggtcctccaggaccgcctggcgtggtgggcccccaaggggcagctggcgagaccggccctatgggtgagcgtggccatccaggccccccagggcccccaggagagcaagggctgccgggcaccgcaggcaaggaagggaccaagggtgatccagggccccccggcgcaccagggaaagatggcccagccggcctgagaggattccctggtgaaagggggctgccgggtactgctggcggcccaggacttaagggcaacgaaggcccgtctgggcctccagggccagcgggttcccccggtgagagaggcgctgcaggctcaggtggcccaataggcccacccggccgcccggggcctcagggccctcctggagccgctggcgagaagggcgtgcccggtgagaaagggccaatcgggccaacgggcagagacggtgtgcagggacctgttggcctacccggcccagcaggacctccaggcgtggcgggggaggacggggacaaaggcgaagtgggcgatcctggtcaaaagggaaccaaaggaaacaagggtgaacacggaccaccaggacccccagggccgattggtcccgttggacaaccaggtgcagctggggctgacggtgagcccggcgctcgcggcccacagggacacttcggagccaaaggtgacgaggggacacgtggatttaatggcccgccgggtcctatcggactgcagggcctcccgggaccttcgggtgagaagggagaaactggagatgtggggcccatggggccccctggccctcccggaccacggggtccggccggaccgaatggcgcggatggcccacaagggcccccggggggggtcgggaatctcggcccaccgggagagaaaggtgaaccaggtgagtcagggtctcctggaatacagggtgaacctggggtgaagggccctcgcggggagcgcggcgaaaagggagagtccgggcagcccggagaacctggtccacccggaccaaaaggccctacaggagacgatgggcctaaagggaatccagggcccgtggggtttcccggggaccccgggcctccaggcgagggcggtccccgcggtcaggacggagcaaagggcgatcgaggtgaagatggtgaacctggacaaccaggctctccaggccctacaggcgagaacggaccccccgggcctctagggaagagaggcccagccggcagccctggatccgaggggcgacagggcggaaagggagcaaagggcgatcccggcgccatcggcgccccaggcaaaacaggccctgtggggccagcaggtcccgccggcaagccagggccagatggcctgcggggactgccaggcagtgtgggccagcaaggcaggcccggagctaccggccaggccggcccgccaggacccgtcggccccccaggcctgcctggtcttcggggtgatgccggggccaagggcgaaaaggggcatcccggcctgattggactaatcggtcctccaggagagcagggggaaaaaggcgatcgaggcttacctggacctcagggtagccctggtcaaaagggggagatggggattccaggagcctctggcccaatcggaccaggaggtccacccggcctgccagggcctgccggacccaagggggccaagggtgcgaccggccctggaggacccaagggggaaaaaggtgtccaagggccaccaggtcatccaggtccacccggtgaggtaatccaacccttgcccattcagatgcctaagaaaaccaggaggtccgtcgatgggagcaggttaatgcaagaagacgaagccattccaacaggtggggctcccggtagccccggtggcctggaagaaattttcggatctctggacagcttaagagaggaaatcgagcaaatgcgcaggcccacagggacccaagactccccagctcgcacctgccaggatttgaagctgtgtcaccccgaattgccggatggggaatactgggtcgacccgaaccagggttgtgccagggatgcgttccgcgttttctgcaacttcaccgcgggaggagagacctgtgtgacacctagagatgatgtgacccagttcagctatgtggattctgaaggctcaccagtaggggtggtgcagcttacgttcttaaggctgctctcggtgtcagcccatcaagatgtctcatacccttgttcaggcgccgcccgtgatggtccactccgcctccgcggcgccaatgaggacgaactgtctccggaaaccagcccctatgtgaaagagttcagagacggctgtcagacccagcaggggcgaactgttctggaggtccggactcccgtgctggagcagcttccagtcctggacgctagcttcagcgacctgggagcaccccctagacgaggtggagtgttgctaggtcctgtgtgcttcatgggctag

SEQ ID NO: 232521 - DNA, 5148 bp, Artificial Sequence
  derived and/or modified sequence
atggagagatgcagccggtgtcatcggctcctgcttctgctccctttggtgctcggcctgagtgcggcgccgggatgggccggagctcctccggtggatgtgctgcgggctctacggtttccgtcactccccgatggagtgcggcgcgccaaaggtatctgccccgccgacgtggcttatagggtggccaggcctgctcaattgagtgccccgacccgccagctcttccctggcggattccccaaggacttcagtctgttaaccgtcgtaaggactaggcccggtttgcaggccccgctgctgacactgtactcggcacaaggggtcaggcagctggggttggagttgggtagacccgtgcggtttttgtacgaggaccaaaccggaaggcctcagccacctagtcagcctgtttttagaggcctgagcctagccgatggaaagtggcatagagtcgctgtcgcggtgaagggccaaagcgtcaccctcatcgtcgactgtaagaaacgggtgacccgccctttaccccggtccgctcggcctgttttggatacccacggggtgataatcttcggagcgcgaatccttgacgaggaagtgtttgagggcgacgtccaggaactggcaattgtccccggtgtgcaggctgcctacgagagttgtgagcagaaggaactagagtgcgaaggaggccaacgggaaaggccgcagaatcagcaaccacatcgagctcagcgttctccacagcagcagccatctcgcctccacagaccccagaatcaggagccacaaagccagcctaccgaatccctatactacgattataaaccaccttattatgatgtcatgaccactgggaccacacctgattatcaggagcagacagatttgcaggttcctccaacagccgaccgttttcaggcggaagagtacggggaaggagggacggatccaccggaaggtccgtatgactacacatatggctacggtgacgactatcgagaggaaactgaacttggcccagccctgagcgccgaaacagctcacagcggcgctgcagctcatggtcccaggggtctcaagggggagaagggggaaccagctgttctagaacccggcatgttggtggagggtccacccggcccagaaggtcccgctggcctcataggccctcccggtatccaaggaaatcccggccctgtcggtgatcctggtgagaggggaccccctggtagagccggactgcccggcagcgatggggcacccgggccccccggaacaagtttgatgttaccctttagatttgggagcggaggtggggacaagggccccgtcgtagccgcccaggaggcacaagctcaggcaattctgcagcaggctcgactggctctgcgagggcctcctggccctatgggttacacaggccgacctgggccccttggccagcccggatcacccggtttgaaaggtgagagcggcgacttgggaccccagggccctcggggtccccagggacttacaggcccccctggcaaagccgggcggcggggaagggccggggcggatggcgctcgcggtatgcctggagatcccggtgtgaagggtgaccggggcttcgacggtctgccaggtctaccgggtgaaaagggccacagaggggataccggggcgcagggcctgcccggaccacctggagaggatggcgaacgtggggacgacggggaaattggcccccgagggctcccaggagaaagcggaccaagaggactgctgggaccaaaagggccgcctggcatacccgggcccccaggcgtgagaggtatggacggaccacagggccccaaaggctctttaggcccgcagggcgaaccggggccaccagggcagcaaggaactcccgggacgcagggtttaccaggacctcagggcgccataggaccacacggcgaaaagggcccccagggcaaaccaggtctgccgggcatgccaggttctgacgggccccctggacatccgggaaaggaggggcctccaggtactaaaggtaatcaaggcccaagcggcccacagggcccgctgggctaccccgggcccagaggagtcaaaggcgtagatgggatacgaggcctcaaagggcacaaaggggagaagggtgaggacggctttccaggatttaagggagacatcggcgtgaaaggtgacaggggcgaggtgggcgtgccaggcagccgcggggaagacggaccagaggggcccaaagggcggactggccccacaggtgacccgggcccacccgggttgatgggtgagaagggtaagctgggtgtgccgggacttcccgggtatccaggcagacaggggcctaaaggatctctaggattcccaggattccccggcgcctcaggcgagaaaggggctcgaggattgagcggaaagagcggcccgcggggagaaagagggcccactggacctagggggcaaaggggccctagaggagctactggtaagagcggggccaaaggaacatccggcggcgatgggcctcacggaccccctggagagcgcggtctgcccgggcctcagggccccaatggattccctggcccaaagggtccgcctggtcctcctggaaaggatggcctgccaggccatccggggcagaggggagaagtcggtttccagggcaagactggccctccaggcccacccggtgtagttggtccacaaggagccgccggcgaaacaggacccatgggagaacgagggcatccaggacctccagggccaccaggcgagcaggggctgcctggcaccgctggcaaagaagggacaaagggcgatcccggccctccaggagctcccgggaaagatgggccagctgggttacgaggcttccccggcgaaaggggcctgcctggtactgctggcggcccaggactcaaaggtaatgaggggcccagcggtccacccggccccgccggttctcccggggagcggggggcggcaggatcggggggtccgatcggtccccccggtagaccagggccccagggcccccccggagctgccggagagaagggcgtgccgggggagaagggcccgatcggccccaccggtagagatggagtgcagggccctgtaggcttaccaggaccagccgggcctccaggagtggcgggcgaggacggggataagggcgaggtcggcgatcctggtcagaaaggcacaaagggcaataaaggtgagcacgggcctcccggtccacccggacccatcggacccgtcggacagcctggagcggcgggggctgacggtgagcccggcgcccgtggaccccaagggcactttggggccaaaggggacgaggggactcgcggctttaatggacctcccgggccaataggcctgcaaggtctgcctggaccgtctggggaaaagggcgaaaccggagacgtaggccctatgggtcctccaggaccccccgggcccagagggccggcagggcctaatggcgctgacgggccacaggggccccctggaggggtcggcaatctgggtccccctggtgagaagggcgagcctggcgaatctgggagccctggtattcaaggtgaacctggagttaaaggtcccagaggagagaggggagaaaagggtgagagcgggcagccaggcgagcctgggcccccgggtccaaagggcccaacaggcgatgatgggcctaaaggaaatccaggccctgtgggattccctggcgaccccggacctcctggggagggcggcccaagaggtcaggacggcgcgaaaggagacagaggggaggacggagagccaggacagcctggctcccctggtcctaccggcgagaatggcccccccggccctcttgggaaaagggggcccgcagggagccccgggtccgagggtcgccaaggcggcaaaggcgccaagggtgacccgggggccatcggggcacccggcaaaacaggccccgtgggcccagcaggccctgcgggcaagcccggtcccgacggtttgcggggattgcccggctctgtaggccaacagggtcggcctggggctactgggcaagctgggccccctgggccggtgggtccacccggtttgccgggcctgcgtggtgacgcaggagccaaaggagaaaaaggccacccaggcctaatcggtttaattggaccgcccggcgaacagggagaaaaaggagaccgtggcctgccgggcccgcagggctctccagggcaaaagggcgagatgggcattccaggcgccagtggccctattggccctggaggaccacctgggctacctgggcccgcaggaccaaagggagctaaaggagcgacggggccaggggggcccaaaggggagaagggagttcagggcccccccggccaccctggacctcctggagaagtgatccaaccccttccaatccagatgcccaagaaaaccaggcggagcgttgacgggtctcgtcttatgcaagaggatgaagcgatcccaaccggaggtgcccccggttctcccggcggcctcgaagagatatttggatctctcgactccctgcgcgaggaaattgagcaaatgagacggccgacaggcactcaggattcccctgctcggacctgccaggatcttaagctgtgccaccctgaactaccggacggcgagtactgggtggatcctaaccagggttgtgcccgagatgctttccgcgtgttctgtaattttacagcaggtggagaaacctgtgtaacgcccagagacgatgtgacacagtttagttacgtggactccgaaggatctccggtgggtgtagtccagctcactttcttgaggctcctcagcgtaagtgcccaccaagatgtatcatatccatgttcaggcgccgcaagggacgggcctttaaggttaaggggagccaacgaggatgaacttagtccagaaactagtccctacgtgaaggaattcagggatgggtgccagacccagcagggacgcacagtgctggaagttcgcaccccggtcctggagcagctgccagtcttggacgcttcgtttagcgatttaggggcaccgcctcgtagaggcggcgtgctcctaggcccagtttgctttatggggtag

SEQ ID NO: 232522 - DNA, 5211 bp, Artificial Sequence
  derived and/or modified sequence
atggagcgctgcagccgctgccaccggctgctgctgctgctgcccctggtgctgggcctgtctgctgcccctggctgggccggggcccctcctgtggatgtgctgcgggccctgcgcttccccagcctgcctgatggagtgcggcgggccaagggcatctgcccagcagatgtggcctacagagtggcccggcctgcccagctgagcgcccccacccggcagctgtttcctgggggcttccccaaggacttcagcctgctgactgtggtgaggacccggcccggcctgcaggcccccctgctgaccctgtacagcgcccagggcgtgcggcagctgggcctggagctgggccggcctgtgcgcttcctgtatgaggaccagacaggccggccccagccccccagccagcctgtgttccggggcctgagcctggctgatggcaagtggcaccgggtggccgtggccgtgaagggccagagcgtgaccctcatcgtggactgcaagaagagggtgacccggcccctgcccaggtctgcccggcctgtgctggacacccacggcgtcatcatctttggagcccgcatcctggatgaggaggtgtttgaaggagatgtgcaggagctggccatcgtgcctggggtgcaggccgcctatgagagctgtgagcagaaggagctggagtgtgagggcggccagcgggagcggccccagaaccagcagccccaccgggcccagaggagcccccagcagcagcccagccggctgcaccggccccagaaccaggagccccagagccagcccacagagagcctgtactatgactatgagcccccctactatgatgtgatgaccaccggcaccaccccagactaccaggaccccaccccaggagaggaggaggagatcctggagagcagcctgctgccccccctggaggaggagcagacagacctgcaggtgcccccaacagctgaccgcttccaggccgaggagtatggagagggcggcacagatcctcctgagggcccctatgactacacctacggctatggagatgactaccgggaggagacagagctgggccctgccctgtctgctgagacagcccacagcggggccgccgcccacggcccccggggcctgaagggggagaagggggagcctgctgtgctggagcccggcatgctggtggagggccccccaggccctgagggccctgctggcctcatcggccccccaggcatccagggcaaccctggccctgtgggggaccctggagagcggggccccccaggccgggccggcctgcccggcagtgatggagcccctggccccccaggcaccagcctgatgctgcccttccgcttcggcagcggcggcggggacaagggccctgtggtggccgcccaggaggcccaggcccaggccatcctgcagcaggcccggctggccctgcggggccccccaggccccatgggctacacaggccggcccggccccctgggccagcccggcagccctggcctgaagggggagagcggggacctgggcccccagggcccccggggcccccagggcctgaccggccccccaggcaaggccggccggcggggccgggccggggctgatggagcccggggcatgcctggggaccccggggtgaagggggaccggggctttgatggcctgcccggcctgcctggagagaagggccacagaggagacaccggggcccagggcctgcccggccccccaggagaagatggagagagaggagatgatggagaaattggcccccggggcctgcctggagagagcggcccccggggcctgctgggccccaagggccccccaggcatccctggccccccaggagtgcggggcatggatggcccccagggccccaagggcagcctgggcccccagggcgagcccggccccccaggccagcagggcaccccaggcacccagggcctgcccggcccccagggcgccatcggcccccatggagagaagggcccccagggcaagccaggcctgcccggcatgcctggcagtgatggccccccaggccaccctgggaaggagggccccccaggcaccaagggcaaccagggccccagcggcccccagggccccctgggctacccaggcccccggggcgtgaagggcgtggatggcatccggggcctgaagggccacaagggggagaagggggaggatggcttccctggcttcaagggggacatcggcgtgaagggggacagaggagaggtgggcgtgcccggcagcagaggagaagatggccctgagggccccaagggccgcacaggccccaccggggaccccggccccccaggcctgatgggagagaagggcaagctgggcgtgcccggcctgcccggctacccaggccggcagggccccaagggcagcctgggcttccctggcttccctggggccagcggggagaagggggcccggggcctgagcggcaagagcggccccagaggagagcggggccccaccggcccccggggccagaggggccccaggggggccaccgggaagagcggggccaagggcaccagcggaggagatggcccccacggccccccaggagagcggggcctgcccggcccccagggccccaacggcttccctggccccaagggccccccaggccccccaggcaaggatggcctgcccggccaccctggccagagaggagaggtgggcttccagggcaagacaggccccccaggccccccaggagtggtgggcccccagggcgctgctggggagaccggccccatgggagagcggggccaccctggccccccaggccccccaggagagcagggcctgcctggaacagctgggaaggagggcaccaagggggaccccggccccccaggggcccctgggaaggatggccctgctggcctgcggggcttccctggagagcggggcctgcctggaacagctgggggccctggcctgaagggaaatgaaggccccagcggccccccaggccctgctggcagccctggagagagaggagctgctggcagcggcggccccatcggccccccaggccggcccggcccccagggccccccaggagctgctggggagaagggcgtgcctggagagaagggccccatcggccccaccggcagagatggagtgcagggccctgtgggcctgcccggccctgctggccccccaggagtggccggggaggatggagacaagggggaggtgggggaccccggccagaagggcaccaagggcaacaagggggagcacggccccccaggccccccaggccccatcggccctgtgggccagcctggagctgctggagcagatggagagcccggggcccggggcccccagggccactttggagccaagggagatgagggcacccggggcttcaatggacctcctggccccatcggcctgcagggcctgcccggccccagcggggagaagggggagactggagatgtgggccccatgggccccccaggccccccaggcccccggggccctgctggccccaatggagcagatggcccccagggccccccaggcggcgtgggcaacctgggccccccaggagagaagggggagcctggagagagcggcagccctggcatccagggcgagcccggggtgaagggccccagaggagagcggggggagaagggggagagcggccagcctggagagcccggccccccaggccccaagggccccactggagatgatggccccaagggcaaccctggccctgtgggcttccctggggaccccggccccccaggagagggcggcccccggggccaggatggagccaagggggacagaggagaagatggagagcccggccagcccggcagccctggccccaccggggagaatggacctcctggccccctgggcaagaggggccctgctggcagccctggcagcgagggccggcagggcggcaaaggagccaagggggaccccggggccatcggggcccctgggaagacaggccctgtgggccctgctggccctgctgggaagccaggcccagatggcctgcggggcctgcccggctctgtgggccagcagggccggcctggggccaccggccaggccggccccccaggccctgtgggccccccaggcctgcccggcctgcggggagatgctggggccaagggggagaagggccaccctggcctcatcggcctgattggccccccaggagagcagggcgagaagggggaccggggcctgcccggcccccagggcagccctggccagaagggggagatgggcatccctggggccagcggccccatcggccctgggggccccccaggcctgcccggccctgctggccccaagggggccaagggggccaccggccctgggggccccaagggggagaagggcgtgcagggccccccaggccaccctggccccccaggagaggtgatccagcccctgcccatccagatgcccaagaagaccaggagatctgtggatggcagccggctgatgcaggaggatgaggccatccccaccggcggggcccctggcagccctgggggcctggaggagatcttcggcagcctggacagcctgcgggaggagattgagcagatgaggcggcccaccggcacccaggacagccctgcccggacctgccaggacctgaagctgtgccaccctgagctgcctgatggagagtactgggtggaccccaaccagggctgtgccagagatgccttccgggtcttctgcaacttcaccgctggaggagagacctgtgtgaccccaagagatgatgtgacccagttctcctatgtggacagcgagggcagccctgtgggcgtggtgcagctgaccttcctgcggctgctgtctgtgtctgcccaccaggatgtgtcctacccctgcagcggggccgccagagatggccccctgcggctgcggggggccaatgaagatgagctgagccctgagaccagcccctacgtgaaggagttcagagatggctgccagacccagcagggccgcacagtgctggaggtgaggacccctgtgctggagcagctgcctgtgctggatgccagcttcagtgacctgggcgcccccccaagaagaggaggagtgctgctgggccctgtgtgcttcatgggctag

SEQ ID NO: 232523 - DNA, 5148 bp, Artificial Sequence
  derived and/or modified sequence
atggagcgctgcagccgctgccaccggctgctgctgctgctgcccctggtgctgggcctgtctgctgcccctggctgggccggggcccctcctgtggatgtgctgcgggccctgcgcttccccagcctgcctgatggagtgcggcgggccaagggcatctgcccagcagatgtggcctacagagtggcccggcctgcccagctgagcgcccccacccggcagctgtttcctgggggcttccccaaggacttcagcctgctgactgtggtgaggacccggcccggcctgcaggcccccctgctgaccctgtacagcgcccagggcgtgcggcagctgggcctggagctgggccggcctgtgcgcttcctgtatgaggaccagacaggccggccccagccccccagccagcctgtgttccggggcctgagcctggctgatggcaagtggcaccgggtggccgtggccgtgaagggccagagcgtgaccctcatcgtggactgcaagaagagggtgacccggcccctgcccaggtctgcccggcctgtgctggacacccacggcgtcatcatctttggagcccgcatcctggatgaggaggtgtttgaaggagatgtgcaggagctggccatcgtgcctggggtgcaggccgcctatgagagctgtgagcagaaggagctggagtgtgagggcggccagcgggagcggccccagaaccagcagccccaccgggcccagaggagcccccagcagcagcccagccggctgcaccggccccagaaccaggagccccagagccagcccacagagagcctgtactatgactatgagcccccctactatgatgtgatgaccaccggcaccaccccagactaccaggagcagacagacctgcaggtgcccccaacagctgaccgcttccaggccgaggagtatggagagggcggcacagaccccccagagggcccctatgactacacctacggctatggagatgactaccgggaggagacagagctgggccctgccctgtctgctgagacagcccacagcggggctgctgcccacggcccccggggcctgaagggggagaagggggagcctgctgtgctggagcccggcatgctggtggagggccccccaggccctgagggccctgctggcctgattggccccccaggcatccagggcaaccctggccctgtgggggaccccggggagcggggccccccaggccgggccggcctgcccggcagtgatggagcccctggccccccaggcaccagcctgatgctgcccttccgctttggaagtggcggcggggacaagggccctgtggtggccgcccaggaggcccaggcccaggccatcctgcagcaggcccggctggccctgcggggccccccaggccccatgggctacacaggccggcccggccccctgggccagcccggcagccctggcctgaagggggagagcggggacctgggcccccagggcccccggggcccccagggcctgactggacctcctgggaaggccggcagaagaggccgggccggggctgatggagcccggggcatgcctggggaccccggggtgaagggggaccggggctttgatggcctgcccggcctgcccggggagaagggccacagaggagacacaggagcccagggcctgcccggccccccaggagaagatggagagagaggagatgatggagagatcggcccccggggcctgcccggggagagcggcccccggggcctgctgggccccaagggccccccaggcatccctggccccccaggagtgcggggcatggatggcccccagggccccaagggcagcctgggcccccagggcgagcccggccccccaggccagcagggcaccccaggcacccagggcctgcccggcccccagggcgccatcggcccccacggggagaagggcccccagggcaagccaggcctgcccggcatgcctggcagtgatggccccccaggccaccctgggaaggagggccccccaggcaccaagggcaaccagggccccagcggcccccagggccccctgggctacccaggcccccggggcgtgaagggcgtggatggcatccggggcctgaagggccacaagggggagaagggagaagatggcttccctggcttcaagggggacattggagtgaagggggacagaggagaggtgggcgtgcccggcagcagaggagaagatggccctgagggccccaagggccgcacaggccccactggagaccccggccccccaggcctgatgggagagaagggcaagctgggcgtgcccggcctgcccggctacccaggccggcagggccccaagggcagcctgggcttccctggcttccctggggccagcggggagaagggggcccggggcctgagcggcaagagcggccccagaggagagcggggccccaccggcccccggggccagaggggccccaggggggccaccgggaagagcggggccaagggcaccagcggaggagatggcccccacggccccccaggagagcggggcctgcccggcccccagggccccaacggcttccctggccccaagggccccccaggccccccaggcaaggatggcctgcccggccaccctggccagagaggagaggtgggcttccagggcaagacaggccccccaggccccccaggagtggtgggcccccagggcgccgccggggagaccggccccatgggagagcggggccaccctggccccccaggccccccaggagagcagggcctgcccggcacagctgggaaggagggcaccaagggggaccccggccccccaggggcccctgggaaggatggccctgctggcctgcggggcttccctggagagcggggcctgcccggcacagctgggggccctggcctgaagggaaatgaaggccccagcggccccccaggccctgctggcagccctggagagagaggagctgctggcagcggcggccccatcggccccccaggccggcccggcccccagggccccccaggagctgctggggagaagggcgtgcctggagagaagggccccatcggccccaccggcagagatggagtgcagggccctgtgggcctgcccggccctgctggccccccaggagtggccggagaagatggagacaagggggaggtgggggaccccggccagaagggcaccaagggcaacaagggggagcacggccccccaggccccccaggccccatcggccctgtgggccagcccggggctgctggagcagatggagagcccggggcccggggcccccagggccactttggagccaagggagatgagggcacccggggcttcaacggccccccaggccccatcggcctgcagggcctgcccggccccagcggggagaagggggagactggagatgtgggccccatgggccccccaggccccccaggcccccggggccctgctggccccaacggggctgatggcccccagggccccccaggaggagtgggcaacctgggccccccaggagagaagggggagcccggggagagcggcagccctggcatccagggcgagcccggggtgaagggccccagaggagagcggggggagaagggggagagcggccagcccggggagcccggccccccaggccccaagggccccactggagatgatggccccaagggcaaccctggccctgtgggcttccctggggaccccggccccccaggagagggcggcccccggggccaggatggagccaagggggacagaggagaagatggagagcccggccagcccggcagccctggccccactggagaaaatggccccccaggccccctgggcaagaggggccctgctggcagccctggcagcgagggccggcagggcggcaagggggccaagggggaccccggggccatcggggcccctgggaagacaggccctgtgggccctgctggccctgctgggaagccaggcccagatggcctgcggggcctgcccggctctgtgggccagcagggccggcctggggccaccggccaggccggccccccaggccctgtgggccccccaggcctgcccggcctgcggggagatgctggggccaagggggagaagggccaccctggcctgattggcctcatcggccccccaggagagcagggcgagaagggggaccggggcctgcccggcccccagggcagccctggccagaagggggagatgggcatccctggggccagcggccccatcggccctgggggccccccaggcctgcccggccctgctggccccaagggggccaagggggccactggacctgggggccccaagggggagaagggcgtgcagggccccccaggccaccctggccccccaggagaggtgatccagcccctgcccatccagatgcccaagaagacccggcgctctgtggatggcagccggctgatgcaggaggatgaggccatccccactggaggagcccctggcagccctgggggcctggaggagatcttcggcagcctggacagcctgcgggaggagattgagcagatgagaagacccaccggcacccaggacagccctgcccggacctgccaggacctgaagctgtgccaccctgagctgcctgatggagagtactgggtggaccccaaccagggctgtgccagagatgccttccgggtcttctgcaacttcaccgctggaggagagacctgtgtgaccccaagagatgatgtgacccagttctcctatgtggacagcgagggcagccctgtgggcgtggtgcagctgaccttcctgcggctgctgtctgtgtctgcccaccaggatgtgtcctacccctgcagcggggccgccagagatggccccctgcggctgcggggggccaatgaagatgagctgagccctgagaccagcccctacgtgaaggagttcagagatggctgccagacccagcagggccgcacagtgctggaggtgaggacccctgtgctggagcagctgcctgtgctggatgccagcttcagtgacctgggcgccccaccccggcggggcggcgtgctgctgggccctgtgtgcttcatgggctag

SEQ ID NO: 232524 - DNA, 5070 bp, Artificial Sequence
  derived and/or modified sequence
atggagcgctgcagccgctgccaccggctgctgctgctgctgcccctggtgctgggcctgtctgctgcccctggctgggccggggcccctcctgtggatgtgctgcgggccctgcgcttccccagcctgcctgatggagtgcggcgggccaagggcatctgcccagcagatgtggcctacagagtggcccggcctgcccagctgagcgcccccacccggcagctgtttcctgggggcttccccaaggacttcagcctgctgactgtggtgaggacccggcccggcctgcaggcccccctgctgaccctgtacagcgcccagggcgtgcggcagctgggcctggagctgggccggcctgtgcgcttcctgtatgaggaccagacaggccggccccagccccccagccagcctgtgttccggggcctgagcctggctgatggcaagtggcaccgggtggccgtggccgtgaagggccagagcgtgaccctcatcgtggactgcaagaagagggtgacccggcccctgcccaggtctgcccggcctgtgctggacacccacggcgtcatcatctttggagcccgcatcctggatgaggaggtgtttgaaggagatgtgcaggagctggccatcgtgcctggggtgcaggccgcctatgagagctgtgagcagaaggagctggagtgtgagggcggccagcgggagcggccccagaaccagcagccccaccgggcccagaggagcccccagcagcagcccagccggctgcaccggccccagaaccaggagccccagagccaggagcagacagacctgcaggtgcccccaacagctgaccgcttccaggccgaggagtatggagagggcggcacagaccccccagagggcccctatgactacacctacggctatggagatgactaccgggaggagacagagctgggccctgccctgtctgctgagacagcccacagcggggctgctgcccacggcccccggggcctgaagggggagaagggggagcctgctgtgctggagcccggcatgctggtggagggccccccaggccctgagggccctgctggcctgattggccccccaggcatccagggcaaccctggccctgtgggggaccccggggagcggggccccccaggccgggccggcctgcccggcagtgatggagcccctggccccccaggcaccagcctgatgctgcccttccgctttggaagtggcggcggggacaagggccctgtggtggccgcccaggaggcccaggcccaggccatcctgcagcaggcccggctggccctgcggggccccccaggccccatgggctacacaggccggcccggccccctgggccagcccggcagccctggcctgaagggggagagcggggacctgggcccccagggcccccggggcccccagggcctgactggacctcctgggaaggccggcagaagaggccgggccggggctgatggagcccggggcatgcctggggaccccggggtgaagggggaccggggctttgatggcctgcccggcctgcccggggagaagggccacagaggagacacaggagcccagggcctgcccggccccccaggagaagatggagagagaggagatgatggagagatcggcccccggggcctgcccggggagagcggcccccggggcctgctgggccccaagggccccccaggcatccctggccccccaggagtgcggggcatggatggcccccagggccccaagggcagcctgggcccccagggcgagcccggccccccaggccagcagggcaccccaggcacccagggcctgcccggcccccagggcgccatcggcccccacggggagaagggcccccagggcaagccaggcctgcccggcatgcctggcagtgatggccccccaggccaccctgggaaggagggccccccaggcaccaagggcaaccagggccccagcggcccccagggccccctgggctacccaggcccccggggcgtgaagggcgtggatggcatccggggcctgaagggccacaagggggagaagggagaagatggcttccctggcttcaagggggacattggagtgaagggggacagaggagaggtgggcgtgcccggcagcagaggagaagatggccctgagggccccaagggccgcacaggccccactggagaccccggccccccaggcctgatgggagagaagggcaagctgggcgtgcccggcctgcccggctacccaggccggcagggccccaagggcagcctgggcttccctggcttccctggggccagcggggagaagggggcccggggcctgagcggcaagagcggccccagaggagagcggggccccaccggcccccggggccagaggggccccaggggggccaccgggaagagcggggccaagggcaccagcggaggagatggcccccacggccccccaggagagcggggcctgcccggcccccagggccccaacggcttccctggccccaagggccccccaggccccccaggcaaggatggcctgcccggccaccctggccagagaggagaggtgggcttccagggcaagacaggccccccaggccccccaggagtggtgggcccccagggcgccgccggggagaccggccccatgggagagcggggccaccctggccccccaggccccccaggagagcagggcctgcccggcacagctgggaaggagggcaccaagggggaccccggccccccaggggcccctgggaaggatggccctgctggcctgcggggcttccctggagagcggggcctgcccggcacagctgggggccctggcctgaagggaaatgaaggccccagcggccccccaggccctgctggcagccctggagagagaggagctgctggcagcggcggccccatcggccccccaggccggcccggcccccagggccccccaggagctgctggggagaagggcgtgcctggagagaagggccccatcggccccaccggcagagatggagtgcagggccctgtgggcctgcccggccctgctggccccccaggagtggccggagaagatggagacaagggggaggtgggggaccccggccagaagggcaccaagggcaacaagggggagcacggccccccaggccccccaggccccatcggccctgtgggccagcccggggctgctggagcagatggagagcccggggcccggggcccccagggccactttggagccaagggagatgagggcacccggggcttcaacggccccccaggccccatcggcctgcagggcctgcccggccccagcggggagaagggggagactggagatgtgggccccatgggccccccaggccccccaggcccccggggccctgctggccccaacggggctgatggcccccagggccccccaggaggagtgggcaacctgggccccccaggagagaagggggagcccggggagagcggcagccctggcatccagggcgagcccggggtgaagggccccagaggagagcggggggagaagggggagagcggccagcccggggagcccggccccccaggccccaagggccccactggagatgatggccccaagggcaaccctggccctgtgggcttccctggggaccccggccccccaggagagggcggcccccggggccaggatggagccaagggggacagaggagaagatggagagcccggccagcccggcagccctggccccactggagaaaatggccccccaggccccctgggcaagaggggccctgctggcagccctggcagcgagggccggcagggcggcaagggggccaagggggaccccggggccatcggggcccctgggaagacaggccctgtgggccctgctggccctgctgggaagccaggcccagatggcctgcggggcctgcccggctctgtgggccagcagggccggcctggggccaccggccaggccggccccccaggccctgtgggccccccaggcctgcccggcctgcggggagatgctggggccaagggggagaagggccaccctggcctgattggcctcatcggccccccaggagagcagggcgagaagggggaccggggcctgcccggcccccagggcagccctggccagaagggggagatgggcatccctggggccagcggccccatcggccctgggggccccccaggcctgcccggccctgctggccccaagggggccaagggggccactggacctgggggccccaagggggagaagggcgtgcagggccccccaggccaccctggccccccaggagaggtgatccagcccctgcccatccagatgcccaagaagacccggcgctctgtggatggcagccggctgatgcaggaggatgaggccatccccactggaggagcccctggcagccctgggggcctggaggagatcttcggcagcctggacagcctgcgggaggagattgagcagatgagaagacccaccggcacccaggacagccctgcccggacctgccaggacctgaagctgtgccaccctgagctgcctgatggagagtactgggtggaccccaaccagggctgtgccagagatgccttccgggtcttctgcaacttcaccgctggaggagagacctgtgtgaccccaagagatgatgtgacccagttctcctatgtggacagcgagggcagccctgtgggcgtggtgcagctgaccttcctgcggctgctgtctgtgtctgcccaccaggatgtgtcctacccctgcagcggggccgccagagatggccccctgcggctgcggggggccaatgaagatgagctgagccctgagaccagcccctacgtgaaggagttcagagatggctgccagacccagcagggccgcacagtgctggaggtgaggacccctgtgctggagcagctgcctgtgctggatgccagcttcagtgacctgggcgccccaccccggcggggcggcgtgctgctgggccctgtgtgcttcatgggctag

SEQ ID NO: 232525 - DNA, 5133 bp, Artificial Sequence
  derived and/or modified sequence
atggagcgctgcagccgctgccaccggctgctgctgctgctgcccctggtgctgggcctgtctgctgcccctggctgggccggggcccctcctgtggatgtgctgcgggccctgcgcttccccagcctgcctgatggagtgcggcgggccaagggcatctgcccagcagatgtggcctacagagtggcccggcctgcccagctgagcgcccccacccggcagctgtttcctgggggcttccccaaggacttcagcctgctgactgtggtgaggacccggcccggcctgcaggcccccctgctgaccctgtacagcgcccagggcgtgcggcagctgggcctggagctgggccggcctgtgcgcttcctgtatgaggaccagacaggccggccccagccccccagccagcctgtgttccggggcctgagcctggctgatggcaagtggcaccgggtggccgtggccgtgaagggccagagcgtgaccctcatcgtggactgcaagaagagggtgacccggcccctgcccaggtctgcccggcctgtgctggacacccacggcgtcatcatctttggagcccgcatcctggatgaggaggtgtttgaaggagatgtgcaggagctggccatcgtgcctggggtgcaggccgcctatgagagctgtgagcagaaggagctggagtgtgagggcggccagcgggagcggccccagaaccagcagccccaccgggcccagaggagcccccagcagcagcccagccggctgcaccggccccagaaccaggagccccagagccaggaccccaccccaggagaggaggaggagatcctggagagcagcctgctgccccccctggaggaggagcagacagacctgcaggtgcccccaacagctgaccgcttccaggccgaggagtatggagagggcggcacagatcctcctgagggcccctatgactacacctacggctatggagatgactaccgggaggagacagagctgggccctgccctgtctgctgagacagcccacagcggggccgccgcccacggcccccggggcctgaagggggagaagggggagcctgctgtgctggagcccggcatgctggtggagggccccccaggccctgagggccctgctggcctcatcggccccccaggcatccagggcaaccctggccctgtgggggaccctggagagcggggccccccaggccgggccggcctgcccggcagtgatggagcccctggccccccaggcaccagcctgatgctgcccttccgcttcggcagcggcggcggggacaagggccctgtggtggccgcccaggaggcccaggcccaggccatcctgcagcaggcccggctggccctgcggggccccccaggccccatgggctacacaggccggcccggccccctgggccagcccggcagccctggcctgaagggggagagcggggacctgggcccccagggcccccggggcccccagggcctgaccggccccccaggcaaggccggccggcggggccgggccggggctgatggagcccggggcatgcctggggaccccggggtgaagggggaccggggctttgatggcctgcccggcctgcctggagagaagggccacagaggagacaccggggcccagggcctgcccggccccccaggagaagatggagagagaggagatgatggagaaattggcccccggggcctgcctggagagagcggcccccggggcctgctgggccccaagggccccccaggcatccctggccccccaggagtgcggggcatggatggcccccagggccccaagggcagcctgggcccccagggcgagcccggccccccaggccagcagggcaccccaggcacccagggcctgcccggcccccagggcgccatcggcccccatggagagaagggcccccagggcaagccaggcctgcccggcatgcctggcagtgatggccccccaggccaccctgggaaggagggccccccaggcaccaagggcaaccagggccccagcggcccccagggccccctgggctacccaggcccccggggcgtgaagggcgtggatggcatccggggcctgaagggccacaagggggagaagggggaggatggcttccctggcttcaagggggacatcggcgtgaagggggacagaggagaggtgggcgtgcccggcagcagaggagaagatggccctgagggccccaagggccgcacaggccccaccggggaccccggccccccaggcctgatgggagagaagggcaagctgggcgtgcccggcctgcccggctacccaggccggcagggccccaagggcagcctgggcttccctggcttccctggggccagcggggagaagggggcccggggcctgagcggcaagagcggccccagaggagagcggggccccaccggcccccggggccagaggggccccaggggggccaccgggaagagcggggccaagggcaccagcggaggagatggcccccacggccccccaggagagcggggcctgcccggcccccagggccccaacggcttccctggccccaagggccccccaggccccccaggcaaggatggcctgcccggccaccctggccagagaggagaggtgggcttccagggcaagacaggccccccaggccccccaggagtggtgggcccccagggcgctgctggggagaccggccccatgggagagcggggccaccctggccccccaggccccccaggagagcagggcctgcctggaacagctgggaaggagggcaccaagggggaccccggccccccaggggcccctgggaaggatggccctgctggcctgcggggcttccctggagagcggggcctgcctggaacagctgggggccctggcctgaagggaaatgaaggccccagcggccccccaggccctgctggcagccctggagagagaggagctgctggcagcggcggccccatcggccccccaggccggcccggcccccagggccccccaggagctgctggggagaagggcgtgcctggagagaagggccccatcggccccaccggcagagatggagtgcagggccctgtgggcctgcccggccctgctggccccccaggagtggccggggaggatggagacaagggggaggtgggggaccccggccagaagggcaccaagggcaacaagggggagcacggccccccaggccccccaggccccatcggccctgtgggccagcctggagctgctggagcagatggagagcccggggcccggggcccccagggccactttggagccaagggagatgagggcacccggggcttcaatggacctcctggccccatcggcctgcagggcctgcccggccccagcggggagaagggggagactggagatgtgggccccatgggccccccaggccccccaggcccccggggccctgctggccccaatggagcagatggcccccagggccccccaggcggcgtgggcaacctgggccccccaggagagaagggggagcctggagagagcggcagccctggcatccagggcgagcccggggtgaagggccccagaggagagcggggggagaagggggagagcggccagcctggagagcccggccccccaggccccaagggccccactggagatgatggccccaagggcaaccctggccctgtgggcttccctggggaccccggccccccaggagagggcggcccccggggccaggatggagccaagggggacagaggagaagatggagagcccggccagcccggcagccctggccccaccggggagaatggacctcctggccccctgggcaagaggggccctgctggcagccctggcagcgagggccggcagggcggcaaaggagccaagggggaccccggggccatcggggcccctgggaagacaggccctgtgggccctgctggccctgctgggaagccaggcccagatggcctgcggggcctgcccggctctgtgggccagcagggccggcctggggccaccggccaggccggccccccaggccctgtgggccccccaggcctgcccggcctgcggggagatgctggggccaagggggagaagggccaccctggcctcatcggcctgattggccccccaggagagcagggcgagaagggggaccggggcctgcccggcccccagggcagccctggccagaagggggagatgggcatccctggggccagcggccccatcggccctgggggccccccaggcctgcccggccctgctggccccaagggggccaagggggccaccggccctgggggccccaagggggagaagggcgtgcagggccccccaggccaccctggccccccaggagaggtgatccagcccctgcccatccagatgcccaagaagaccaggagatctgtggatggcagccggctgatgcaggaggatgaggccatccccaccggcggggcccctggcagccctgggggcctggaggagatcttcggcagcctggacagcctgcgggaggagattgagcagatgaggcggcccaccggcacccaggacagccctgcccggacctgccaggacctgaagctgtgccaccctgagctgcctgatggagagtactgggtggaccccaaccagggctgtgccagagatgccttccgggtcttctgcaacttcaccgctggaggagagacctgtgtgaccccaagagatgatgtgacccagttctcctatgtggacagcgagggcagccctgtgggcgtggtgcagctgaccttcctgcggctgctgtctgtgtctgcccaccaggatgtgtcctacccctgcagcggggccgccagagatggccccctgcggctgcggggggccaatgaagatgagctgagccctgagaccagcccctacgtgaaggagttcagagatggctgccagacccagcagggccgcacagtgctggaggtgaggacccctgtgctggagcagctgcctgtgctggatgccagcttcagtgacctgggcgcccccccaagaagaggaggagtgctgctgggccctgtgtgcttcatgggctag

SEQ ID NO: 232526 - DNA, 1875 bp, Artificial Sequence
  derived and/or modified sequence
atggagcgctgcagccgctgccaccggctgctgctgctgctgcccctggtgctgggcctgtctgctgcccctggctgggccggggcccctcctgtggatgtgctgcgggccctgcgcttccccagcctgcctgatggagtgcggcgggccaagggcatctgcccagcagatgtggcctacagagtggcccggcctgcccagctgagcgcccccacccggcagctgtttcctgggggcttccccaaggacttcagcctgctgactgtggtgaggacccggcccggcctgcaggcccccctgctgaccctgtacagcgcccagggcgtgcggcagctgggcctggagctgggccggcctgtgcgcttcctgtatgaggaccagacaggccggccccagccccccagccagcctgtgttccggggcctgagcctggctgatggcaagtggcaccgggtggccgtggccgtgaagggccagagcgtgaccctcatcgtggactgcaagaagagggtgacccggcccctgcccaggtctgcccggcctgtgctggacacccacggcgtcatcatctttggagcccgcatcctggatgaggaggtgtttgaaggagatgtgcaggagctggccatcgtgcctggggtgcaggccgcctatgagagctgtgagcagaaggagctggagtgtgagggcggccagcgggagcggccccagaaccagcagccccaccgggcccagaggagcccccagcagcagcccagccggctgcaccggccccagaaccaggagccccagagccagcccacagagagcctgtactatgactacaagccaccctactatgatgtgatgaccaccggcaccaccccagactaccaggaccccaccccaggagaggaggaggagatcctggagagcagcctgctgccccccctggaggaggagcagacagacctgcaggtgcccccaacagctgaccgcttccaggccgaggagtatggagagggcggcacagatcctcctgagggcccctatgactacacctacggctatggagatgactaccgggaggagacagagctgggccctgccctgtctgctgagacagcccacagcggggccgccgcccacggcccccggggcctgaagggggagaagggggagcctgctgtgctggagcccggcatgctggtggagggccccccaggccctgagggccctgctggcctcatcggccccccaggcatccagggcaaccctggccctgtgggggaccctggagagcggggccccccaggccgggccggcctgcccggcagtgatggagcccctggccccccaggcaccagcctgatgctgcccttccgcttcggcagcggcggcggggacaagggccctgtggtggccgcccaggaggcccaggcccaggccatcctgcagcaggcccggctggccctgcggggccccccaggccccatgggctacacaggccggcccggccccctgggccagcccggcagccctggcctgaagggggagagcggggacctgggcccccagggcccccggggcccccagggcctgaccggccccccaggcaaggccggccggcggggccgggccggggctgatggagcccggggcatgcctggggaccccggggtgaagggggaccggggctttgatggcctgcccggcctgcctggagagaagggccacagaggagacaccggggcccagggcctgcccggccccccaggagaagatggagagagaggagatgatggagaaattggcccccggggcctgcctggagagagcggcccccggggcctgctgggccccaagggccccccaggcatccctggccccccatag

SEQ ID NO: 232527 - DNA, 1875 bp, Artificial Sequence
  derived and/or modified sequence
atggagcgctgcagccgctgccaccggctgctgctgctgctgcccctggtgctgggcctgtctgctgcccctggctgggccggggcccctcctgtggatgtgctgcgggccctgcgcttccccagcctgcctgatggagtgcggcgggccaagggcatctgcccagcagatgtggcctacagagtggcccggcctgcccagctgagcgcccccacccggcagctgtttcctgggggcttccccaaggacttcagcctgctgactgtggtgaggacccggcccggcctgcaggcccccctgctgaccctgtacagcgcccagggcgtgcggcagctgggcctggagctgggccggcctgtgcgcttcctgtatgaggaccagacaggccggccccagccccccagccagcctgtgttccggggcctgagcctggctgatggcaagtggcaccgggtggccgtggccgtgaagggccagagcgtgaccctcatcgtggactgcaagaagagggtgacccggcccctgcccaggtctgcccggcctgtgctggacacccacggcgtcatcatctttggagcccgcatcctggatgaggaggtgtttgaaggagatgtgcaggagctggccatcgtgcctggggtgcaggccgcctatgagagctgtgagcagaaggagctggagtgtgagggcggccagcgggagcggccccagaaccagcagccccaccgggcccagaggagcccccagcagcagcccagccggctgcaccggccccagaaccaggagccccagagccagcccacagagagcctgtactatgactatgagcccccctactatgatgtgatgaccaccggcaccaccccagactaccaggaccccaccccaggagaggaggaggagatcctggagagcagcctgctgccccccctggaggaggagcagacagacctgcaggtgcccccaacagctgaccgcttccaggccgaggagtatggagagggcggcacagatcctcctgagggcccctatgactacacctacggctatggagatgactaccgggaggagacagagctgggccctgccctgtctgctgagacagcccacagcggggccgccgcccacggcccccggggcctgaagggggagaagggggagcctgctgtgctggagcccggcatgctggtggagggccccccaggccctgagggccctgctggcctcatcggccccccaggcatccagggcaaccctggccctgtgggggaccctggagagcggggccccccaggccgggccggcctgcccggcagtgatggagcccctggccccccaggcaccagcctgatgctgcccttccgcttcggcagcggcggcggggacaagggccctgtggtggccgcccaggaggcccaggcccaggccatcctgcagcaggcccggctggccctgcggggccccccaggccccatgggctacacaggccggcccggccccctgggccagcccggcagccctggcctgaagggggagagcggggacctgggcccccagggcccccggggcccccagggcctgaccggccccccaggcaaggccggccggcggggccgggccggggctgatggagcccggggcatgcctggggaccccggggtgaagggggaccggggctttgatggcctgcccggcctgcctggagagaagggccacagaggagacaccggggcccagggcctgcccggccccccaggagaagatggagagagaggagatgatggagaaattggcccccggggcctgcctggagagagcggcccccggggcctgctgggccccaagggccccccaggcatccctggccccccatag

SEQ ID NO: 232528 - DNA, 1794 bp, Artificial Sequence
  derived and/or modified sequence
tgagcccctcctgtggatgtgctgcgggccctgcgcttccccagcctgcctgatggagtgagaagagccaagggcatctgcccagcagatgtggcctacagagtggcccggcctgcccagctgagcgcccccacccggcagctgtttcctgggggcttccccaaggacttcagcctgctgactgtggtgaggaccaggcctggcctgcaggcccccctgctgaccctgtacagcgcccagggcgtgcggcagctgggcctggagctgggccggcctgtgcgcttcctgtatgaggaccagacaggccggccccagccccccagccagcccgtcttccggggcctgagcctggctgatggcaagtggcaccgggtggccgtggccgtgaagggccagagcgtgaccctgattgtggactgcaagaagagggtgacccggcccctgcccaggtctgcccggcctgtgctggacacccatggagtcatcatctttggagcccgcatcctggatgaggaggtgtttgaaggagatgtgcaggagctggccatcgtgcctggggtgcaggccgcctatgagagctgtgagcagaaggagctggagtgtgagggcggccagcgggagcggccccagaaccagcagccccaccgggcccagaggagcccccagcagcagcccagccggctgcaccggccccagaaccaggagccccagagccagcccacagagagcctgtactatgactacaagccaccctactatgatgtgatgaccaccggcaccaccccagactaccaggaccccaccccaggagaggaggaggagatcctggagagcagcctgctgccccccctggaggaggagcagacagacctgcaggtgcccccaacagctgaccgcttccaggccgaggagtatggagagggcggcacagaccccccagagggcccctatgactacacctacggctatggagatgactaccgggaggagacagagctgggccctgccctgtctgctgagacagcccacagcggggctgctgcccacggcccccggggcctgaagggggagaagggggagcctgctgtgctggagcccggcatgctggtggagggccccccaggccctgagggccctgctggcctgattggccccccaggcatccagggcaaccctggccctgtgggggaccccggggagcggggccccccaggccgggccggcctgcccggcagtgatggagcccctggccccccaggcaccagcctgatgctgcccttccgctttggaagtggcggcggggacaagggccctgtggtggccgcccaggaggcccaggcccaggccatcctgcagcaggcccggctggccctgcggggccccccaggccccatgggctacacaggccggcccggccccctgggccagcccggcagccctggcctgaagggggagagcggggacctgggcccccagggcccccggggcccccagggcctgactggacctcctgggaaggccggcagaagaggccgggccggggctgatggagcccggggcatgcctggggaccccggggtgaagggggaccggggctttgatggcctgcccggcctgcccggggagaagggccacagaggagacacaggagcccagggcctgcccggccccccaggagaagatggagagagaggagatgatggagagatcggcccccggggcctgcccggggagagcggcccccggggcctgctgggccccaagggccccccaggcatccctggccccccatag

SEQ ID NO: 232529 - DNA, 1875 bp, Artificial Sequence
  derived and/or modified sequence
atggagcgctgcagccgctgccaccggctgctgctgctgctgcccctggtgctgggcctgtctgctgcccctggctgggccggggcccctcctgtggatgtgctgcgggccctgcgcttccccagcctgcctgatggagtgcggcgggccaagggcatctgcccagcagatgtggcctacagagtggcccggcctgcccagctgagcgcccccacccggcagctgtttcctgggggcttccccaaggacttcagcctgctgactgtggtgaggacccggcccggcctgcaggcccccctgctgaccctgtacagcgcccagggcgtgcggcagctgggcctggagctgggcccccctgtgcgcttcctgtatgaggaccagacaggccggccccagccccccagccagcctgtgttccggggcctgagcctggctgatggcaagtggcaccgggtggccgtggccgtgaagggccagagcgtgaccctcatcgtggactgcaagaagagggtgacccggcccctgcccaggtctgcccggcctgtgctggacacccacggcgtcatcatctttggagcccgcatcctggatgaggaggtgtttgaaggagatgtgcaggagctggccatcgtgcctggggtgcaggccgcctatgagagctgtgagcagaaggagctggagtgtgagggcggccagcgggagcggccccagaaccagcagccccaccgggcccagaggagcccccagcagcagcccagccggctgcaccggccccagaaccaggagccccagagccagcccacagagagcctgtactatgactacaagccaccctactatgatgtgatgaccaccggcaccaccccagactaccaggaccccaccccaggagaggaggaggagatcctggagagcagcctgctgccccccctggaggaggagcagacagacctgcaggtgcccccaacagctgaccgcttccaggccgaggagtatggagagggcggcacagatcctcctgagggcccctatgactacacctacggctatggagatgactaccgggaggagacagagctgggccctgccctgtctgctgagacagcccacagcggggccgccgcccacggcccccggggcctgaagggggagaagggggagcctgctgtgctggagcccggcatgctggtggagggccccccaggccctgagggccctgctggcctcatcggccccccaggcatccagggcaaccctggccctgtgggggaccctggagagcggggccccccaggccgggccggcctgcccggcagtgatggagcccctggccccccaggcaccagcctgatgctgcccttccgcttcggcagcggcggcggggacaagggccctgtggtggccgcccaggaggcccaggcccaggccatcctgcagcaggcccggctggccctgcggggccccccaggccccatgggctacacaggccggcccggccccctgggccagcccggcagccctggcctgaagggggagagcggggacctgggcccccagggcccccggggcccccagggcctgaccggccccccaggcaaggccggccggcggggccgggccggggctgatggagcccggggcatgcctggggaccccggggtgaagggggaccggggctttgatggcctgcccggcctgcctggagagaagggccacagaggagacaccggggcccagggcctgcccggccccccaggagaagatggagagagaggagatgatggagaaattggcccccggggcctgcctggagagagcggcccccggggcctgctgggccccaagggccccccaggcatccctggccccccatag

SEQ ID NO: 232530 - DNA, 5070 bp, Artificial Sequence
  derived and/or modified sequence
atggagcgctgcagccgctgccaccggctgctgctgctgctgcccctggtgctgggcctgtctgctgcccctggctgggccggggcccctcctgtggatgtgctgcgggccctgcgcttccccagcctgcctgatggagtgcggcgggccaagggcatctgcccagcagatgtggcctacagagtggcccggcctgcccagctgagcgcccccacccggcagctgtttcctgggggcttccccaaggacttcagcctgctgactgtggtgaggacccggcccggcctgcaggcccccctgctgaccctgtacagcgcccagggcgtgcggcagctgggcctggagctgggcccccctgtgcgcttcctgtatgaggaccagacaggccggccccagccccccagccagcctgtgttccggggcctgagcctggctgatggcaagtggcaccgggtggccgtggccgtgaagggccagagcgtgaccctcatcgtggactgcaagaagagggtgacccggcccctgcccaggtctgcccggcctgtgctggacacccacggcgtcatcatctttggagcccgcatcctggatgaggaggtgtttgaaggagatgtgcaggagctggccatcgtgcctggggtgcaggccgcctatgagagctgtgagcagaaggagctggagtgtgagggcggccagcgggagcggccccagaaccagcagccccaccgggcccagaggagcccccagcagcagcccagccggctgcaccggccccagaaccaggagccccagagccaggagcagacagacctgcaggtgcccccaacagctgaccgcttccaggccgaggagtatggagagggcggcacagaccccccagagggcccctatgactacacctacggctatggagatgactaccgggaggagacagagctgggccctgccctgtctgctgagacagcccacagcggggctgctgcccacggcccccggggcctgaagggggagaagggggagcctgctgtgctggagcccggcatgctggtggagggccccccaggccctgagggccctgctggcctgattggccccccaggcatccagggcaaccctggccctgtgggggaccccggggagcggggccccccaggccgggccggcctgcccggcagtgatggagcccctggccccccaggcaccagcctgatgctgcccttccgctttggaagtggcggcggggacaagggccctgtggtggccgcccaggaggcccaggcccaggccatcctgcagcaggcccggctggccctgcggggccccccaggccccatgggctacacaggccggcccggccccctgggccagcccggcagccctggcctgaagggggagagcggggacctgggcccccagggcccccggggcccccagggcctgactggacctcctgggaaggccggcagaagaggccgggccggggctgatggagcccggggcatgcctggggaccccggggtgaagggggaccggggctttgatggcctgcccggcctgcccggggagaagggccacagaggagacacaggagcccagggcctgcccggccccccaggagaagatggagagagaggagatgatggagagatcggcccccggggcctgcccggggagagcggcccccggggcctgctgggccccaagggccccccaggcatccctggccccccaggagtgcggggcatggatggcccccagggccccaagggcagcctgggcccccagggcgagcccggccccccaggccagcagggcaccccaggcacccagggcctgcccggcccccagggcgccatcggcccccacggggagaagggcccccagggcaagccaggcctgcccggcatgcctggcagtgatggccccccaggccaccctgggaaggagggccccccaggcaccaagggcaaccagggccccagcggcccccagggccccctgggctacccaggcccccggggcgtgaagggcgtggatggcatccggggcctgaagggccacaagggggagaagggagaagatggcttccctggcttcaagggggacattggagtgaagggggacagaggagaggtgggcgtgcccggcagcagaggagaagatggccctgagggccccaagggccgcacaggccccactggagaccccggccccccaggcctgatgggagagaagggcaagctgggcgtgcccggcctgcccggctacccaggccggcagggccccaagggcagcctgggcttccctggcttccctggggccagcggggagaagggggcccggggcctgagcggcaagagcggccccagaggagagcggggccccaccggcccccggggccagaggggccccaggggggccaccgggaagagcggggccaagggcaccagcggaggagatggcccccacggccccccaggagagcggggcctgcccggcccccagggccccaacggcttccctggccccaagggccccccaggccccccaggcaaggatggcctgcccggccaccctggccagagaggagaggtgggcttccagggcaagacaggccccccaggccccccaggagtggtgggcccccagggcgccgccggggagaccggccccatgggagagcggggccaccctggccccccaggccccccaggagagcagggcctgcccggcacagctgggaaggagggcaccaagggggaccccggccccccaggggcccctgggaaggatggccctgctggcctgcggggcttccctggagagcggggcctgcccggcacagctgggggccctggcctgaagggaaatgaaggccccagcggccccccaggccctgctggcagccctggagagagaggagctgctggcagcggcggccccatcggccccccaggccggcccggcccccagggccccccaggagctgctggggagaagggcgtgcctggagagaagggccccatcggccccaccggcagagatggagtgcagggccctgtgggcctgcccggccctgctggccccccaggagtggccggagaagatggagacaagggggaggtgggggaccccggccagaagggcaccaagggcaacaagggggagcacggccccccaggccccccaggccccatcggccctgtgggccagcccggggctgctggagcagatggagagcccggggcccggggcccccagggccactttggagccaagggagatgagggcacccggggcttcaacggccccccaggccccatcggcctgcagggcctgcccggccccagcggggagaagggggagactggagatgtgggccccatgggccccccaggccccccaggcccccggggccctgctggccccaacggggctgatggcccccagggccccccaggaggagtgggcaacctgggccccccaggagagaagggggagcccggggagagcggcagccctggcatccagggcgagcccggggtgaagggccccagaggagagcggggggagaagggggagagcggccagcccggggagcccggccccccaggccccaagggccccactggagatgatggccccaagggcaaccctggccctgtgggcttccctggggaccccggccccccaggagagggcggcccccggggccaggatggagccaagggggacagaggagaagatggagagcccggccagcccggcagccctggccccactggagaaaatggccccccaggccccctgggcaagaggggccctgctggcagccctggcagcgagggccggcagggcggcaagggggccaagggggaccccggggccatcggggcccctgggaagacaggccctgtgggccctgctggccctgctgggaagccaggcccagatggcctgcggggcctgcccggctctgtgggccagcagggccggcctggggccaccggccaggccggccccccaggccctgtgggccccccaggcctgcccggcctgcggggagatgctggggccaagggggagaagggccaccctggcctgattggcctcatcggccccccaggagagcagggcgagaagggggaccggggcctgcccggcccccagggcagccctggccagaagggggagatgggcatccctggggccagcggccccatcggccctgggggccccccaggcctgcccggccctgctggccccaagggggccaagggggccactggacctgggggccccaagggggagaagggcgtgcagggccccccaggccaccctggccccccaggagaggtgatccagcccctgcccatccagatgcccaagaagacccggcgctctgtggatggcagccggctgatgcaggaggatgaggccatccccactggaggagcccctggcagccctgggggcctggaggagatcttcggcagcctggacagcctgcgggaggagattgagcagatgagaagacccaccggcacccaggacagccctgcccggacctgccaggacctgaagctgtgccaccctgagctgcctgatggagagtactgggtggaccccaaccagggctgtgccagagatgccttccgggtcttctgcaacttcaccgctggaggagagacctgtgtgaccccaagagatgatgtgacccagttctcctatgtggacagcgagggcagccctgtgggcgtggtgcagctgaccttcctgcggctgctgtctgtgtctgcccaccaggatgtgtcctacccctgcagcggggccgccagagatggccccctgcggctgcggggggccaatgaagatgagctgagccctgagaccagcccctacgtgaaggagttcagagatggctgccagacccagcagggccgcacagtgctggaggtgaggacccctgtgctggagcagctgcctgtgctggatgccagcttcagtgacctgggcgccccaccccggcggggcggcgtgctgctgggccctgtgtgcttcatgggctag

SEQ ID NO: 232531 - DNA, 5133 bp, Artificial Sequence
  derived and/or modified sequence
atggagcgctgcagccgctgccaccggctgctgctgctgctgcccctggtgctgggcctgtctgctgcccctggctgggccggggcccctcctgtggatgtgctgcgggccctgcgcttccccagcctgcctgatggagtgcggcgggccaagggcatctgcccagcagatgtggcctacagagtggcccggcctgcccagctgagcgcccccacccggcagctgtttcctgggggcttccccaaggacttcagcctgctgactgtggtgaggacccggcccggcctgcaggcccccctgctgaccctgtacagcgcccagggcgtgcggcagctgggcctggagctgggcccccctgtgcgcttcctgtatgaggaccagacaggccggccccagccccccagccagcctgtgttccggggcctgagcctggctgatggcaagtggcaccgggtggccgtggccgtgaagggccagagcgtgaccctcatcgtggactgcaagaagagggtgacccggcccctgcccaggtctgcccggcctgtgctggacacccacggcgtcatcatctttggagcccgcatcctggatgaggaggtgtttgaaggagatgtgcaggagctggccatcgtgcctggggtgcaggccgcctatgagagctgtgagcagaaggagctggagtgtgagggcggccagcgggagcggccccagaaccagcagccccaccgggcccagaggagcccccagcagcagcccagccggctgcaccggccccagaaccaggagccccagagccaggaccccaccccaggagaggaggaggagatcctggagagcagcctgctgccccccctggaggaggagcagacagacctgcaggtgcccccaacagctgaccgcttccaggccgaggagtatggagagggcggcacagatcctcctgagggcccctatgactacacctacggctatggagatgactaccgggaggagacagagctgggccctgccctgtctgctgagacagcccacagcggggccgccgcccacggcccccggggcctgaagggggagaagggggagcctgctgtgctggagcccggcatgctggtggagggccccccaggccctgagggccctgctggcctcatcggccccccaggcatccagggcaaccctggccctgtgggggaccctggagagcggggccccccaggccgggccggcctgcccggcagtgatggagcccctggccccccaggcaccagcctgatgctgcccttccgcttcggcagcggcggcggggacaagggccctgtggtggccgcccaggaggcccaggcccaggccatcctgcagcaggcccggctggccctgcggggccccccaggccccatgggctacacaggccggcccggccccctgggccagcccggcagccctggcctgaagggggagagcggggacctgggcccccagggcccccggggcccccagggcctgaccggccccccaggcaaggccggccggcggggccgggccggggctgatggagcccggggcatgcctggggaccccggggtgaagggggaccggggctttgatggcctgcccggcctgcctggagagaagggccacagaggagacaccggggcccagggcctgcccggccccccaggagaagatggagagagaggagatgatggagaaattggcccccggggcctgcctggagagagcggcccccggggcctgctgggccccaagggccccccaggcatccctggccccccaggagtgcggggcatggatggcccccagggccccaagggcagcctgggcccccagggcgagcccggccccccaggccagcagggcaccccaggcacccagggcctgcccggcccccagggcgccatcggcccccatggagagaagggcccccagggcaagccaggcctgcccggcatgcctggcagtgatggccccccaggccaccctgggaaggagggccccccaggcaccaagggcaaccagggccccagcggcccccagggccccctgggctacccaggcccccggggcgtgaagggcgtggatggcatccggggcctgaagggccacaagggggagaagggggaggatggcttccctggcttcaagggggacatcggcgtgaagggggacagaggagaggtgggcgtgcccggcagcagaggagaagatggccctgagggccccaagggccgcacaggccccaccggggaccccggccccccaggcctgatgggagagaagggcaagctgggcgtgcccggcctgcccggctacccaggccggcagggccccaagggcagcctgggcttccctggcttccctggggccagcggggagaagggggcccggggcctgagcggcaagagcggccccagaggagagcggggccccaccggcccccggggccagaggggccccaggggggccaccgggaagagcggggccaagggcaccagcggaggagatggcccccacggccccccaggagagcggggcctgcccggcccccagggccccaacggcttccctggccccaagggccccccaggccccccaggcaaggatggcctgcccggccaccctggccagagaggagaggtgggcttccagggcaagacaggccccccaggccccccaggagtggtgggcccccagggcgctgctggggagaccggccccatgggagagcggggccaccctggccccccaggccccccaggagagcagggcctgcctggaacagctgggaaggagggcaccaagggggaccccggccccccaggggcccctgggaaggatggccctgctggcctgcggggcttccctggagagcggggcctgcctggaacagctgggggccctggcctgaagggaaatgaaggccccagcggccccccaggccctgctggcagccctggagagagaggagctgctggcagcggcggccccatcggccccccaggccggcccggcccccagggccccccaggagctgctggggagaagggcgtgcctggagagaagggccccatcggccccaccggcagagatggagtgcagggccctgtgggcctgcccggccctgctggccccccaggagtggccggggaggatggagacaagggggaggtgggggaccccggccagaagggcaccaagggcaacaagggggagcacggccccccaggccccccaggccccatcggccctgtgggccagcctggagctgctggagcagatggagagcccggggcccggggcccccagggccactttggagccaagggagatgagggcacccggggcttcaatggacctcctggccccatcggcctgcagggcctgcccggccccagcggggagaagggggagactggagatgtgggccccatgggccccccaggccccccaggcccccggggccctgctggccccaatggagcagatggcccccagggccccccaggcggcgtgggcaacctgggccccccaggagagaagggggagcctggagagagcggcagccctggcatccagggcgagcccggggtgaagggccccagaggagagcggggggagaagggggagagcggccagcctggagagcccggccccccaggccccaagggccccactggagatgatggccccaagggcaaccctggccctgtgggcttccctggggaccccggccccccaggagagggcggcccccggggccaggatggagccaagggggacagaggagaagatggagagcccggccagcccggcagccctggccccaccggggagaatggacctcctggccccctgggcaagaggggccctgctggcagccctggcagcgagggccggcagggcggcaaaggagccaagggggaccccggggccatcggggcccctgggaagacaggccctgtgggccctgctggccctgctgggaagccaggcccagatggcctgcggggcctgcccggctctgtgggccagcagggccggcctggggccaccggccaggccggccccccaggccctgtgggccccccaggcctgcccggcctgcggggagatgctggggccaagggggagaagggccaccctggcctcatcggcctgattggccccccaggagagcagggcgagaagggggaccggggcctgcccggcccccagggcagccctggccagaagggggagatgggcatccctggggccagcggccccatcggccctgggggccccccaggcctgcccggccctgctggccccaagggggccaagggggccaccggccctgggggccccaagggggagaagggcgtgcagggccccccaggccaccctggccccccaggagaggtgatccagcccctgcccatccagatgcccaagaagaccaggagatctgtggatggcagccggctgatgcaggaggatgaggccatccccaccggcggggcccctggcagccctgggggcctggaggagatcttcggcagcctggacagcctgcgggaggagattgagcagatgaggcggcccaccggcacccaggacagccctgcccggacctgccaggacctgaagctgtgccaccctgagctgcctgatggagagtactgggtggaccccaaccagggctgtgccagagatgccttccgggtcttctgcaacttcaccgctggaggagagacctgtgtgaccccaagagatgatgtgacccagttctcctatgtggacagcgagggcagccctgtgggcgtggtgcagctgaccttcctgcggctgctgtctgtgtctgcccaccaggatgtgtcctacccctgcagcggggccgccagagatggccccctgcggctgcggggggccaatgaagatgagctgagccctgagaccagcccctacgtgaaggagttcagagatggctgccagacccagcagggccgcacagtgctggaggtgaggacccctgtgctggagcagctgcctgtgctggatgccagcttcagtgacctgggcgcccccccaagaagaggaggagtgctgctgggccctgtgtgcttcatgggctag

SEQ ID NO: 232532 - DNA, 5148 bp, Artificial Sequence
  derived and/or modified sequence
atggagcgctgcagccgctgccaccggctgctgctgctgctgcccctggtgctgggcctgtctgctgcccctggctgggccggggcccctcctgtggatgtgctgcgggccctgcgcttccccagcctgcctgatggagtgcggcgggccaagggcatctgcccagcagatgtggcctacagagtggcccggcctgcccagctgagcgcccccacccggcagctgtttcctgggggcttccccaaggacttcagcctgctgactgtggtgaggacccggcccggcctgcaggcccccctgctgaccctgtacagcgcccagggcgtgcggcagctgggcctggagctgggccggcctgtgcgcttcctgtatgaggaccagacaggccggccccagccccccagccagcctgtgttccggggcctgagcctggctgatggcaagtggcaccgggtggccgtggccgtgaagggccagagcgtgaccctcatcgtggactgcaagaagagggtgacccggcccctgcccaggtctgcccggcctgtgctggacacccacggcgtcatcatctttggagcccgcatcctggatgaggaggtgtttgaaggagatgtgcaggagctggccatcgtgcctggggtgcaggccgcctatgagagctgtgagcagaaggagctggagtgtgagggcggccagcgggagcggccccagaaccagcagccccaccgggcccagaggagcccccagcagcagcccagccggctgcaccggccccagaaccaggagccccagagccagcccacagagagcctgtactatgactatgagcccccctactatgatgtgatgaccaccggcaccaccccagactaccaggagcagacagacctgcaggtgcccccaacagctgaccgcttccaggccgaggagtatggagagggcggcacagaccccccagagggcccctatgactacacctacggctatggagatgactaccgggaggagacagagctgggccctgccctgtctgctgagacagcccacagcggggctgctgcccacggcccccggggcctgaagggggagaagggggagcctgctgtgctggagcccggcatgctggtggagggccccccaggccctgagggccctgctggcctgattggccccccaggcatccagggcaaccctggccctgtgggggaccccggggagcggggccccccaggccgggccggcctgcccggcagtgatggagcccctggccccccaggcaccagcctgatgctgcccttccgctttggaagtggcggcggggacaagggccctgtggtggccgcccaggaggcccaggcccaggccatcctgcagcaggcccggctggccctgcggggccccccaggccccatgggctacacaggccggcccggccccctgggccagcccggcagccctggcctgaagggggagagcggggacctgggcccccagggcccccggggcccccagggcctgactggacctcctgggaaggccggcagaagaggccgggccggggctgatggagcccggggcatgcctggggaccccggggtgaagggggaccggggctttgatggcctgcccggcctgcccggggagaagggccacagaggagacacaggagcccagggcctgcccggccccccaggagaagatggagagagaggagatgatggagagatcggcccccggggcctgcccggggagagcggcccccggggcctgctgggccccaagggccccccaggcatccctggccccccaggagtgcggggcatggatggcccccagggccccaagggcagcctgggcccccagggcgagcccggccccccaggccagcagggcaccccaggcacccagggcctgcccggcccccagggcgccatcggcccccacggggagaagggcccccagggcaagccaggcctgcccggcatgcctggcagtgatggccccccaggccaccctgggaaggagggccccccaggcaccaagggcaaccagggccccagcggcccccagggccccctgggctacccaggcccccggggcgtgaagggcgtggatggcatccggggcctgaagggccacaagggggagaagggagaagatggcttccctggcttcaagggggacattggagtgaagggggacagaggagaggtgggcgtgcccggcagcagaggagaagatggccctgagggccccaagggccgcacaggccccactggagaccccggccccccaggcctgatgggagagaagggcaagctgggcgtgcccggcctgcccggctacccaggccggcagggccccaagggcagcctgggcttccctggcttccctggggccagcggggagaagggggcccggggcctgagcggcaagagcggccccagaggagagcggggccccaccggcccccggggccagaggggccccaggggggccaccgggaagagcggggccaagggcaccagcggaggagatggcccccacggccccccaggagagcggggcctgcccggcccccagggccccaacggcttccctggccccaagggccccctgggccccccaggcaaggatggcctgcccggccaccctggccagagaggagaggtgggcttccagggcaagacaggccccccaggccccccaggagtggtgggcccccagggcgccgccggggagaccggccccatgggagagcggggccaccctggccccccaggccccccaggagagcagggcctgcccggcacagctgggaaggagggcaccaagggggaccccggccccccaggggcccctgggaaggatggccctgctggcctgcggggcttccctggagagcggggcctgcccggcacagctgggggccctggcctgaagggaaatgaaggccccagcggccccccaggccctgctggcagccctggagagagaggagctgctggcagcggcggccccatcggccccccaggccggcccggcccccagggccccccaggagctgctggggagaagggcgtgcctggagagaagggccccatcggccccaccggcagagatggagtgcagggccctgtgggcctgcccggccctgctggccccccaggagtggccggagaagatggagacaagggggaggtgggggaccccggccagaagggcaccaagggcaacaagggggagcacggccccccaggccccccaggccccatcggccctgtgggccagcccggggctgctggagcagatggagagcccggggcccggggcccccagggccactttggagccaagggagatgagggcacccggggcttcaacggccccccaggccccatcggcctgcagggcctgcccggccccagcggggagaagggggagactggagatgtgggccccatgggccccccaggccccccaggcccccggggccctgctggccccaacggggctgatggcccccagggccccccaggaggagtgggcaacctgggccccccaggagagaagggggagcccggggagagcggcagccctggcatccagggcgagcccggggtgaagggccccagaggagagcggggggagaagggggagagcggccagcccggggagcccggccccccaggccccaagggccccactggagatgatggccccaagggcaaccctggccctgtgggcttccctggggaccccggccccccaggagagggcggcccccggggccaggatggagccaagggggacagaggagaagatggagagcccggccagcccggcagccctggccccactggagaaaatggccccccaggccccctgggcaagaggggccctgctggcagccctggcagcgagggccggcagggcggcaagggggccaagggggaccccggggccatcggggcccctgggaagacaggccctgtgggccctgctggccctgctgggaagccaggcccagatggcctgcggggcctgcccggctctgtgggccagcagggccggcctggggccaccggccaggccggccccccaggccctgtgggccccccaggcctgcccggcctgcggggagatgctggggccaagggggagaagggccaccctggcctgattggcctcatcggccccccaggagagcagggcgagaagggggaccggggcctgcccggcccccagggcagccctggccagaagggggagatgggcatccctggggccagcggccccatcggccctgggggccccccaggcctgcccggccctgctggccccaagggggccaagggggccactggacctgggggccccaagggggagaagggcgtgcagggccccccaggccaccctggccccccaggagaggtgatccagcccctgcccatccagatgcccaagaagacccggcgctctgtggatggcagccggctgatgcaggaggatgaggccatccccactggaggagcccctggcagccctgggggcctggaggagatcttcggcagcctggacagcctgcgggaggagattgagcagatgagaagacccaccggcacccaggacagccctgcccggacctgccaggacctgaagctgtgccaccctgagctgcctgatggagagtactgggtggaccccaaccagggctgtgccagagatgccttccgggtcttctgcaacttcaccgctggaggagagacctgtgtgaccccaagagatgatgtgacccagttctcctatgtggacagcgagggcagccctgtgggcgtggtgcagctgaccttcctgcggctgctgtctgtgtctgcccaccaggatgtgtcctacccctgcagcggggccgccagagatggccccctgcggctgcggggggccaatgaagatgagctgagccctgagaccagcccctacgtgaaggagttcagagatggctgccagacccagcagggccgcacagtgctggaggtgaggacccctgtgctggagcagctgcctgtgctggatgccagcttcagtgacctgggcgccccaccccggcggggcggcgtgctgctgggccctgtgtgcttcatgggctag

SEQ ID NO: 232533 - DNA, 5052 bp, Artificial Sequence
  derived and/or modified sequence
ggggcccctcctgtggatgtgctgcgggccctgcgcttccccagcctgcctgatggagtgagaagagccaagggcatctgcccagcagatgtggcctacagagtggcccggcctgcccagctgagcgcccccacccggcagctgtttcctgggggcttccccaaggacttcagcctgctgactgtggtgaggaccaggcctggcctgcaggcccccctgctgaccctgtacagcgcccagggcgtgcggcagctgggcctggagctgggccggcctgtgcgcttcctgtatgaggaccagacaggccggccccagccccccagccagcccgtcttccggggcctgagcctggctgatggcaagtggcaccgggtggccgtggccgtgaagggccagagcgtgaccctgattgtggactgcaagaagagggtgacccggcccctgcccaggtctgcccggcctgtgctggacacccatggagtcatcatctttggagcccgcatcctggatgaggaggtgtttgaaggagatgtgcaggagctggccatcgtgcctggggtgcaggccgcctatgagagctgtgagcagaaggagctggagtgtgagggcggccagcgggagcggccccagaaccagcagccccaccgggcccagaggagcccccagcagcagcccagccggctgcaccggccccagaaccaggagccccagagccaggaccccaccccaggagaggaggaggagatcctggagagcagcctgctgccccccctggaggaggagcagacagacctgcaggtgcccccaacagctgaccgcttccaggccgaggagtatggagagggcggcacagaccccccagagggcccctatgactacacctacggctatggagatgactaccgggaggagacagagctgggccctgccctgtctgctgagacagcccacagcggggctgctgcccacggcccccggggcctgaagggggagaagggggagcctgctgtgctggagcccggcatgctggtggagggccccccaggccctgagggccctgctggcctgattggccccccaggcatccagggcaaccctggccctgtgggggaccccggggagcggggccccccaggccgggccggcctgcccggcagtgatggagcccctggccccccaggcaccagcctgatgctgcccttccgctttggaagtggcggcggggacaagggccctgtggtggccgcccaggaggcccaggcccaggccatcctgcagcaggcccggctggccctgcggggccccccaggccccatgggctacacaggccggcccggccccctgggccagcccggcagccctggcctgaagggggagagcggggacctgggcccccagggcccccggggcccccagggcctgactggacctcctgggaaggccggcagaagaggccgggccggggctgatggagcccggggcatgcctggggaccccggggtgaagggggaccggggctttgatggcctgcccggcctgcccggggagaagggccacagaggagacacaggagcccagggcctgcccggccccccaggagaagatggagagagaggagatgatggagagatcggcccccggggcctgcccggggagagcggcccccggggcctgctgggccccaagggccccccaggcatccctggccccccaggagtgcggggcatggatggcccccagggccccaagggcagcctgggcccccagggcgagcccggccccccaggccagcagggcaccccaggcacccagggcctgcccggcccccagggcgccatcggcccccacggggagaagggcccccagggcaagccaggcctgcccggcatgcctggcagtgatggccccccaggccaccctgggaaggagggccccccaggcaccaagggcaaccagggccccagcggcccccagggccccctgggctacccaggcccccggggcgtgaagggcgtggatggcatccggggcctgaagggccacaagggggagaagggagaagatggcttccctggcttcaagggggacattggagtgaagggggacagaggagaggtgggcgtgcccggcagcagaggagaagatggccctgagggccccaagggccgcacaggccccactggagaccccggccccccaggcctgatgggagagaagggcaagctgggcgtgcccggcctgcccggctacccaggccggcagggccccaagggcagcctgggcttccctggcttccctggggccagcggggagaagggggcccggggcctgagcggcaagagcggccccagaggagagcggggccccaccggcccccggggccagaggggccccaggggggccaccgggaagagcggggccaagggcaccagcggaggagatggcccccacggccccccaggagagcggggcctgcccggcccccagggccccaacggcttccctggccccaagggccccccaggccccccaggcaaggatggcctgcccggccaccctggccagagaggagaggtgggcttccagggcaagacaggccccccaggccccccaggagtggtgggcccccagggcgccgccggggagaccggccccatgggagagcggggccaccctggccccccaggccccccaggagagcagggcctgcccggcacagctgggaaggagggcaccaagggggaccccggccccccaggggcccctgggaaggatggccctgctggcctgcggggcttccctggagagcggggcctgcccggcacagctgggggccctggcctgaagggaaatgaaggccccagcggccccccaggccctgctggcagccctggagagagaggagctgctggcagcggcggccccatcggccccccaggccggcccggcccccagggccccccaggagctgctggggagaagggcgtgcctggagagaagggccccatcggccccaccggcagagatggagtgcagggccctgtgggcctgcccggccctgctggccccccaggagtggccggagaagatggagacaagggggaggtgggggaccccggccagaagggcaccaagggcaacaagggggagcacggccccccaggccccccaggccccatcggccctgtgggccagcccggggctgctggagcagatggagagcccggggcccggggcccccagggccactttggagccaagggagatgagggcacccggggcttcaacggccccccaggccccatcggcctgcagggcctgcccggccccagcggggagaagggggagactggagatgtgggccccatgggccccccaggccccccaggcccccggggccctgctggccccaacggggctgatggcccccagggccccccaggaggagtgggcaacctgggccccccaggagagaagggggagcccggggagagcggcagccctggcatccagggcgagcccggggtgaagggccccagaggagagcggggggagaagggggagagcggccagcccggggagcccggccccccaggccccaagggccccactggagatgatggccccaagggcaaccctggccctgtgggcttccctggggaccccggccccccaggagagggcggcccccggggccaggatggagccaagggggacagaggagaagatggagagcccggccagcccggcagccctggccccactggagaaaatggccccccaggccccctgggcaagaggggccctgctggcagccctggcagcgagggccggcagggcggcaagggggccaagggggaccccggggccatcggggcccctgggaagacaggccctgtgggccctgctggccctgctgggaagccaggcccagatggcctgcggggcctgcccggctctgtgggccagcagggccggcctggggccaccggccaggccggccccccaggccctgtgggccccccaggcctgcccggcctgcggggagatgctggggccaagggggagaagggccaccctggcctgattggcctcatcggccccccaggagagcagggcgagaagggggaccggggcctgcccggcccccagggcagccctggccagaagggggagatgggcatccctggggccagcggccccatcggccctgggggccccccaggcctgcccggccctgctggccccaagggggccaagggggccactggacctgggggccccaagggggagaagggcgtgcagggccccccaggccaccctggccccccaggagaggtgatccagcccctgcccatccagatgcccaagaagacccggcgctctgtggatggcagccggctgatgcaggaggatgaggccatccccactggaggagcccctggcagccctgggggcctggaggagatcttcggcagcctggacagcctgcgggaggagattgagcagatgagaagacccaccggcacccaggacagccctgcccggacctgccaggacctgaagctgtgccaccctgagctgcctgatggagagtactgggtggaccccaaccagggctgtgccagagatgccttccgggtcttctgcaacttcaccgctggaggagagacctgtgtgaccccaagagatgatgtgacccagttctcctatgtggacagcgagggcagccctgtgggcgtggtgcagctgaccttcctgcggctgctgtctgtgtctgcccaccaggatgtgtcctacccctgcagcggggccgccagagatggccccctgcggctgcggggggccaatgaagatgagctgagccctgagaccagcccctacgtgaaggagttcagagatggctgccagacccagcagggccgcacagtgctggaggtgaggacccctgtgctggagcagctgcctgtgctggatgccagcttcagtgacctgggcgccccaccccggcggggcggcgtgctgctgggccctgtgtgcttcatgggctag

SEQ ID NO: 232534 - DNA, 5070 bp, Artificial Sequence
  derived and/or modified sequence
atggagcgctgcagccgctgccaccggctgctgctgctgctgcccctggtgctgggcctgtctgctgcccctggctgggccggggcccctcctgtggatgtgctgcgggccctgcgcttccccagcctgcctgatggagtgcggcgggccaagggcatctgcccagcagatgtggcctacagagtggcccggcctgcccagctgagcgcccccacccggcagctgtttcctgggggcttccccaaggacttcagcctgctgactgtggtgaggacccggcccggcctgcaggcccccctgctgaccctgtacagcgcccagggcgtgcggcagctgggcctggagctgggccggcctgtgcgcttcctgtatgaggaccagacaggccggccccagccccccagccagcctgtgttccggggcctgagcctggctgatggcaagtggcaccgggtggccgtggccgtgaagggccagagcgtgaccctcatcgtggactgcaagaagagggtgacccggcccctgcccaggtctgcccggcctgtgctggacacccacggcgtcatcatctttggagcccgcatcctggatgaggaggtgtttgaaggagatgtgcaggagctggccatcgtgcctggggtgcaggccgcctatgagagctgtgagcagaaggagctggagtgtgagggcggccagcgggagcggccccagaaccagcagccccaccgggcccagaggagcccccagcagcagcccagccggctgcaccggccccagaaccaggagccccagagccaggagcagacagacctgcaggtgcccccaacagctgaccgcttccaggccgaggagtatggagagggcggcacagaccccccagagggcccctatgactacacctacggctatggagatgactaccgggaggagacagagctgggccctgccctgtctgctgagacagcccacagcggggctgctgcccacggcccccggggcctgaagggggagaagggggagcctgctgtgctggagcccggcatgctggtggagggccccccaggccctgagggccctgctggcctgattggccccccaggcatccagggcaaccctggccctgtgggggaccccggggagcggggccccccaggccgggccggcctgcccggcagtgatggagcccctggccccccaggcaccagcctgatgctgcccttccgctttggaagtggcggcggggacaagggccctgtggtggccgcccaggaggcccaggcccaggccatcctgcagcaggcccggctggccctgcggggccccccaggccccatgggctacacaggccggcccggccccctgggccagcccggcagccctggcctgaagggggagagcggggacctgggcccccagggcccccggggcccccagggcctgactggacctcctgggaaggccggcagaagaggccgggccggggctgatggagcccggggcatgcctggggaccccggggtgaagggggaccggggctttgatggcctgcccggcctgcccggggagaagggccacagaggagacacaggagcccagggcctgcccggccccccaggagaagatggagagagaggagatgatggagagatcggcccccggggcctgcccggggagagcggcccccggggcctgctgggccccaagggccccccaggcatccctggccccccaggagtgcggggcatggatggcccccagggccccaagggcagcctgggcccccagggcgagcccggccccccaggccagcagggcaccccaggcacccagggcctgcccggcccccagggcgccatcggcccccacggggagaagggcccccagggcaagccaggcctgcccggcatgcctggcagtgatggccccccaggccaccctgggaaggagggccccccaggcaccaagggcaaccagggccccagcggcccccagggccccctgggctacccaggcccccggggcgtgaagggcgtggatggcatccggggcctgaagggccacaagggggagaagggagaagatggcttccctggcttcaagggggacattggagtgaagggggacagaggagaggtgggcgtgcccggcagcagaggagaagatggccctgagggccccaagggccgcacaggccccactggagaccccggccccccaggcctgatgggagagaagggcaagctgggcgtgcccggcctgcccggctacccaggccggcagggccccaagggcagcctgggcttccctggcttccctggggccagcggggagaagggggcccggggcctgagcggcaagagcggccccagaggagagcggggccccaccggcccccggggccagaggggccccaggggggccaccgggaagagcggggccaagggcaccagcggaggagatggcccccacggccccccaggagagcggggcctgcccggcccccagggccccaacggcttccctggccccaagggccccctgggccccccaggcaaggatggcctgcccggccaccctggccagagaggagaggtgggcttccagggcaagacaggccccccaggccccccaggagtggtgggcccccagggcgccgccggggagaccggccccatgggagagcggggccaccctggccccccaggccccccaggagagcagggcctgcccggcacagctgggaaggagggcaccaagggggaccccggccccccaggggcccctgggaaggatggccctgctggcctgcggggcttccctggagagcggggcctgcccggcacagctgggggccctggcctgaagggaaatgaaggccccagcggccccccaggccctgctggcagccctggagagagaggagctgctggcagcggcggccccatcggccccccaggccggcccggcccccagggccccccaggagctgctggggagaagggcgtgcctggagagaagggccccatcggccccaccggcagagatggagtgcagggccctgtgggcctgcccggccctgctggccccccaggagtggccggagaagatggagacaagggggaggtgggggaccccggccagaagggcaccaagggcaacaagggggagcacggccccccaggccccccaggccccatcggccctgtgggccagcccggggctgctggagcagatggagagcccggggcccggggcccccagggccactttggagccaagggagatgagggcacccggggcttcaacggccccccaggccccatcggcctgcagggcctgcccggccccagcggggagaagggggagactggagatgtgggccccatgggccccccaggccccccaggcccccggggccctgctggccccaacggggctgatggcccccagggccccccaggaggagtgggcaacctgggccccccaggagagaagggggagcccggggagagcggcagccctggcatccagggcgagcccggggtgaagggccccagaggagagcggggggagaagggggagagcggccagcccggggagcccggccccccaggccccaagggccccactggagatgatggccccaagggcaaccctggccctgtgggcttccctggggaccccggccccccaggagagggcggcccccggggccaggatggagccaagggggacagaggagaagatggagagcccggccagcccggcagccctggccccactggagaaaatggccccccaggccccctgggcaagaggggccctgctggcagccctggcagcgagggccggcagggcggcaagggggccaagggggaccccggggccatcggggcccctgggaagacaggccctgtgggccctgctggccctgctgggaagccaggcccagatggcctgcggggcctgcccggctctgtgggccagcagggccggcctggggccaccggccaggccggccccccaggccctgtgggccccccaggcctgcccggcctgcggggagatgctggggccaagggggagaagggccaccctggcctgattggcctcatcggccccccaggagagcagggcgagaagggggaccggggcctgcccggcccccagggcagccctggccagaagggggagatgggcatccctggggccagcggccccatcggccctgggggccccccaggcctgcccggccctgctggccccaagggggccaagggggccactggacctgggggccccaagggggagaagggcgtgcagggccccccaggccaccctggccccccaggagaggtgatccagcccctgcccatccagatgcccaagaagacccggcgctctgtggatggcagccggctgatgcaggaggatgaggccatccccactggaggagcccctggcagccctgggggcctggaggagatcttcggcagcctggacagcctgcgggaggagattgagcagatgagaagacccaccggcacccaggacagccctgcccggacctgccaggacctgaagctgtgccaccctgagctgcctgatggagagtactgggtggaccccaaccagggctgtgccagagatgccttccgggtcttctgcaacttcaccgctggaggagagacctgtgtgaccccaagagatgatgtgacccagttctcctatgtggacagcgagggcagccctgtgggcgtggtgcagctgaccttcctgcggctgctgtctgtgtctgcccaccaggatgtgtcctacccctgcagcggggccgccagagatggccccctgcggctgcggggggccaatgaagatgagctgagccctgagaccagcccctacgtgaaggagttcagagatggctgccagacccagcagggccgcacagtgctggaggtgaggacccctgtgctggagcagctgcctgtgctggatgccagcttcagtgacctgggcgccccaccccggcggggcggcgtgctgctgggccctgtgtgcttcatgggctag

SEQ ID NO: 232535 - DNA, 5211 bp, Artificial Sequence
  derived and/or modified sequence
atggagcgctgcagccgctgccaccggctgctgctgctgctgcccctggtgctgggcctgtctgctgcccctggctgggccggggcccctcctgtggatgtgctgcgggccctgcgcttccccagcctgcctgatggagtgcggcgggccaagggcatctgcccagcagatgtggcctacagagtggcccggcctgcccagctgagcgcccccacccggcagctgtttcctgggggcttccccaaggacttcagcctgctgactgtggtgaggacccggcccggcctgcaggcccccctgctgaccctgtacagcgcccagggcgtgcggcagctgggcctggagctgggccggcctgtgcgcttcctgtatgaggaccagacaggccggccccagccccccagccagcctgtgttccggggcctgagcctggctgatggcaagtggcaccgggtggccgtggccgtgaagggccagagcgtgaccctcatcgtggactgcaagaagagggtgacccggcccctgcccaggtctgcccggcctgtgctggacacccacggcgtcatcatctttggagcccgcatcctggatgaggaggtgtttgaaggagatgtgcaggagctggccatcgtgcctggggtgcaggccgcctatgagagctgtgagcagaaggagctggagtgtgagggcggccagcgggagcggccccagaaccagcagccccaccgggcccagaggagcccccagcagcagcccagccggctgcaccggccccagaaccaggagccccagagccagcccacagagagcctgtactatgactatgagcccccctactatgatgtgatgaccaccggcaccaccccagactaccaggaccccaccccaggagaggaggaggagatcctggagagcagcctgctgccccccctggaggaggagcagacagacctgcaggtgcccccaacagctgaccgcttccaggccgaggagtatggagagggcggcacagatcctcctgagggcccctatgactacacctacggctatggagatgactaccgggaggagacagagctgggccctgccctgtctgctgagacagcccacagcggggccgccgcccacggcccccggggcctgaagggggagaagggggagcctgctgtgctggagcccggcatgctggtggagggccccccaggccctgagggccctgctggcctcatcggccccccaggcatccagggcaaccctggccctgtgggggaccctggagagcggggccccccaggccgggccggcctgcccggcagtgatggagcccctggccccccaggcaccagcctgatgctgcccttccgcttcggcagcggcggcggggacaagggccctgtggtggccgcccaggaggcccaggcccaggccatcctgcagcaggcccggctggccctgcggggccccccaggccccatgggctacacaggccggcccggccccctgggccagcccggcagccctggcctgaagggggagagcggggacctgggcccccagggcccccggggcccccagggcctgaccggccccccaggcaaggccggccggcggggccgggccggggctgatggagcccggggcatgcctggggaccccggggtgaagggggaccggggctttgatggcctgcccggcctgcctggagagaagggccacagaggagacaccggggcccagggcctgcccggccccccaggagaagatggagagagaggagatgatggagaaattggcccccggggcctgcctggagagagcggcccccggggcctgctgggccccaagggccccccaggcatccctggccccccaggagtgcggggcatggatggcccccagggccccaagggcagcctgggcccccagggcgagcccggccccccaggccagcagggcaccccaggcacccagggcctgcccggcccccagggcgccatcggcccccatggagagaagggcccccagggcaagccaggcctgcccggcatgcctggcagtgatggccccccaggccaccctgggaaggagggccccccaggcaccaagggcaaccagggccccagcggcccccagggccccctgggctacccaggcccccggggcgtgaagggcgtggatggcatccggggcctgaagggccacaagggggagaagggggaggatggcttccctggcttcaagggggacatcggcgtgaagggggacagaggagaggtgggcgtgcccggcagcagaggagaagatggccctgagggccccaagggccgcacaggccccaccggggaccccggccccccaggcctgatgggagagaagggcaagctgggcgtgcccggcctgcccggctacccaggccggcagggccccaagggcagcctgggcttccctggcttccctggggccagcggggagaagggggcccggggcctgagcggcaagagcggccccagaggagagcggggccccaccggcccccggggccagaggggccccaggggggccaccgggaagagcggggccaagggcaccagcggaggagatggcccccacggccccccaggagagcggggcctgcccggcccccagggccccaacggcttccctggccccaagggccccctgggccccccaggcaaggatggcctgcccggccaccctggccagagaggagaggtgggcttccagggcaagacaggccccccaggccccccaggagtggtgggcccccagggcgctgctggggagaccggccccatgggagagcggggccaccctggccccccaggccccccaggagagcagggcctgcctggaacagctgggaaggagggcaccaagggggaccccggccccccaggggcccctgggaaggatggccctgctggcctgcggggcttccctggagagcggggcctgcctggaacagctgggggccctggcctgaagggaaatgaaggccccagcggccccccaggccctgctggcagccctggagagagaggagctgctggcagcggcggccccatcggccccccaggccggcccggcccccagggccccccaggagctgctggggagaagggcgtgcctggagagaagggccccatcggccccaccggcagagatggagtgcagggccctgtgggcctgcccggccctgctggccccccaggagtggccggggaggatggagacaagggggaggtgggggaccccggccagaagggcaccaagggcaacaagggggagcacggccccccaggccccccaggccccatcggccctgtgggccagcctggagctgctggagcagatggagagcccggggcccggggcccccagggccactttggagccaagggagatgagggcacccggggcttcaatggacctcctggccccatcggcctgcagggcctgcccggccccagcggggagaagggggagactggagatgtgggccccatgggccccccaggccccccaggcccccggggccctgctggccccaatggagcagatggcccccagggccccccaggcggcgtgggcaacctgggccccccaggagagaagggggagcctggagagagcggcagccctggcatccagggcgagcccggggtgaagggccccagaggagagcggggggagaagggggagagcggccagcctggagagcccggccccccaggccccaagggccccactggagatgatggccccaagggcaaccctggccctgtgggcttccctggggaccccggccccccaggagagggcggcccccggggccaggatggagccaagggggacagaggagaagatggagagcccggccagcccggcagccctggccccaccggggagaatggacctcctggccccctgggcaagaggggccctgctggcagccctggcagcgagggccggcagggcggcaaaggagccaagggggaccccggggccatcggggcccctgggaagacaggccctgtgggccctgctggccctgctgggaagccaggcccagatggcctgcggggcctgcccggctctgtgggccagcagggccggcctggggccaccggccaggccggccccccaggccctgtgggccccccaggcctgcccggcctgcggggagatgctggggccaagggggagaagggccaccctggcctcatcggcctgattggccccccaggagagcagggcgagaagggggaccggggcctgcccggcccccagggcagccctggccagaagggggagatgggcatccctggggccagcggccccatcggccctgggggccccccaggcctgcccggccctgctggccccaagggggccaagggggccaccggccctgggggccccaagggggagaagggcgtgcagggccccccaggccaccctggccccccaggagaggtgatccagcccctgcccatccagatgcccaagaagaccaggagatctgtggatggcagccggctgatgcaggaggatgaggccatccccaccggcggggcccctggcagccctgggggcctggaggagatcttcggcagcctggacagcctgcgggaggagattgagcagatgaggcggcccaccggcacccaggacagccctgcccggacctgccaggacctgaagctgtgccaccctgagctgcctgatggagagtactgggtggaccccaaccagggctgtgccagagatgccttccgggtcttctgcaacttcaccgctggaggagagacctgtgtgaccccaagagatgatgtgacccagttctcctatgtggacagcgagggcagccctgtgggcgtggtgcagctgaccttcctgcggctgctgtctgtgtctgcccaccaggatgtgtcctacccctgcagcggggccgccagagatggccccctgcggctgcggggggccaatgaagatgagctgagccctgagaccagcccctacgtgaaggagttcagagatggctgccagacccagcagggccgcacagtgctggaggtgaggacccctgtgctggagcagctgcctgtgctggatgccagcttcagtgacctgggcgcccccccaagaagaggaggagtgctgctgggccctgtgtgcttcatgggctag

SEQ ID NO: 232536 - DNA, 5211 bp, Artificial Sequence
  derived and/or modified sequence
atggagcgctgcagccgctgccaccggctgctgctgctgctgcccctggtgctgggcctgtctgctgcccctggctgggccggggcccctcctgtggatgtgctgcgggccctgcgcttccccagcctgcctgatggagtgcggcgggccaagggcatctgcccagcagatgtggcctacagagtggcccggcctgcccagctgagcgcccccacccggcagctgtttcctgggggcttccccaaggacttcagcctgctgactgtggtgaggacccggcccggcctgcaggcccccctgctgaccctgtacagcgcccagggcgtgcggcagctgggcctggagctgggccggcctgtgcgcttcctgtatgaggaccagacaggccggccccagccccccagccagcctgtgttccggggcctgagcctggctgatggcaagtggcaccgggtggccgtggccgtgaagggccagagcgtgaccctcatcgtggactgcaagaagagggtgacccggcccctgcccaggtctgcccggcctgtgctggacacccacggcgtcatcatctttggagcccgcatcctggatgaggaggtgtttgaaggagatgtgcaggagctggccatcgtgcctggggtgcaggccgcctatgagagctgtgagcagaaggagctggagtgtgagggcggccagcgggagcggccccagaaccagcagccccaccgggcccagaggagcccccagcagcagcccagccggctgcaccggccccagaaccaggagccccagagccagcccacagagagcctgtactatgactacaagccaccctactatgatgtgatgaccaccggcaccaccccagactaccaggaccccaccccaggagaggaggaggagatcctggagagcagcctgctgccccccctggaggaggagcagacagacctgcaggtgcccccaacagctgaccgcttccaggccgaggagtatggagagggcggcacagatcctcctgagggcccctatgactacacctacggctatggagatgactaccgggaggagacagagctgggccctgccctgtctgctgagacagcccacagcggggccgccgcccacggcccccggggcctgaagggggagaagggggagcctgctgtgctggagcccggcatgctggtggagggccccccaggccctgagggccctgctggcctcatcggccccccaggcatccagggcaaccctggccctgtgggggaccctggagagcggggccccccaggccgggccggcctgcccggcagtgatggagcccctggccccccaggcaccagcctgatgctgcccttccgcttcggcagcggcggcggggacaagggccctgtggtggccgcccaggaggcccaggcccaggccatcctgcagcaggcccggctggccctgcggggccccccaggccccatgggctacacaggccggcccggccccctgggccagcccggcagccctggcctgaagggggagagcggggacctgggcccccagggcccccggggcccccagggcctgaccggccccccaggcaaggccggccggcggggccgggccggggctgatggagcccggggcatgcctggggaccccggggtgaagggggaccggggctttgatggcctgcccggcctgcctggagagaagggccacagaggagacaccggggcccagggcctgcccggccccccaggagaagatggagagagaggagatgatggagaaattggcccccggggcctgcctggagagagcggcccccggggcctgctgggccccaagggccccccaggcatccctggccccccaggagtgcggggcatggatggcccccagggccccaagggcagcctgggcccccagggcgagcccggccccccaggccagcagggcaccccaggcacccagggcctgcccggcccccagggcgccatcggcccccatggagagaagggcccccagggcaagccaggcctgcccggcatgcctggcagtgatggccccccaggccaccctgggaaggagggccccccaggcaccaagggcaaccagggccccagcggcccccagggccccctgggctacccaggcccccggggcgtgaagggcgtggatggcatccggggcctgaagggccacaagggggagaagggggaggatggcttccctggcttcaagggggacatcggcgtgaagggggacagaggagaggtgggcgtgcccggcagcagaggagaagatggccctgagggccccaagggccgcacaggccccaccggggaccccggccccccaggcctgatgggagagaagggcaagctgggcgtgcccggcctgcccggctacccaggccggcagggccccaagggcagcctgggcttccctggcttccctggggccagcggggagaagggggcccggggcctgagcggcaagagcggccccagaggagagcggggccccaccggcccccggggccagaggggccccaggggggccaccgggaagagcggggccaagggcaccagcggaggagatggcccccacggccccccaggagagcggggcctgcccggcccccagggccccaacggcttccctggccccaagggccccccaggccccccaggcaaggatggcctgcccggccaccctggccagagaggagaggtgggcttccagggcaagacaggccccccaggccccccaggagtggtgggcccccagggcgctgctggggagaccggccccatgggagagcggggccaccctggccccccaggccccccaggagagcagggcctgcctggaacagctgggaaggagggcaccaagggggaccccggccccccaggggcccctgggaaggatggccctgctggcctgcggggcttccctggagagcggggcctgcctggaacagctgggggccctggcctgaagggaaatgaaggccccagcggccccccaggccctgctggcagccctggagagagaggagctgctggcagcggcggccccatcggccccccaggccggcccggcccccagggccccccaggagctgctggggagaagggcgtgcctggagagaagggccccatcggccccaccggcagagatggagtgcagggccctgtgggcctgcccggccctgctggccccccaggagtggccggggaggatggagacaagggggaggtgggggaccccggccagaagggcaccaagggcaacaagggggagcacggccccccaggccccccaggccccatcggccctgtgggccagcctggagctgctggagcagatggagagcccggggcccggggcccccagggccactttggagccaagggagatgagggcacccggggcttcaatggacctcctggccccatcggcctgcagggcctgcccggccccagcggggagaagggggagactggagatgtgggccccatgggccccccaggccccccaggcccccggggccctgctggccccaatggagcagatggcccccagggccccccaggcggcgtgggcaacctgggccccccaggagagaagggggagcctggagagagcggcagccctggcatccagggcgagcccggggtgaagggccccagaggagagcggggggagaagggggagagcggccagcctggagagcccggccccccaggccccaagggccccactggagatgatggccccaagggcaaccctggccctgtgggcttccctggggaccccggccccccaggagagggcggcccccggggccaggatggagccaagggggacagaggagaagatggagagcccggccagcccggcagccctggccccaccggggagaatggacctcctggccccctgggcaagaggggccctgctggcagccctggcagcgagggccggcagggcggcaaaggagccaagggggaccccggggccatcggggcccctgggaagacaggccctgtgggccctgctggccctgctgggaagccaggcccagatggcctgcggggcctgcccggctctgtgggccagcagggccggcctggggccaccggccaggccggccccccaggccctgtgggccccccaggcctgcccggcctgcggggagatgctggggccaagggggagaagggccaccctggcctcatcggcctgattggccccccaggagagcagggcgagaagggggaccggggcctgcccggcccccagggcagccctggccagaagggggagatgggcatccctggggccagcggccccatcggccctgggggccccccaggcctgcccggccctgctggccccaagggggccaagggggccaccggccctgggggccccaagggggagaagggcgtgcagggccccccaggccaccctggccccccaggagaggtgatccagcccctgcccatccagatgcccaagaagaccaggagatctgtggatggcagccggctgatgcaggaggatgaggccatccccaccggcggggcccctggcagccctgggggcctggaggagatcttcggcagcctggacagcctgcgggaggagattgagcagatgaggcggcccaccggcacccaggacagccctgcccggacctgccaggacctgaagctgtgccaccctgagctgcctgatggagagtactgggtggaccccaaccagggctgtgccagagatgccttccgggtcttctgcaacttcaccgctggaggagagacctgtgtgaccccaagagatgatgtgacccagttctcctatgtggacagcgagggcagccctgtgggcgtggtgcagctgaccttcctgcggctgctgtctgtgtctgcccaccaggatgtgtcctacccctgcagcggggccgccagagatggccccctgcggctgcggggggccaatgaagatgagctgagccctgagaccagcccctacgtgaaggagttcagagatggctgccagacccagcagggccgcacagtgctggaggtgaggacccctgtgctggagcagctgcctgtgctggatgccagcttcagtgacctgggcgcccccccaagaagaggaggagtgctgctgggccctgtgtgcttcatgggctag

SEQ ID NO: 232537 - DNA, 5133 bp, Artificial Sequence
  derived and/or modified sequence
atggagcgctgcagccgctgccaccggctgctgctgctgctgcccctggtgctgggcctgtctgctgcccctggctgggccggggcccctcctgtggatgtgctgcgggccctgcgcttccccagcctgcctgatggagtgcggcgggccaagggcatctgcccagcagatgtggcctacagagtggcccggcctgcccagctgagcgcccccacccggcagctgtttcctgggggcttccccaaggacttcagcctgctgactgtggtgaggacccggcccggcctgcaggcccccctgctgaccctgtacagcgcccagggcgtgcggcagctgggcctggagctgggccggcctgtgcgcttcctgtatgaggaccagacaggccggccccagccccccagccagcctgtgttccggggcctgagcctggctgatggcaagtggcaccgggtggccgtggccgtgaagggccagagcgtgaccctcatcgtggactgcaagaagagggtgacccggcccctgcccaggtctgcccggcctgtgctggacacccacggcgtcatcatctttggagcccgcatcctggatgaggaggtgtttgaaggagatgtgcaggagctggccatcgtgcctggggtgcaggccgcctatgagagctgtgagcagaaggagctggagtgtgagggcggccagcgggagcggccccagaaccagcagccccaccgggcccagaggagcccccagcagcagcccagccggctgcaccggccccagaaccaggagccccagagccaggaccccaccccaggagaggaggaggagatcctggagagcagcctgctgccccccctggaggaggagcagacagacctgcaggtgcccccaacagctgaccgcttccaggccgaggagtatggagagggcggcacagatcctcctgagggcccctatgactacacctacggctatggagatgactaccgggaggagacagagctgggccctgccctgtctgctgagacagcccacagcggggccgccgcccacggcccccggggcctgaagggggagaagggggagcctgctgtgctggagcccggcatgctggtggagggccccccaggccctgagggccctgctggcctcatcggccccccaggcatccagggcaaccctggccctgtgggggaccctggagagcggggccccccaggccgggccggcctgcccggcagtgatggagcccctggccccccaggcaccagcctgatgctgcccttccgcttcggcagcggcggcggggacaagggccctgtggtggccgcccaggaggcccaggcccaggccatcctgcagcaggcccggctggccctgcggggccccccaggccccatgggctacacaggccggcccggccccctgggccagcccggcagccctggcctgaagggggagagcggggacctgggcccccagggcccccggggcccccagggcctgaccggccccccaggcaaggccggccggcggggccgggccggggctgatggagcccggggcatgcctggggaccccggggtgaagggggaccggggctttgatggcctgcccggcctgcctggagagaagggccacagaggagacaccggggcccagggcctgcccggccccccaggagaagatggagagagaggagatgatggagaaattggcccccggggcctgcctggagagagcggcccccggggcctgctgggccccaagggccccccaggcatccctggccccccaggagtgcggggcatggatggcccccagggccccaagggcagcctgggcccccagggcgagcccggccccccaggccagcagggcaccccaggcacccagggcctgcccggcccccagggcgccatcggcccccatggagagaagggcccccagggcaagccaggcctgcccggcatgcctggcagtgatggccccccaggccaccctgggaaggagggccccccaggcaccaagggcaaccagggccccagcggcccccagggccccctgggctacccaggcccccggggcgtgaagggcgtggatggcatccggggcctgaagggccacaagggggagaagggggaggatggcttccctggcttcaagggggacatcggcgtgaagggggacagaggagaggtgggcgtgcccggcagcagaggagaagatggccctgagggccccaagggccgcacaggccccaccggggaccccggccccccaggcctgatgggagagaagggcaagctgggcgtgcccggcctgcccggctacccaggccggcagggccccaagggcagcctgggcttccctggcttccctggggccagcggggagaagggggcccggggcctgagcggcaagagcggccccagaggagagcggggccccaccggcccccggggccagaggggccccaggggggccaccgggaagagcggggccaagggcaccagcggaggagatggcccccacggccccccaggagagcggggcctgcccggcccccagggccccaacggcttccctggccccaagggccccctgggccccccaggcaaggatggcctgcccggccaccctggccagagaggagaggtgggcttccagggcaagacaggccccccaggccccccaggagtggtgggcccccagggcgctgctggggagaccggccccatgggagagcggggccaccctggccccccaggccccccaggagagcagggcctgcctggaacagctgggaaggagggcaccaagggggaccccggccccccaggggcccctgggaaggatggccctgctggcctgcggggcttccctggagagcggggcctgcctggaacagctgggggccctggcctgaagggaaatgaaggccccagcggccccccaggccctgctggcagccctggagagagaggagctgctggcagcggcggccccatcggccccccaggccggcccggcccccagggccccccaggagctgctggggagaagggcgtgcctggagagaagggccccatcggccccaccggcagagatggagtgcagggccctgtgggcctgcccggccctgctggccccccaggagtggccggggaggatggagacaagggggaggtgggggaccccggccagaagggcaccaagggcaacaagggggagcacggccccccaggccccccaggccccatcggccctgtgggccagcctggagctgctggagcagatggagagcccggggcccggggcccccagggccactttggagccaagggagatgagggcacccggggcttcaatggacctcctggccccatcggcctgcagggcctgcccggccccagcggggagaagggggagactggagatgtgggccccatgggccccccaggccccccaggcccccggggccctgctggccccaatggagcagatggcccccagggccccccaggcggcgtgggcaacctgggccccccaggagagaagggggagcctggagagagcggcagccctggcatccagggcgagcccggggtgaagggccccagaggagagcggggggagaagggggagagcggccagcctggagagcccggccccccaggccccaagggccccactggagatgatggccccaagggcaaccctggccctgtgggcttccctggggaccccggccccccaggagagggcggcccccggggccaggatggagccaagggggacagaggagaagatggagagcccggccagcccggcagccctggccccaccggggagaatggacctcctggccccctgggcaagaggggccctgctggcagccctggcagcgagggccggcagggcggcaaaggagccaagggggaccccggggccatcggggcccctgggaagacaggccctgtgggccctgctggccctgctgggaagccaggcccagatggcctgcggggcctgcccggctctgtgggccagcagggccggcctggggccaccggccaggccggccccccaggccctgtgggccccccaggcctgcccggcctgcggggagatgctggggccaagggggagaagggccaccctggcctcatcggcctgattggccccccaggagagcagggcgagaagggggaccggggcctgcccggcccccagggcagccctggccagaagggggagatgggcatccctggggccagcggccccatcggccctgggggccccccaggcctgcccggccctgctggccccaagggggccaagggggccaccggccctgggggccccaagggggagaagggcgtgcagggccccccaggccaccctggccccccaggagaggtgatccagcccctgcccatccagatgcccaagaagaccaggagatctgtggatggcagccggctgatgcaggaggatgaggccatccccaccggcggggcccctggcagccctgggggcctggaggagatcttcggcagcctggacagcctgcgggaggagattgagcagatgaggcggcccaccggcacccaggacagccctgcccggacctgccaggacctgaagctgtgccaccctgagctgcctgatggagagtactgggtggaccccaaccagggctgtgccagagatgccttccgggtcttctgcaacttcaccgctggaggagagacctgtgtgaccccaagagatgatgtgacccagttctcctatgtggacagcgagggcagccctgtgggcgtggtgcagctgaccttcctgcggctgctgtctgtgtctgcccaccaggatgtgtcctacccctgcagcggggccgccagagatggccccctgcggctgcggggggccaatgaagatgagctgagccctgagaccagcccctacgtgaaggagttcagagatggctgccagacccagcagggccgcacagtgctggaggtgaggacccctgtgctggagcagctgcctgtgctggatgccagcttcagtgacctgggcgcccccccaagaagaggaggagtgctgctgggccctgtgtgcttcatgggctag

SEQ ID NO: 232538 - DNA, 5211 bp, Artificial Sequence
  derived and/or modified sequence
atggagcgctgcagccgctgccaccggctgctgctgctgctgcccctggtgctgggcctgtctgctgcccctggctgggccggggcccctcctgtggatgtgctgcgggccctgcgcttccccagcctgcctgatggagtgcggcgggccaagggcatctgcccagcagatgtggcctacagagtggcccggcctgcccagctgagcgcccccacccggcagctgtttcctgggggcttccccaaggacttcagcctgctgactgtggtgaggacccggcccggcctgcaggcccccctgctgaccctgtacagcgcccagggcgtgcggcagctgggcctggagctgggcccccctgtgcgcttcctgtatgaggaccagacaggccggccccagccccccagccagcctgtgttccggggcctgagcctggctgatggcaagtggcaccgggtggccgtggccgtgaagggccagagcgtgaccctcatcgtggactgcaagaagagggtgacccggcccctgcccaggtctgcccggcctgtgctggacacccacggcgtcatcatctttggagcccgcatcctggatgaggaggtgtttgaaggagatgtgcaggagctggccatcgtgcctggggtgcaggccgcctatgagagctgtgagcagaaggagctggagtgtgagggcggccagcgggagcggccccagaaccagcagccccaccgggcccagaggagcccccagcagcagcccagccggctgcaccggccccagaaccaggagccccagagccagcccacagagagcctgtactatgactacaagccaccctactatgatgtgatgaccaccggcaccaccccagactaccaggaccccaccccaggagaggaggaggagatcctggagagcagcctgctgccccccctggaggaggagcagacagacctgcaggtgcccccaacagctgaccgcttccaggccgaggagtatggagagggcggcacagatcctcctgagggcccctatgactacacctacggctatggagatgactaccgggaggagacagagctgggccctgccctgtctgctgagacagcccacagcggggccgccgcccacggcccccggggcctgaagggggagaagggggagcctgctgtgctggagcccggcatgctggtggagggccccccaggccctgagggccctgctggcctcatcggccccccaggcatccagggcaaccctggccctgtgggggaccctggagagcggggccccccaggccgggccggcctgcccggcagtgatggagcccctggccccccaggcaccagcctgatgctgcccttccgcttcggcagcggcggcggggacaagggccctgtggtggccgcccaggaggcccaggcccaggccatcctgcagcaggcccggctggccctgcggggccccccaggccccatgggctacacaggccggcccggccccctgggccagcccggcagccctggcctgaagggggagagcggggacctgggcccccagggcccccggggcccccagggcctgaccggccccccaggcaaggccggccggcggggccgggccggggctgatggagcccggggcatgcctggggaccccggggtgaagggggaccggggctttgatggcctgcccggcctgcctggagagaagggccacagaggagacaccggggcccagggcctgcccggccccccaggagaagatggagagagaggagatgatggagaaattggcccccggggcctgcctggagagagcggcccccggggcctgctgggccccaagggccccccaggcatccctggccccccaggagtgcggggcatggatggcccccagggccccaagggcagcctgggcccccagggcgagcccggccccccaggccagcagggcaccccaggcacccagggcctgcccggcccccagggcgccatcggcccccatggagagaagggcccccagggcaagccaggcctgcccggcatgcctggcagtgatggccccccaggccaccctgggaaggagggccccccaggcaccaagggcaaccagggccccagcggcccccagggccccctgggctacccaggcccccggggcgtgaagggcgtggatggcatccggggcctgaagggccacaagggggagaagggggaggatggcttccctggcttcaagggggacatcggcgtgaagggggacagaggagaggtgggcgtgcccggcagcagaggagaagatggccctgagggccccaagggccgcacaggccccaccggggaccccggccccccaggcctgatgggagagaagggcaagctgggcgtgcccggcctgcccggctacccaggccggcagggccccaagggcagcctgggcttccctggcttccctggggccagcggggagaagggggcccggggcctgagcggcaagagcggccccagaggagagcggggccccaccggcccccggggccagaggggccccaggggggccaccgggaagagcggggccaagggcaccagcggaggagatggcccccacggccccccaggagagcggggcctgcccggcccccagggccccaacggcttccctggccccaagggccccccaggccccccaggcaaggatggcctgcccggccaccctggccagagaggagaggtgggcttccagggcaagacaggccccccaggccccccaggagtggtgggcccccagggcgctgctggggagaccggccccatgggagagcggggccaccctggccccccaggccccccaggagagcagggcctgcctggaacagctgggaaggagggcaccaagggggaccccggccccccaggggcccctgggaaggatggccctgctggcctgcggggcttccctggagagcggggcctgcctggaacagctgggggccctggcctgaagggaaatgaaggccccagcggccccccaggccctgctggcagccctggagagagaggagctgctggcagcggcggccccatcggccccccaggccggcccggcccccagggccccccaggagctgctggggagaagggcgtgcctggagagaagggccccatcggccccaccggcagagatggagtgcagggccctgtgggcctgcccggccctgctggccccccaggagtggccggggaggatggagacaagggggaggtgggggaccccggccagaagggcaccaagggcaacaagggggagcacggccccccaggccccccaggccccatcggccctgtgggccagcctggagctgctggagcagatggagagcccggggcccggggcccccagggccactttggagccaagggagatgagggcacccggggcttcaatggacctcctggccccatcggcctgcagggcctgcccggccccagcggggagaagggggagactggagatgtgggccccatgggccccccaggccccccaggcccccggggccctgctggccccaatggagcagatggcccccagggccccccaggcggcgtgggcaacctgggccccccaggagagaagggggagcctggagagagcggcagccctggcatccagggcgagcccggggtgaagggccccagaggagagcggggggagaagggggagagcggccagcctggagagcccggccccccaggccccaagggccccactggagatgatggccccaagggcaaccctggccctgtgggcttccctggggaccccggccccccaggagagggcggcccccggggccaggatggagccaagggggacagaggagaagatggagagcccggccagcccggcagccctggccccaccggggagaatggacctcctggccccctgggcaagaggggccctgctggcagccctggcagcgagggccggcagggcggcaaaggagccaagggggaccccggggccatcggggcccctgggaagacaggccctgtgggccctgctggccctgctgggaagccaggcccagatggcctgcggggcctgcccggctctgtgggccagcagggccggcctggggccaccggccaggccggccccccaggccctgtgggccccccaggcctgcccggcctgcggggagatgctggggccaagggggagaagggccaccctggcctcatcggcctgattggccccccaggagagcagggcgagaagggggaccggggcctgcccggcccccagggcagccctggccagaagggggagatgggcatccctggggccagcggccccatcggccctgggggccccccaggcctgcccggccctgctggccccaagggggccaagggggccaccggccctgggggccccaagggggagaagggcgtgcagggccccccaggccaccctggccccccaggagaggtgatccagcccctgcccatccagatgcccaagaagaccaggagatctgtggatggcagccggctgatgcaggaggatgaggccatccccaccggcggggcccctggcagccctgggggcctggaggagatcttcggcagcctggacagcctgcgggaggagattgagcagatgaggcggcccaccggcacccaggacagccctgcccggacctgccaggacctgaagctgtgccaccctgagctgcctgatggagagtactgggtggaccccaaccagggctgtgccagagatgccttccgggtcttctgcaacttcaccgctggaggagagacctgtgtgaccccaagagatgatgtgacccagttctcctatgtggacagcgagggcagccctgtgggcgtggtgcagctgaccttcctgcggctgctgtctgtgtctgcccaccaggatgtgtcctacccctgcagcggggccgccagagatggccccctgcggctgcggggggccaatgaagatgagctgagccctgagaccagcccctacgtgaaggagttcagagatggctgccagacccagcagggccgcacagtgctggaggtgaggacccctgtgctggagcagctgcctgtgctggatgccagcttcagtgacctgggcgcccccccaagaagaggaggagtgctgctgggccctgtgtgcttcatgggctag

SEQ ID NO: 232539 - DNA, 5148 bp, Artificial Sequence
  derived and/or modified sequence
atggagcgctgcagccgctgccaccggctgctgctgctgctgcccctggtgctgggcctgtctgctgcccctggctgggccggggcccctcctgtggatgtgctgcgggccctgcgcttccccagcctgcctgatggagtgcggcgggccaagggcatctgcccagcagatgtggcctacagagtggcccggcctgcccagctgagcgcccccacccggcagctgtttcctgggggcttccccaaggacttcagcctgctgactgtggtgaggacccggcccggcctgcaggcccccctgctgaccctgtacagcgcccagggcgtgcggcagctgggcctggagctgggccggcctgtgcgcttcctgtatgaggaccagacaggccggccccagccccccagccagcctgtgttccggggcctgagcctggctgatggcaagtggcaccgggtggccgtggccgtgaagggccagagcgtgaccctcatcgtggactgcaagaagagggtgacccggcccctgcccaggtctgcccggcctgtgctggacacccacggcgtcatcatctttggagcccgcatcctggatgaggaggtgtttgaaggagatgtgcaggagctggccatcgtgcctggggtgcaggccgcctatgagagctgtgagcagaaggagctggagtgtgagggcggccagcgggagcggccccagaaccagcagccccaccgggcccagaggagcccccagcagcagcccagccggctgcaccggccccagaaccaggagccccagagccagcccacagagagcctgtactatgactacaagccaccctactatgatgtgatgaccaccggcaccaccccagactaccaggagcagacagacctgcaggtgcccccaacagctgaccgcttccaggccgaggagtatggagagggcggcacagaccccccagagggcccctatgactacacctacggctatggagatgactaccgggaggagacagagctgggccctgccctgtctgctgagacagcccacagcggggctgctgcccacggcccccggggcctgaagggggagaagggggagcctgctgtgctggagcccggcatgctggtggagggccccccaggccctgagggccctgctggcctgattggccccccaggcatccagggcaaccctggccctgtgggggaccccggggagcggggccccccaggccgggccggcctgcccggcagtgatggagcccctggccccccaggcaccagcctgatgctgcccttccgctttggaagtggcggcggggacaagggccctgtggtggccgcccaggaggcccaggcccaggccatcctgcagcaggcccggctggccctgcggggccccccaggccccatgggctacacaggccggcccggccccctgggccagcccggcagccctggcctgaagggggagagcggggacctgggcccccagggcccccggggcccccagggcctgactggacctcctgggaaggccggcagaagaggccgggccggggctgatggagcccggggcatgcctggggaccccggggtgaagggggaccggggctttgatggcctgcccggcctgcccggggagaagggccacagaggagacacaggagcccagggcctgcccggccccccaggagaagatggagagagaggagatgatggagagatcggcccccggggcctgcccggggagagcggcccccggggcctgctgggccccaagggccccccaggcatccctggccccccaggagtgcggggcatggatggcccccagggccccaagggcagcctgggcccccagggcgagcccggccccccaggccagcagggcaccccaggcacccagggcctgcccggcccccagggcgccatcggcccccacggggagaagggcccccagggcaagccaggcctgcccggcatgcctggcagtgatggccccccaggccaccctgggaaggagggccccccaggcaccaagggcaaccagggccccagcggcccccagggccccctgggctacccaggcccccggggcgtgaagggcgtggatggcatccggggcctgaagggccacaagggggagaagggagaagatggcttccctggcttcaagggggacattggagtgaagggggacagaggagaggtgggcgtgcccggcagcagaggagaagatggccctgagggccccaagggccgcacaggccccactggagaccccggccccccaggcctgatgggagagaagggcaagctgggcgtgcccggcctgcccggctacccaggccggcagggccccaagggcagcctgggcttccctggcttccctggggccagcggggagaagggggcccggggcctgagcggcaagagcggccccagaggagagcggggccccaccggcccccggggccagaggggccccaggggggccaccgggaagagcggggccaagggcaccagcggaggagatggcccccacggccccccaggagagcggggcctgcccggcccccagggccccaacggcttccctggccccaagggccccccaggccccccaggcaaggatggcctgcccggccaccctggccagagaggagaggtgggcttccagggcaagacaggccccccaggccccccaggagtggtgggcccccagggcgccgccggggagaccggccccatgggagagcggggccaccctggccccccaggccccccaggagagcagggcctgcccggcacagctgggaaggagggcaccaagggggaccccggccccccaggggcccctgggaaggatggccctgctggcctgcggggcttccctggagagcggggcctgcccggcacagctgggggccctggcctgaagggaaatgaaggccccagcggccccccaggccctgctggcagccctggagagagaggagctgctggcagcggcggccccatcggccccccaggccggcccggcccccagggccccccaggagctgctggggagaagggcgtgcctggagagaagggccccatcggccccaccggcagagatggagtgcagggccctgtgggcctgcccggccctgctggccccccaggagtggccggagaagatggagacaagggggaggtgggggaccccggccagaagggcaccaagggcaacaagggggagcacggccccccaggccccccaggccccatcggccctgtgggccagcccggggctgctggagcagatggagagcccggggcccggggcccccagggccactttggagccaagggagatgagggcacccggggcttcaacggccccccaggccccatcggcctgcagggcctgcccggccccagcggggagaagggggagactggagatgtgggccccatgggccccccaggccccccaggcccccggggccctgctggccccaacggggctgatggcccccagggccccccaggaggagtgggcaacctgggccccccaggagagaagggggagcccggggagagcggcagccctggcatccagggcgagcccggggtgaagggccccagaggagagcggggggagaagggggagagcggccagcccggggagcccggccccccaggccccaagggccccactggagatgatggccccaagggcaaccctggccctgtgggcttccctggggaccccggccccccaggagagggcggcccccggggccaggatggagccaagggggacagaggagaagatggagagcccggccagcccggcagccctggccccactggagaaaatggccccccaggccccctgggcaagaggggccctgctggcagccctggcagcgagggccggcagggcggcaagggggccaagggggaccccggggccatcggggcccctgggaagacaggccctgtgggccctgctggccctgctgggaagccaggcccagatggcctgcggggcctgcccggctctgtgggccagcagggccggcctggggccaccggccaggccggccccccaggccctgtgggccccccaggcctgcccggcctgcggggagatgctggggccaagggggagaagggccaccctggcctgattggcctcatcggccccccaggagagcagggcgagaagggggaccggggcctgcccggcccccagggcagccctggccagaagggggagatgggcatccctggggccagcggccccatcggccctgggggccccccaggcctgcccggccctgctggccccaagggggccaagggggccactggacctgggggccccaagggggagaagggcgtgcagggccccccaggccaccctggccccccaggagaggtgatccagcccctgcccatccagatgcccaagaagacccggcgctctgtggatggcagccggctgatgcaggaggatgaggccatccccactggaggagcccctggcagccctgggggcctggaggagatcttcggcagcctggacagcctgcgggaggagattgagcagatgagaagacccaccggcacccaggacagccctgcccggacctgccaggacctgaagctgtgccaccctgagctgcctgatggagagtactgggtggaccccaaccagggctgtgccagagatgccttccgggtcttctgcaacttcaccgctggaggagagacctgtgtgaccccaagagatgatgtgacccagttctcctatgtggacagcgagggcagccctgtgggcgtggtgcagctgaccttcctgcggctgctgtctgtgtctgcccaccaggatgtgtcctacccctgcagcggggccgccagagatggccccctgcggctgcggggggccaatgaagatgagctgagccctgagaccagcccctacgtgaaggagttcagagatggctgccagacccagcagggccgcacagtgctggaggtgaggacccctgtgctggagcagctgcctgtgctggatgccagcttcagtgacctgggcgccccaccccggcggggcggcgtgctgctgggccctgtgtgcttcatgggctag

SEQ ID NO: 232540 - DNA, 5148 bp, Artificial Sequence
  derived and/or modified sequence
atggagcgctgcagccgctgccaccggctgctgctgctgctgcccctggtgctgggcctgtctgctgcccctggctgggccggggcccctcctgtggatgtgctgcgggccctgcgcttccccagcctgcctgatggagtgcggcgggccaagggcatctgcccagcagatgtggcctacagagtggcccggcctgcccagctgagcgcccccacccggcagctgtttcctgggggcttccccaaggacttcagcctgctgactgtggtgaggacccggcccggcctgcaggcccccctgctgaccctgtacagcgcccagggcgtgcggcagctgggcctggagctgggcccccctgtgcgcttcctgtatgaggaccagacaggccggccccagccccccagccagcctgtgttccggggcctgagcctggctgatggcaagtggcaccgggtggccgtggccgtgaagggccagagcgtgaccctcatcgtggactgcaagaagagggtgacccggcccctgcccaggtctgcccggcctgtgctggacacccacggcgtcatcatctttggagcccgcatcctggatgaggaggtgtttgaaggagatgtgcaggagctggccatcgtgcctggggtgcaggccgcctatgagagctgtgagcagaaggagctggagtgtgagggcggccagcgggagcggccccagaaccagcagccccaccgggcccagaggagcccccagcagcagcccagccggctgcaccggccccagaaccaggagccccagagccagcccacagagagcctgtactatgactacaagccaccctactatgatgtgatgaccaccggcaccaccccagactaccaggagcagacagacctgcaggtgcccccaacagctgaccgcttccaggccgaggagtatggagagggcggcacagaccccccagagggcccctatgactacacctacggctatggagatgactaccgggaggagacagagctgggccctgccctgtctgctgagacagcccacagcggggctgctgcccacggcccccggggcctgaagggggagaagggggagcctgctgtgctggagcccggcatgctggtggagggccccccaggccctgagggccctgctggcctgattggccccccaggcatccagggcaaccctggccctgtgggggaccccggggagcggggccccccaggccgggccggcctgcccggcagtgatggagcccctggccccccaggcaccagcctgatgctgcccttccgctttggaagtggcggcggggacaagggccctgtggtggccgcccaggaggcccaggcccaggccatcctgcagcaggcccggctggccctgcggggccccccaggccccatgggctacacaggccggcccggccccctgggccagcccggcagccctggcctgaagggggagagcggggacctgggcccccagggcccccggggcccccagggcctgactggacctcctgggaaggccggcagaagaggccgggccggggctgatggagcccggggcatgcctggggaccccggggtgaagggggaccggggctttgatggcctgcccggcctgcccggggagaagggccacagaggagacacaggagcccagggcctgcccggccccccaggagaagatggagagagaggagatgatggagagatcggcccccggggcctgcccggggagagcggcccccggggcctgctgggccccaagggccccccaggcatccctggccccccaggagtgcggggcatggatggcccccagggccccaagggcagcctgggcccccagggcgagcccggccccccaggccagcagggcaccccaggcacccagggcctgcccggcccccagggcgccatcggcccccacggggagaagggcccccagggcaagccaggcctgcccggcatgcctggcagtgatggccccccaggccaccctgggaaggagggccccccaggcaccaagggcaaccagggccccagcggcccccagggccccctgggctacccaggcccccggggcgtgaagggcgtggatggcatccggggcctgaagggccacaagggggagaagggagaagatggcttccctggcttcaagggggacattggagtgaagggggacagaggagaggtgggcgtgcccggcagcagaggagaagatggccctgagggccccaagggccgcacaggccccactggagaccccggccccccaggcctgatgggagagaagggcaagctgggcgtgcccggcctgcccggctacccaggccggcagggccccaagggcagcctgggcttccctggcttccctggggccagcggggagaagggggcccggggcctgagcggcaagagcggccccagaggagagcggggccccaccggcccccggggccagaggggccccaggggggccaccgggaagagcggggccaagggcaccagcggaggagatggcccccacggccccccaggagagcggggcctgcccggcccccagggccccaacggcttccctggccccaagggccccccaggccccccaggcaaggatggcctgcccggccaccctggccagagaggagaggtgggcttccagggcaagacaggccccccaggccccccaggagtggtgggcccccagggcgccgccggggagaccggccccatgggagagcggggccaccctggccccccaggccccccaggagagcagggcctgcccggcacagctgggaaggagggcaccaagggggaccccggccccccaggggcccctgggaaggatggccctgctggcctgcggggcttccctggagagcggggcctgcccggcacagctgggggccctggcctgaagggaaatgaaggccccagcggccccccaggccctgctggcagccctggagagagaggagctgctggcagcggcggccccatcggccccccaggccggcccggcccccagggccccccaggagctgctggggagaagggcgtgcctggagagaagggccccatcggccccaccggcagagatggagtgcagggccctgtgggcctgcccggccctgctggccccccaggagtggccggagaagatggagacaagggggaggtgggggaccccggccagaagggcaccaagggcaacaagggggagcacggccccccaggccccccaggccccatcggccctgtgggccagcccggggctgctggagcagatggagagcccggggcccggggcccccagggccactttggagccaagggagatgagggcacccggggcttcaacggccccccaggccccatcggcctgcagggcctgcccggccccagcggggagaagggggagactggagatgtgggccccatgggccccccaggccccccaggcccccggggccctgctggccccaacggggctgatggcccccagggccccccaggaggagtgggcaacctgggccccccaggagagaagggggagcccggggagagcggcagccctggcatccagggcgagcccggggtgaagggccccagaggagagcggggggagaagggggagagcggccagcccggggagcccggccccccaggccccaagggccccactggagatgatggccccaagggcaaccctggccctgtgggcttccctggggaccccggccccccaggagagggcggcccccggggccaggatggagccaagggggacagaggagaagatggagagcccggccagcccggcagccctggccccactggagaaaatggccccccaggccccctgggcaagaggggccctgctggcagccctggcagcgagggccggcagggcggcaagggggccaagggggaccccggggccatcggggcccctgggaagacaggccctgtgggccctgctggccctgctgggaagccaggcccagatggcctgcggggcctgcccggctctgtgggccagcagggccggcctggggccaccggccaggccggccccccaggccctgtgggccccccaggcctgcccggcctgcggggagatgctggggccaagggggagaagggccaccctggcctgattggcctcatcggccccccaggagagcagggcgagaagggggaccggggcctgcccggcccccagggcagccctggccagaagggggagatgggcatccctggggccagcggccccatcggccctgggggccccccaggcctgcccggccctgctggccccaagggggccaagggggccactggacctgggggccccaagggggagaagggcgtgcagggccccccaggccaccctggccccccaggagaggtgatccagcccctgcccatccagatgcccaagaagacccggcgctctgtggatggcagccggctgatgcaggaggatgaggccatccccactggaggagcccctggcagccctgggggcctggaggagatcttcggcagcctggacagcctgcgggaggagattgagcagatgagaagacccaccggcacccaggacagccctgcccggacctgccaggacctgaagctgtgccaccctgagctgcctgatggagagtactgggtggaccccaaccagggctgtgccagagatgccttccgggtcttctgcaacttcaccgctggaggagagacctgtgtgaccccaagagatgatgtgacccagttctcctatgtggacagcgagggcagccctgtgggcgtggtgcagctgaccttcctgcggctgctgtctgtgtctgcccaccaggatgtgtcctacccctgcagcggggccgccagagatggccccctgcggctgcggggggccaatgaagatgagctgagccctgagaccagcccctacgtgaaggagttcagagatggctgccagacccagcagggccgcacagtgctggaggtgaggacccctgtgctggagcagctgcctgtgctggatgccagcttcagtgacctgggcgccccaccccggcggggcggcgtgctgctgggccctgtgtgcttcatgggctag

SEQ ID NO: 232541 - DNA, 6425 bp, Artificial Sequence
  derived and/or modified sequence
cacacagaagcggcagccaccgaggagggagcagtgccgggagccccgacggcgccttgctgcatggagctgggccgctgacagctgtcgctgcccgcagcctctgacctccctgggaccccggcgtctgaggctcatagtctgctccctgtcttctgtcagcctcagggcatccagcgtctcaggccgacctgggtccctgggacccggcgtttcggcttctcagccatggagcggtgcagccgctgccatcgcctcctcctcctcctacctctggtgctggggctgagcgcggccccaggctgggcaggtgcaccccctgtggatgtgctccgggccctgaggttcccctccctccctgatggtgtccggagagcgaaaggcatctgtccagctgatgtggcctaccgagtggcacgacctgcccagctcagtgcacccactcgccagcttttcccaggaggatttcccaaagatttctctctgctgactgttgtccggacccgccctggtctccaagctcccctcctgactctctacagtgcccagggtgtccgacagctgggcctggagctgggccgacctgtccgcttcctgtatgaagaccagactgggcggcctcaacctccctctcagccagtcttccgaggcctcagcctagcagatggcaagtggcaccgtgtggctgtggctgtgaagggccagtctgtcaccctcattgttgactgcaagaagcgagtcacccggcctctcccccgaagtgctcgtccagtattggacacccatggagtgatcatctttggtgcccgtattctggatgaagaagtctttgagggtgatgtccaggagctggccattgtcccaggggtccaggcagcctatgaatcatgtgaacagaaggagctggaatgcgaggggggccagagggaaagaccccaaaaccaacagcctcacagagcccagagatctccacagcagcaaccatcaagacttcacaggccacaaaatcaggaaccccagagccagcccactgagtctctctactatgactacgagcccccctattatgatgtgatgactacggggacaacccctgattatcaggaccccaccccaggtgaagaggaagaaatcctggagtcgagcctcttgccaccccttgaggaggagcagacagatctccaggtcccccccacagccgacaggttccaggcagaggaatatggggagggtggcacagacccccctgaagggccctacgattacacctatggctatggggatgattatcgtgaggagacagagcttggccctgccctctctgcggagacagcccactcaggagccgctgcccatggaccccgagggctgaagggagagaaaggagagcctgcagtgttggaacctggtatgctcgtggaggggccccctggcccagaaggccctgcgggattgattggtccccctggcatccaggggaacccaggcccagttggagaccctggagagaggggcccccctggccgagcagggctccctggatcagatggggctcctggtcctcctggcacatctctcatgctcccattccggtttggcagtggtgggggtgacaagggccctgtggtggcggcccaggaggctcaggcccaggcgatcctgcagcaggcgaggctggcgctccgtggaccccctggccccatgggatacacagggcgccctggacccttgggccaacctgggagccctggcctgaaaggagagtctggagacttaggacctcagggccccagaggacctcagggcctcacaggccctcctggcaaggctgggcgaaggggccgggcaggtgctgatggagcccgagggatgcctggagatcctggagtgaagggtgaccgaggttttgatggactcccagggctccctggagagaagggccataggggtgatactggtgcccagggccttcctggtccccctggtgaggatggagagaggggagatgacggggagattgggcctcgagggctgcctggagagtcgggacctcgaggtctccttggccccaaaggcccacctggtattcctggaccccctggcgtccgaggcatggatggtccccagggccccaaagggagcttgggaccccagggagagccaggacctcctggacaacagggcacccctgggacccagggtcttcccgggccccagggtgccatcggccctcatggagagaagggtcctcaagggaagccagggctccccggcatgcctggctcagacggacccccgggtcacccagggaaggaaggtccccctggaaccaaaggaaaccagggtccctctggacctcagggacctctaggatacccaggacctcgaggggtcaagggtgtggacggaattcggggtctgaagggtcataagggtgagaagggtgaggatggctttcctgggttcaaaggtgacataggcgtgaaaggtgacaggggcgaagttggagtccctggttccaggggagaggatggtcctgaggggccaaagggacgcactggaccgactggagaccctgggcccccagggctcatgggcgagaagggcaagctgggtgttcctggtctgcctggctatcctggacgtcagggacccaaggggtccctaggatttcctggctttcctggtgccagtggagagaagggagcccggggcctgtcggggaagtcagggcctcggggagaacggggccccacgggtccacggggtcagcggggaccccgaggtgccactgggaagtctggagctaagggaacatctggtggtgatggcccccatgggccccctggagagaggggcctccctggacctcagggtcccaacgggtttcctggaccgaaaggacccccgggcccccctgggaaggatgggctgccgggacacccaggccaaagaggagaagtgggtttccaagggaagaccggcccccctggtcctccaggagtggtgggacctcagggagcagcaggagaaaccggccctatgggggagagaggtcacccaggccccccggggccccctggagagcagggactacctgggacagctggaaaagaaggaacaaagggtgaccctggtccccctggggccccagggaaggatggtcctgctggtctgaggggattcccaggagagagaggcctcccaggcactgctggtggacctggtttgaaggggaatgaaggtccgtctggcccccctggccctgcaggctcccctggggaacgaggtgcagcaggatcagggggacccattggtccgccagggcgcccaggcccgcagggtccccctggagcagcaggagagaaaggtgtcccaggtgagaagggccccattggcccgactggccgagatggagtgcagggtcctgtggggcttcctggtcctgctgggcctccaggtgtggctggagaggatggagacaagggtgaggtgggggaccccggacagaagggcaccaaagggaacaagggtgaacatggccctcctggaccccctggacccattggtcctgtggggcagcctggagcagcgggagcagatggggagcccggagctcggggaccccagggacactttggagccaaaggtgatgaaggaacaagaggattcaatgggcccccaggacccattggcctacagggtttgccaggcccctctggggagaagggagaaacaggagatgtgggtcctatgggaccacctggccccccaggacctcgaggtccagctggacccaatggcgctgatggcccacaaggtcccccaggaggtgttgggaacctgggtccccctggagagaagggggaaccaggagagtcaggatctccagggatccagggcgagccaggtgtcaagggtccacgcggggaacgtggagagaaaggagagtcggggcagccaggagagccagggccaccagggcctaaaggccccacaggcgatgatggccccaaagggaaccctggtcctgttggttttcctggtgaccctggcccccctggagaaggtggccctcggggccaggatggtgctaagggtgaccgaggcgaggatggtgagccaggacagcctggatcccctggtcccaccggggagaatggacccccagggccacttggaaagcgaggtcctgctggctcgcctggttccgaggggcgacaaggagggaagggagccaagggagatcctggcgctataggtgccccggggaagacaggcccggtgggtcctgcaggcccagcagggaaacctggccctgatggtctgagggggctcccaggctcagtgggtcagcaaggccgacctggagctacaggccaggctgggcccccaggtcctgtgggacccccagggctgcctggtctccggggcgatgctggagccaagggagagaagggccacccaggtctcattggactgattgggcccccgggtgagcagggagagaagggagatcggggacttcctgggcctcagggctcccctgggcagaagggtgagatgggtatcccaggagcatccggccccattggtcctggaggtccccccggcctccccggacctgctggccccaaaggagccaaaggagccacaggcccaggcggacccaagggagagaagggtgtgcagggccctccaggacacccgggtcccccaggcgaggtgatccagccactgcccattcagatgcccaagaagactcggcgctcggtggatggaagccgtctgatgcaggaagatgaggccataccgaccgggggagcccccggcagtcctggggggctggaggagatctttggctcactcgactccctgcgggaggagatcgagcagatgaggcggccaacagggacccaggacagccctgctcgcacctgccaggacctgaagctgtgccacccagagcttcccgatggagagtactgggtcgaccccaaccagggctgtgctcgggatgccttccgagttttctgcaacttcacagcagggggtgagacctgtgtgacgcctagggatgacgtcacgcagttctcttacgtggactcagagggctccccagtgggtgtggtccagctcaccttcctgcggctgctcagcgtctcagcccaccaggacgtctcctacccctgctctggagcagcccgtgacggtcccctgagactccgtggggccaatgaggatgagctgagcccggagactagcccctatgtcaaagaattcagagatggctgccagacacagcaaggccggacggtgctggaggtgcgaacgcctgtgctggagcagctgccagtgctggatgcctccttctcagacctgggagccccaccgaggcggggaggggtgctgctggggcctgtctgcttcatgggataggaccgtctctgtctgatcctgtccattcggaaccaggcccacctggaatcccacaacatcagctctgtgccacctcccaagagggctcctcactatctagggagccctgggccagggcgtggagagccctcagtcggggcaggccaggggaggggtgaagtggttgcctggacaccccacgggaggagtggcatctggggctcttggccctcccacctggagcctgttacccgttagagagctgagacccttatttaaaactcacctcccaatcaccccaaacaaatggaagagaagagaaaggacatggcgtattttgtatttaaaagtaattgtattaattatttaaagtgtggaaagcaaaataacaaaaaagagaaacgccaacaaaaatcagcagatgttgaagacaggggtctcgggggtgggctccggcacccacatcctggagtcaggactttcctcagtgactgtgtgtaggggggtttcagggctgaaccccacctccctcccaccttcctcccacctcacctgtcgcacccactgtgaaagttggaatatgtggtctccctggcctcagggctctgactctgccagggtggggctctctaacccacaggtgttggctgcctggcccatgtgcccactgtctcttccacttggtctgggtttggcaggcactgcctgctacttgagggccaggatgctcccccagggaagaaacggaatagtgtggggtgtgtgcagggctgcatcccgcagatggctggaatattaaaattcttctatattggctggtaaattgccatggccctgagccactgagtatgttcattgccacccctgtccctcccctgggcacccctcactttccctgatcctgcaattaaagggttaatgtgtggcatatggaagggactcccaggaccctgtgcccagcttccatgctgactgatggttaaataatgtgattgtctcctcccagg

SEQ ID NO: 232542 - DNA, 6362 bp, Artificial Sequence
  derived and/or modified sequence
cacacagaagcggcagccaccgaggagggagcagtgccgggagccccgacggcgccttgctgcatggagctgggccgctgacagctgtcgctgcccgcagcctctgacctccctgggaccccggcgtctgaggctcatagtctgctccctgtcttctgtcagcctcagggcatccagcgtctcaggccgacctgggtccctgggacccggcgtttcggcttctcagccatggagcggtgcagccgctgccatcgcctcctcctcctcctacctctggtgctggggctgagcgcggccccaggctgggcaggtgcaccccctgtggatgtgctccgggccctgaggttcccctccctccctgatggtgtccggagagcgaaaggcatctgtccagctgatgtggcctaccgagtggcacgacctgcccagctcagtgcacccactcgccagcttttcccaggaggatttcccaaagatttctctctgctgactgttgtccggacccgccctggtctccaagctcccctcctgactctctacagtgcccagggtgtccgacagctgggcctggagctgggccgacctgtccgcttcctgtatgaagaccagactgggcggcctcaacctccctctcagccagtcttccgaggcctcagcctagcagatggcaagtggcaccgtgtggctgtggctgtgaagggccagtctgtcaccctcattgttgactgcaagaagcgagtcacccggcctctcccccgaagtgctcgtccagtattggacacccatggagtgatcatctttggtgcccgtattctggatgaagaagtctttgagggtgatgtccaggagctggccattgtcccaggggtccaggcagcctatgaatcatgtgaacagaaggagctggaatgcgaggggggccagagggaaagaccccaaaaccaacagcctcacagagcccagagatctccacagcagcaaccatcaagacttcacaggccacaaaatcaggaaccccagagccagcccactgagtctctctactatgactacgagcccccctattatgatgtgatgactacggggacaacccctgattatcaggagcagacagatctccaggtcccccccacagccgacaggttccaggcagaggaatatggggagggtggcacagacccccctgaagggccctacgattacacctatggctatggggatgattatcgtgaggagacagagcttggccctgccctctctgcggagacagcccactcaggagccgctgcccatggaccccgagggctgaagggagagaaaggagagcctgcagtgttggaacctggtatgctcgtggaggggccccctggcccagaaggccctgcgggattgattggtccccctggcatccaggggaacccaggcccagttggagaccctggagagaggggcccccctggccgagcagggctccctggatcagatggggctcctggtcctcctggcacatctctcatgctcccattccggtttggcagtggtgggggtgacaagggccctgtggtggcggcccaggaggctcaggcccaggcgatcctgcagcaggcgaggctggcgctccgtggaccccctggccccatgggatacacagggcgccctggacccttgggccaacctgggagccctggcctgaaaggagagtctggagacttaggacctcagggccccagaggacctcagggcctcacaggccctcctggcaaggctgggcgaaggggccgggcaggtgctgatggagcccgagggatgcctggagatcctggagtgaagggtgaccgaggttttgatggactcccagggctccctggagagaagggccataggggtgatactggtgcccagggccttcctggtccccctggtgaggatggagagaggggagatgacggggagattgggcctcgagggctgcctggagagtcgggacctcgaggtctccttggccccaaaggcccacctggtattcctggaccccctggcgtccgaggcatggatggtccccagggccccaaagggagcttgggaccccagggagagccaggacctcctggacaacagggcacccctgggacccagggtcttcccgggccccagggtgccatcggccctcatggagagaagggtcctcaagggaagccagggctccccggcatgcctggctcagacggacccccgggtcacccagggaaggaaggtccccctggaaccaaaggaaaccagggtccctctggacctcagggacctctaggatacccaggacctcgaggggtcaagggtgtggacggaattcggggtctgaagggtcataagggtgagaagggtgaggatggctttcctgggttcaaaggtgacataggcgtgaaaggtgacaggggcgaagttggagtccctggttccaggggagaggatggtcctgaggggccaaagggacgcactggaccgactggagaccctgggcccccagggctcatgggcgagaagggcaagctgggtgttcctggtctgcctggctatcctggacgtcagggacccaaggggtccctaggatttcctggctttcctggtgccagtggagagaagggagcccggggcctgtcggggaagtcagggcctcggggagaacggggccccacgggtccacggggtcagcggggaccccgaggtgccactgggaagtctggagctaagggaacatctggtggtgatggcccccatgggccccctggagagaggggcctccctggacctcagggtcccaacgggtttcctggaccgaaaggacccccgggcccccctgggaaggatgggctgccgggacacccaggccaaagaggagaagtgggtttccaagggaagaccggcccccctggtcctccaggagtggtgggacctcagggagcagcaggagaaaccggccctatgggggagagaggtcacccaggccccccggggccccctggagagcagggactacctgggacagctggaaaagaaggaacaaagggtgaccctggtccccctggggccccagggaaggatggtcctgctggtctgaggggattcccaggagagagaggcctcccaggcactgctggtggacctggtttgaaggggaatgaaggtccgtctggcccccctggccctgcaggctcccctggggaacgaggtgcagcaggatcagggggacccattggtccgccagggcgcccaggcccgcagggtccccctggagcagcaggagagaaaggtgtcccaggtgagaagggccccattggcccgactggccgagatggagtgcagggtcctgtggggcttcctggtcctgctgggcctccaggtgtggctggagaggatggagacaagggtgaggtgggggaccccggacagaagggcaccaaagggaacaagggtgaacatggccctcctggaccccctggacccattggtcctgtggggcagcctggagcagcgggagcagatggggagcccggagctcggggaccccagggacactttggagccaaaggtgatgaaggaacaagaggattcaatgggcccccaggacccattggcctacagggtttgccaggcccctctggggagaagggagaaacaggagatgtgggtcctatgggaccacctggccccccaggacctcgaggtccagctggacccaatggcgctgatggcccacaaggtcccccaggaggtgttgggaacctgggtccccctggagagaagggggaaccaggagagtcaggatctccagggatccagggcgagccaggtgtcaagggtccacgcggggaacgtggagagaaaggagagtcggggcagccaggagagccagggccaccagggcctaaaggccccacaggcgatgatggccccaaagggaaccctggtcctgttggttttcctggtgaccctggcccccctggagaaggtggccctcggggccaggatggtgctaagggtgaccgaggcgaggatggtgagccaggacagcctggatcccctggtcccaccggggagaatggacccccagggccacttggaaagcgaggtcctgctggctcgcctggttccgaggggcgacaaggagggaagggagccaagggagatcctggcgctataggtgccccggggaagacaggcccggtgggtcctgcaggcccagcagggaaacctggccctgatggtctgagggggctcccaggctcagtgggtcagcaaggccgacctggagctacaggccaggctgggcccccaggtcctgtgggacccccagggctgcctggtctccggggcgatgctggagccaagggagagaagggccacccaggtctcattggactgattgggcccccgggtgagcagggagagaagggagatcggggacttcctgggcctcagggctcccctgggcagaagggtgagatgggtatcccaggagcatccggccccattggtcctggaggtccccccggcctccccggacctgctggccccaaaggagccaaaggagccacaggcccaggcggacccaagggagagaagggtgtgcagggccctccaggacacccgggtcccccaggcgaggtgatccagccactgcccattcagatgcccaagaagactcggcgctcggtggatggaagccgtctgatgcaggaagatgaggccataccgaccgggggagcccccggcagtcctggggggctggaggagatctttggctcactcgactccctgcgggaggagatcgagcagatgaggcggccaacagggacccaggacagccctgctcgcacctgccaggacctgaagctgtgccacccagagcttcccgatggagagtactgggtcgaccccaaccagggctgtgctcgggatgccttccgagttttctgcaacttcacagcagggggtgagacctgtgtgacgcctagggatgacgtcacgcagttctcttacgtggactcagagggctccccagtgggtgtggtccagctcaccttcctgcggctgctcagcgtctcagcccaccaggacgtctcctacccctgctctggagcagcccgtgacggtcccctgagactccgtggggccaatgaggatgagctgagcccggagactagcccctatgtcaaagaattcagagatggctgccagacacagcaaggccggacggtgctggaggtgcgaacgcctgtgctggagcagctgccagtgctggatgcctccttctcagacctgggagccccaccgaggcggggaggggtgctgctggggcctgtctgcttcatgggataggaccgtctctgtctgatcctgtccattcggaaccaggcccacctggaatcccacaacatcagctctgtgccacctcccaagagggctcctcactatctagggagccctgggccagggcgtggagagccctcagtcggggcaggccaggggaggggtgaagtggttgcctggacaccccacgggaggagtggcatctggggctcttggccctcccacctggagcctgttacccgttagagagctgagacccttatttaaaactcacctcccaatcaccccaaacaaatggaagagaagagaaaggacatggcgtattttgtatttaaaagtaattgtattaattatttaaagtgtggaaagcaaaataacaaaaaagagaaacgccaacaaaaatcagcagatgttgaagacaggggtctcgggggtgggctccggcacccacatcctggagtcaggactttcctcagtgactgtgtgtaggggggtttcagggctgaaccccacctccctcccaccttcctcccacctcacctgtcgcacccactgtgaaagttggaatatgtggtctccctggcctcagggctctgactctgccagggtggggctctctaacccacaggtgttggctgcctggcccatgtgcccactgtctcttccacttggtctgggtttggcaggcactgcctgctacttgagggccaggatgctcccccagggaagaaacggaatagtgtggggtgtgtgcagggctgcatcccgcagatggctggaatattaaaattcttctatattggctggtaaattgccatggccctgagccactgagtatgttcattgccacccctgtccctcccctgggcacccctcactttccctgatcctgcaattaaagggttaatgtgtggcatatggaagggactcccaggaccctgtgcccagcttccatgctgactgatggttaaataatgtgattgtctcctcccagg

SEQ ID NO: 232543 - DNA, 6284 bp, Artificial Sequence
  derived and/or modified sequence
cacacagaagcggcagccaccgaggagggagcagtgccgggagccccgacggcgccttgctgcatggagctgggccgctgacagctgtcgctgcccgcagcctctgacctccctgggaccccggcgtctgaggctcatagtctgctccctgtcttctgtcagcctcagggcatccagcgtctcaggccgacctgggtccctgggacccggcgtttcggcttctcagccatggagcggtgcagccgctgccatcgcctcctcctcctcctacctctggtgctggggctgagcgcggccccaggctgggcaggtgcaccccctgtggatgtgctccgggccctgaggttcccctccctccctgatggtgtccggagagcgaaaggcatctgtccagctgatgtggcctaccgagtggcacgacctgcccagctcagtgcacccactcgccagcttttcccaggaggatttcccaaagatttctctctgctgactgttgtccggacccgccctggtctccaagctcccctcctgactctctacagtgcccagggtgtccgacagctgggcctggagctgggccgacctgtccgcttcctgtatgaagaccagactgggcggcctcaacctccctctcagccagtcttccgaggcctcagcctagcagatggcaagtggcaccgtgtggctgtggctgtgaagggccagtctgtcaccctcattgttgactgcaagaagcgagtcacccggcctctcccccgaagtgctcgtccagtattggacacccatggagtgatcatctttggtgcccgtattctggatgaagaagtctttgagggtgatgtccaggagctggccattgtcccaggggtccaggcagcctatgaatcatgtgaacagaaggagctggaatgcgaggggggccagagggaaagaccccaaaaccaacagcctcacagagcccagagatctccacagcagcaaccatcaagacttcacaggccacaaaatcaggaaccccagagccaggagcagacagatctccaggtcccccccacagccgacaggttccaggcagaggaatatggggagggtggcacagacccccctgaagggccctacgattacacctatggctatggggatgattatcgtgaggagacagagcttggccctgccctctctgcggagacagcccactcaggagccgctgcccatggaccccgagggctgaagggagagaaaggagagcctgcagtgttggaacctggtatgctcgtggaggggccccctggcccagaaggccctgcgggattgattggtccccctggcatccaggggaacccaggcccagttggagaccctggagagaggggcccccctggccgagcagggctccctggatcagatggggctcctggtcctcctggcacatctctcatgctcccattccggtttggcagtggtgggggtgacaagggccctgtggtggcggcccaggaggctcaggcccaggcgatcctgcagcaggcgaggctggcgctccgtggaccccctggccccatgggatacacagggcgccctggacccttgggccaacctgggagccctggcctgaaaggagagtctggagacttaggacctcagggccccagaggacctcagggcctcacaggccctcctggcaaggctgggcgaaggggccgggcaggtgctgatggagcccgagggatgcctggagatcctggagtgaagggtgaccgaggttttgatggactcccagggctccctggagagaagggccataggggtgatactggtgcccagggccttcctggtccccctggtgaggatggagagaggggagatgacggggagattgggcctcgagggctgcctggagagtcgggacctcgaggtctccttggccccaaaggcccacctggtattcctggaccccctggcgtccgaggcatggatggtccccagggccccaaagggagcttgggaccccagggagagccaggacctcctggacaacagggcacccctgggacccagggtcttcccgggccccagggtgccatcggccctcatggagagaagggtcctcaagggaagccagggctccccggcatgcctggctcagacggacccccgggtcacccagggaaggaaggtccccctggaaccaaaggaaaccagggtccctctggacctcagggacctctaggatacccaggacctcgaggggtcaagggtgtggacggaattcggggtctgaagggtcataagggtgagaagggtgaggatggctttcctgggttcaaaggtgacataggcgtgaaaggtgacaggggcgaagttggagtccctggttccaggggagaggatggtcctgaggggccaaagggacgcactggaccgactggagaccctgggcccccagggctcatgggcgagaagggcaagctgggtgttcctggtctgcctggctatcctggacgtcagggacccaaggggtccctaggatttcctggctttcctggtgccagtggagagaagggagcccggggcctgtcggggaagtcagggcctcggggagaacggggccccacgggtccacggggtcagcggggaccccgaggtgccactgggaagtctggagctaagggaacatctggtggtgatggcccccatgggccccctggagagaggggcctccctggacctcagggtcccaacgggtttcctggaccgaaaggacccccgggcccccctgggaaggatgggctgccgggacacccaggccaaagaggagaagtgggtttccaagggaagaccggcccccctggtcctccaggagtggtgggacctcagggagcagcaggagaaaccggccctatgggggagagaggtcacccaggccccccggggccccctggagagcagggactacctgggacagctggaaaagaaggaacaaagggtgaccctggtccccctggggccccagggaaggatggtcctgctggtctgaggggattcccaggagagagaggcctcccaggcactgctggtggacctggtttgaaggggaatgaaggtccgtctggcccccctggccctgcaggctcccctggggaacgaggtgcagcaggatcagggggacccattggtccgccagggcgcccaggcccgcagggtccccctggagcagcaggagagaaaggtgtcccaggtgagaagggccccattggcccgactggccgagatggagtgcagggtcctgtggggcttcctggtcctgctgggcctccaggtgtggctggagaggatggagacaagggtgaggtgggggaccccggacagaagggcaccaaagggaacaagggtgaacatggccctcctggaccccctggacccattggtcctgtggggcagcctggagcagcgggagcagatggggagcccggagctcggggaccccagggacactttggagccaaaggtgatgaaggaacaagaggattcaatgggcccccaggacccattggcctacagggtttgccaggcccctctggggagaagggagaaacaggagatgtgggtcctatgggaccacctggccccccaggacctcgaggtccagctggacccaatggcgctgatggcccacaaggtcccccaggaggtgttgggaacctgggtccccctggagagaagggggaaccaggagagtcaggatctccagggatccagggcgagccaggtgtcaagggtccacgcggggaacgtggagagaaaggagagtcggggcagccaggagagccagggccaccagggcctaaaggccccacaggcgatgatggccccaaagggaaccctggtcctgttggttttcctggtgaccctggcccccctggagaaggtggccctcggggccaggatggtgctaagggtgaccgaggcgaggatggtgagccaggacagcctggatcccctggtcccaccggggagaatggacccccagggccacttggaaagcgaggtcctgctggctcgcctggttccgaggggcgacaaggagggaagggagccaagggagatcctggcgctataggtgccccggggaagacaggcccggtgggtcctgcaggcccagcagggaaacctggccctgatggtctgagggggctcccaggctcagtgggtcagcaaggccgacctggagctacaggccaggctgggcccccaggtcctgtgggacccccagggctgcctggtctccggggcgatgctggagccaagggagagaagggccacccaggtctcattggactgattgggcccccgggtgagcagggagagaagggagatcggggacttcctgggcctcagggctcccctgggcagaagggtgagatgggtatcccaggagcatccggccccattggtcctggaggtccccccggcctccccggacctgctggccccaaaggagccaaaggagccacaggcccaggcggacccaagggagagaagggtgtgcagggccctccaggacacccgggtcccccaggcgaggtgatccagccactgcccattcagatgcccaagaagactcggcgctcggtggatggaagccgtctgatgcaggaagatgaggccataccgaccgggggagcccccggcagtcctggggggctggaggagatctttggctcactcgactccctgcgggaggagatcgagcagatgaggcggccaacagggacccaggacagccctgctcgcacctgccaggacctgaagctgtgccacccagagcttcccgatggagagtactgggtcgaccccaaccagggctgtgctcgggatgccttccgagttttctgcaacttcacagcagggggtgagacctgtgtgacgcctagggatgacgtcacgcagttctcttacgtggactcagagggctccccagtgggtgtggtccagctcaccttcctgcggctgctcagcgtctcagcccaccaggacgtctcctacccctgctctggagcagcccgtgacggtcccctgagactccgtggggccaatgaggatgagctgagcccggagactagcccctatgtcaaagaattcagagatggctgccagacacagcaaggccggacggtgctggaggtgcgaacgcctgtgctggagcagctgccagtgctggatgcctccttctcagacctgggagccccaccgaggcggggaggggtgctgctggggcctgtctgcttcatgggataggaccgtctctgtctgatcctgtccattcggaaccaggcccacctggaatcccacaacatcagctctgtgccacctcccaagagggctcctcactatctagggagccctgggccagggcgtggagagccctcagtcggggcaggccaggggaggggtgaagtggttgcctggacaccccacgggaggagtggcatctggggctcttggccctcccacctggagcctgttacccgttagagagctgagacccttatttaaaactcacctcccaatcaccccaaacaaatggaagagaagagaaaggacatggcgtattttgtatttaaaagtaattgtattaattatttaaagtgtggaaagcaaaataacaaaaaagagaaacgccaacaaaaatcagcagatgttgaagacaggggtctcgggggtgggctccggcacccacatcctggagtcaggactttcctcagtgactgtgtgtaggggggtttcagggctgaaccccacctccctcccaccttcctcccacctcacctgtcgcacccactgtgaaagttggaatatgtggtctccctggcctcagggctctgactctgccagggtggggctctctaacccacaggtgttggctgcctggcccatgtgcccactgtctcttccacttggtctgggtttggcaggcactgcctgctacttgagggccaggatgctcccccagggaagaaacggaatagtgtggggtgtgtgcagggctgcatcccgcagatggctggaatattaaaattcttctatattggctggtaaattgccatggccctgagccactgagtatgttcattgccacccctgtccctcccctgggcacccctcactttccctgatcctgcaattaaagggttaatgtgtggcatatggaagggactcccaggaccctgtgcccagcttccatgctgactgatggttaaataatgtgattgtctcctcccagg

SEQ ID NO: 232544 - DNA, 6347 bp, Artificial Sequence
  derived and/or modified sequence
cacacagaagcggcagccaccgaggagggagcagtgccgggagccccgacggcgccttgctgcatggagctgggccgctgacagctgtcgctgcccgcagcctctgacctccctgggaccccggcgtctgaggctcatagtctgctccctgtcttctgtcagcctcagggcatccagcgtctcaggccgacctgggtccctgggacccggcgtttcggcttctcagccatggagcggtgcagccgctgccatcgcctcctcctcctcctacctctggtgctggggctgagcgcggccccaggctgggcaggtgcaccccctgtggatgtgctccgggccctgaggttcccctccctccctgatggtgtccggagagcgaaaggcatctgtccagctgatgtggcctaccgagtggcacgacctgcccagctcagtgcacccactcgccagcttttcccaggaggatttcccaaagatttctctctgctgactgttgtccggacccgccctggtctccaagctcccctcctgactctctacagtgcccagggtgtccgacagctgggcctggagctgggccgacctgtccgcttcctgtatgaagaccagactgggcggcctcaacctccctctcagccagtcttccgaggcctcagcctagcagatggcaagtggcaccgtgtggctgtggctgtgaagggccagtctgtcaccctcattgttgactgcaagaagcgagtcacccggcctctcccccgaagtgctcgtccagtattggacacccatggagtgatcatctttggtgcccgtattctggatgaagaagtctttgagggtgatgtccaggagctggccattgtcccaggggtccaggcagcctatgaatcatgtgaacagaaggagctggaatgcgaggggggccagagggaaagaccccaaaaccaacagcctcacagagcccagagatctccacagcagcaaccatcaagacttcacaggccacaaaatcaggaaccccagagccaggaccccaccccaggtgaagaggaagaaatcctggagtcgagcctcttgccaccccttgaggaggagcagacagatctccaggtcccccccacagccgacaggttccaggcagaggaatatggggagggtggcacagacccccctgaagggccctacgattacacctatggctatggggatgattatcgtgaggagacagagcttggccctgccctctctgcggagacagcccactcaggagccgctgcccatggaccccgagggctgaagggagagaaaggagagcctgcagtgttggaacctggtatgctcgtggaggggccccctggcccagaaggccctgcgggattgattggtccccctggcatccaggggaacccaggcccagttggagaccctggagagaggggcccccctggccgagcagggctccctggatcagatggggctcctggtcctcctggcacatctctcatgctcccattccggtttggcagtggtgggggtgacaagggccctgtggtggcggcccaggaggctcaggcccaggcgatcctgcagcaggcgaggctggcgctccgtggaccccctggccccatgggatacacagggcgccctggacccttgggccaacctgggagccctggcctgaaaggagagtctggagacttaggacctcagggccccagaggacctcagggcctcacaggccctcctggcaaggctgggcgaaggggccgggcaggtgctgatggagcccgagggatgcctggagatcctggagtgaagggtgaccgaggttttgatggactcccagggctccctggagagaagggccataggggtgatactggtgcccagggccttcctggtccccctggtgaggatggagagaggggagatgacggggagattgggcctcgagggctgcctggagagtcgggacctcgaggtctccttggccccaaaggcccacctggtattcctggaccccctggcgtccgaggcatggatggtccccagggccccaaagggagcttgggaccccagggagagccaggacctcctggacaacagggcacccctgggacccagggtcttcccgggccccagggtgccatcggccctcatggagagaagggtcctcaagggaagccagggctccccggcatgcctggctcagacggacccccgggtcacccagggaaggaaggtccccctggaaccaaaggaaaccagggtccctctggacctcagggacctctaggatacccaggacctcgaggggtcaagggtgtggacggaattcggggtctgaagggtcataagggtgagaagggtgaggatggctttcctgggttcaaaggtgacataggcgtgaaaggtgacaggggcgaagttggagtccctggttccaggggagaggatggtcctgaggggccaaagggacgcactggaccgactggagaccctgggcccccagggctcatgggcgagaagggcaagctgggtgttcctggtctgcctggctatcctggacgtcagggacccaaggggtccctaggatttcctggctttcctggtgccagtggagagaagggagcccggggcctgtcggggaagtcagggcctcggggagaacggggccccacgggtccacggggtcagcggggaccccgaggtgccactgggaagtctggagctaagggaacatctggtggtgatggcccccatgggccccctggagagaggggcctccctggacctcagggtcccaacgggtttcctggaccgaaaggacccccgggcccccctgggaaggatgggctgccgggacacccaggccaaagaggagaagtgggtttccaagggaagaccggcccccctggtcctccaggagtggtgggacctcagggagcagcaggagaaaccggccctatgggggagagaggtcacccaggccccccggggccccctggagagcagggactacctgggacagctggaaaagaaggaacaaagggtgaccctggtccccctggggccccagggaaggatggtcctgctggtctgaggggattcccaggagagagaggcctcccaggcactgctggtggacctggtttgaaggggaatgaaggtccgtctggcccccctggccctgcaggctcccctggggaacgaggtgcagcaggatcagggggacccattggtccgccagggcgcccaggcccgcagggtccccctggagcagcaggagagaaaggtgtcccaggtgagaagggccccattggcccgactggccgagatggagtgcagggtcctgtggggcttcctggtcctgctgggcctccaggtgtggctggagaggatggagacaagggtgaggtgggggaccccggacagaagggcaccaaagggaacaagggtgaacatggccctcctggaccccctggacccattggtcctgtggggcagcctggagcagcgggagcagatggggagcccggagctcggggaccccagggacactttggagccaaaggtgatgaaggaacaagaggattcaatgggcccccaggacccattggcctacagggtttgccaggcccctctggggagaagggagaaacaggagatgtgggtcctatgggaccacctggccccccaggacctcgaggtccagctggacccaatggcgctgatggcccacaaggtcccccaggaggtgttgggaacctgggtccccctggagagaagggggaaccaggagagtcaggatctccagggatccagggcgagccaggtgtcaagggtccacgcggggaacgtggagagaaaggagagtcggggcagccaggagagccagggccaccagggcctaaaggccccacaggcgatgatggccccaaagggaaccctggtcctgttggttttcctggtgaccctggcccccctggagaaggtggccctcggggccaggatggtgctaagggtgaccgaggcgaggatggtgagccaggacagcctggatcccctggtcccaccggggagaatggacccccagggccacttggaaagcgaggtcctgctggctcgcctggttccgaggggcgacaaggagggaagggagccaagggagatcctggcgctataggtgccccggggaagacaggcccggtgggtcctgcaggcccagcagggaaacctggccctgatggtctgagggggctcccaggctcagtgggtcagcaaggccgacctggagctacaggccaggctgggcccccaggtcctgtgggacccccagggctgcctggtctccggggcgatgctggagccaagggagagaagggccacccaggtctcattggactgattgggcccccgggtgagcagggagagaagggagatcggggacttcctgggcctcagggctcccctgggcagaagggtgagatgggtatcccaggagcatccggccccattggtcctggaggtccccccggcctccccggacctgctggccccaaaggagccaaaggagccacaggcccaggcggacccaagggagagaagggtgtgcagggccctccaggacacccgggtcccccaggcgaggtgatccagccactgcccattcagatgcccaagaagactcggcgctcggtggatggaagccgtctgatgcaggaagatgaggccataccgaccgggggagcccccggcagtcctggggggctggaggagatctttggctcactcgactccctgcgggaggagatcgagcagatgaggcggccaacagggacccaggacagccctgctcgcacctgccaggacctgaagctgtgccacccagagcttcccgatggagagtactgggtcgaccccaaccagggctgtgctcgggatgccttccgagttttctgcaacttcacagcagggggtgagacctgtgtgacgcctagggatgacgtcacgcagttctcttacgtggactcagagggctccccagtgggtgtggtccagctcaccttcctgcggctgctcagcgtctcagcccaccaggacgtctcctacccctgctctggagcagcccgtgacggtcccctgagactccgtggggccaatgaggatgagctgagcccggagactagcccctatgtcaaagaattcagagatggctgccagacacagcaaggccggacggtgctggaggtgcgaacgcctgtgctggagcagctgccagtgctggatgcctccttctcagacctgggagccccaccgaggcggggaggggtgctgctggggcctgtctgcttcatgggataggaccgtctctgtctgatcctgtccattcggaaccaggcccacctggaatcccacaacatcagctctgtgccacctcccaagagggctcctcactatctagggagccctgggccagggcgtggagagccctcagtcggggcaggccaggggaggggtgaagtggttgcctggacaccccacgggaggagtggcatctggggctcttggccctcccacctggagcctgttacccgttagagagctgagacccttatttaaaactcacctcccaatcaccccaaacaaatggaagagaagagaaaggacatggcgtattttgtatttaaaagtaattgtattaattatttaaagtgtggaaagcaaaataacaaaaaagagaaacgccaacaaaaatcagcagatgttgaagacaggggtctcgggggtgggctccggcacccacatcctggagtcaggactttcctcagtgactgtgtgtaggggggtttcagggctgaaccccacctccctcccaccttcctcccacctcacctgtcgcacccactgtgaaagttggaatatgtggtctccctggcctcagggctctgactctgccagggtggggctctctaacccacaggtgttggctgcctggcccatgtgcccactgtctcttccacttggtctgggtttggcaggcactgcctgctacttgagggccaggatgctcccccagggaagaaacggaatagtgtggggtgtgtgcagggctgcatcccgcagatggctggaatattaaaattcttctatattggctggtaaattgccatggccctgagccactgagtatgttcattgccacccctgtccctcccctgggcacccctcactttccctgatcctgcaattaaagggttaatgtgtggcatatggaagggactcccaggaccctgtgcccagcttccatgctgactgatggttaaataatgtgattgtctcctcccagg

SEQ ID NO: 232545 - DNA, 2099 bp, Artificial Sequence
  derived and/or modified sequence
acacagaagcggcagccaccgaggagggagcagtgccgggagccccgacggcgccttgctgcatggagctgggccgctgacagctgtcgctgcccgcagcctctgacctccctgggaccccggcgtctgaggctcatagtctgctccctgtcttctgtcagcctcagggcatccagcgtctcaggccgacctgggtccctgggacccggcgtttcggcttctcagccatggagcggtgcagccgctgccatcgcctcctcctcctcctacctctggtgctggggctgagcgcggccccaggctgggcaggtgcaccccctgtggatgtgctccgggccctgaggttcccctccctccctgatggtgtccggagagcgaaaggcatctgtccagctgatgtggcctaccgagtggcacgacctgcccagctcagtgcacccactcgccagcttttcccaggaggatttcccaaagatttctctctgctgactgttgtccggacccgccctggtctccaagctcccctcctgactctctacagtgcccagggtgtccgacagctgggcctggagctgggccgacctgtccgcttcctgtatgaagaccagactgggcggcctcaacctccctctcagccagtcttccgaggcctcagcctagcagatggcaagtggcaccgtgtggctgtggctgtgaagggccagtctgtcaccctcattgttgactgcaagaagcgagtcacccggcctctcccccgaagtgctcgtccagtattggacacccatggagtgatcatctttggtgcccgtattctggatgaagaagtctttgagggtgatgtccaggagctggccattgtcccaggggtccaggcagcctatgaatcatgtgaacagaaggagctggaatgcgaggggggccagagggaaagaccccaaaaccaacagcctcacagagcccagagatctccacagcagcaaccatcaagacttcacaggccacaaaatcaggaaccccagagccagcccactgagtctctctactatgactacaagcccccctattatgatgtgatgactacggggacaacccctgattatcaggaccccaccccaggtgaagaggaagaaatcctggagtcgagcctcttgccaccccttgaggaggagcagacagatctccaggtcccccccacagccgacaggttccaggcagaggaatatggggagggtggcacagacccccctgaagggccctacgattacacctatggctatggggatgattatcgtgaggagacagagcttggccctgccctctctgcggagacagcccactcaggagccgctgcccatggaccccgagggctgaagggagagaaaggagagcctgcagtgttggaacctggtatgctcgtggaggggccccctggcccagaaggccctgcgggattgattggtccccctggcatccaggggaacccaggcccagttggagaccctggagagaggggcccccctggccgagcagggctccctggatcagatggggctcctggtcctcctggcacatctctcatgctcccattccggtttggcagtggtgggggtgacaagggccctgtggtggcggcccaggaggctcaggcccaggcgatcctgcagcaggcgaggctggcgctccgtggaccccctggccccatgggatacacagggcgccctggacccttgggccaacctgggagccctggcctgaaaggagagtctggagacttaggacctcagggccccagaggacctcagggcctcacaggccctcctggcaaggctgggcgaaggggccgggcaggtgctgatggagcccgagggatgcctggagatcctggagtgaagggtgaccgaggttttgatggactcccagggctccctggagagaagggccataggggtgatactggtgcccagggccttcctggtccccctggtgaggatggagagaggggagatgacggggagattgggcctcgagggctgcctggagagtcgggacctcgaggtctccttggccccaaaggcccacctggtattcctggaccccct

SEQ ID NO: 232546 - DNA, 2099 bp, Artificial Sequence
  derived and/or modified sequence
acacagaagcggcagccaccgaggagggagcagtgccgggagccccgacggcgccttgctgcatggagctgggccgctgacagctgtcgctgcccgcagcctctgacctccctgggaccccggcgtctgaggctcatagtctgctccctgtcttctgtcagcctcagggcatccagcgtctcaggccgacctgggtccctgggacccggcgtttcggcttctcagccatggagcggtgcagccgctgccatcgcctcctcctcctcctacctctggtgctggggctgagcgcggccccaggctgggcaggtgcaccccctgtggatgtgctccgggccctgaggttcccctccctccctgatggtgtccggagagcgaaaggcatctgtccagctgatgtggcctaccgagtggcacgacctgcccagctcagtgcacccactcgccagcttttcccaggaggatttcccaaagatttctctctgctgactgttgtccggacccgccctggtctccaagctcccctcctgactctctacagtgcccagggtgtccgacagctgggcctggagctgggccgacctgtccgcttcctgtatgaagaccagactgggcggcctcaacctccctctcagccagtcttccgaggcctcagcctagcagatggcaagtggcaccgtgtggctgtggctgtgaagggccagtctgtcaccctcattgttgactgcaagaagcgagtcacccggcctctcccccgaagtgctcgtccagtattggacacccatggagtgatcatctttggtgcccgtattctggatgaagaagtctttgagggtgatgtccaggagctggccattgtcccaggggtccaggcagcctatgaatcatgtgaacagaaggagctggaatgcgaggggggccagagggaaagaccccaaaaccaacagcctcacagagcccagagatctccacagcagcaaccatcaagacttcacaggccacaaaatcaggaaccccagagccagcccactgagtctctctactatgactacgagcccccctattatgatgtgatgactacggggacaacccctgattatcaggaccccaccccaggtgaagaggaagaaatcctggagtcgagcctcttgccaccccttgaggaggagcagacagatctccaggtcccccccacagccgacaggttccaggcagaggaatatggggagggtggcacagacccccctgaagggccctacgattacacctatggctatggggatgattatcgtgaggagacagagcttggccctgccctctctgcggagacagcccactcaggagccgctgcccatggaccccgagggctgaagggagagaaaggagagcctgcagtgttggaacctggtatgctcgtggaggggccccctggcccagaaggccctgcgggattgattggtccccctggcatccaggggaacccaggcccagttggagaccctggagagaggggcccccctggccgagcagggctccctggatcagatggggctcctggtcctcctggcacatctctcatgctcccattccggtttggcagtggtgggggtgacaagggccctgtggtggcggcccaggaggctcaggcccaggcgatcctgcagcaggcgaggctggcgctccgtggaccccctggccccatgggatacacagggcgccctggacccttgggccaacctgggagccctggcctgaaaggagagtctggagacttaggacctcagggccccagaggacctcagggcctcacaggccctcctggcaaggctgggcgaaggggccgggcaggtgctgatggagcccgagggatgcctggagatcctggagtgaagggtgaccgaggttttgatggactcccagggctccctggagagaagggccataggggtgatactggtgcccagggccttcctggtccccctggtgaggatggagagaggggagatgacggggagattgggcctcgagggctgcctggagagtcgggacctcgaggtctccttggccccaaaggcccacctggtattcctggaccccct

SEQ ID NO: 232547 - DNA, 1790 bp, Artificial Sequence
  derived and/or modified sequence
gtgcaccccctgtggatgtgctccgggccctgaggttcccctccctccctgatggtgtccggagagcgaaaggcatctgtccagctgatgtggcctaccgagtggcacgacctgcccagctcagtgcacccactcgccagcttttcccaggaggatttcccaaagatttctctctgctgactgttgtccggacccgccctggtctccaagctcccctcctgactctctacagtgcccagggtgtccgacagctgggcctggagctgggccgacctgtccgcttcctgtatgaagaccagactgggcggcctcaacctccctctcagccagtcttccgaggcctcagcctagcagatggcaagtggcaccgtgtggctgtggctgtgaagggccagtctgtcaccctcattgttgactgcaagaagcgagtcacccggcctctcccccgaagtgctcgtccagtattggacacccatggagtgatcatctttggtgcccgtattctggatgaagaagtctttgagggtgatgtccaggagctggccattgtcccaggggtccaggcagcctatgaatcatgtgaacagaaggagctggaatgcgaggggggccagagggaaagaccccaaaaccaacagcctcacagagcccagagatctccacagcagcaaccatcaagacttcacaggccacaaaatcaggaaccccagagccagcccactgagtctctctactatgactacaagcccccctattatgatgtgatgactacggggacaacccctgattatcaggaccccaccccaggtgaagaggaagaaatcctggagtcgagcctcttgccaccccttgaggaggagcagacagatctccaggtcccccccacagccgacaggttccaggcagaggaatatggggagggtggcacagacccccctgaagggccctacgattacacctatggctatggggatgattatcgtgaggagacagagcttggccctgccctctctgcggagacagcccactcaggagccgctgcccatggaccccgagggctgaagggagagaaaggagagcctgcagtgttggaacctggtatgctcgtggaggggccccctggcccagaaggccctgcgggattgattggtccccctggcatccaggggaacccaggcccagttggagaccctggagagaggggcccccctggccgagcagggctccctggatcagatggggctcctggtcctcctggcacatctctcatgctcccattccggtttggcagtggtgggggtgacaagggccctgtggtggcggcccaggaggctcaggcccaggcgatcctgcagcaggcgaggctggcgctccgtggaccccctggccccatgggatacacagggcgccctggacccttgggccaacctgggagccctggcctgaaaggagagtctggagacttaggacctcagggccccagaggacctcagggcctcacaggccctcctggcaaggctgggcgaaggggccgggcaggtgctgatggagcccgagggatgcctggagatcctggagtgaagggtgaccgaggttttgatggactcccagggctccctggagagaagggccataggggtgatactggtgcccagggccttcctggtccccctggtgaggatggagagaggggagatgacggggagattgggcctcgagggctgcctggagagtcgggacctcgaggtctccttggccccaaaggcccacctggtattcctggaccccct

SEQ ID NO: 232548 - DNA, 2099 bp, Artificial Sequence
  derived and/or modified sequence
acacagaagcggcagccaccgaggagggagcagtgccgggagccccgacggcgccttgctgcatggagctgggccgctgacagctgtcgctgcccgcagcctctgacctccctgggaccccggcgtctgaggctcatagtctgctccctgtcttctgtcagcctcagggcatccagcgtctcaggccgacctgggtccctgggacccggcgtttcggcttctcagccatggagcggtgcagccgctgccatcgcctcctcctcctcctacctctggtgctggggctgagcgcggccccaggctgggcaggtgcaccccctgtggatgtgctccgggccctgaggttcccctccctccctgatggtgtccggagagcgaaaggcatctgtccagctgatgtggcctaccgagtggcacgacctgcccagctcagtgcacccactcgccagcttttcccaggaggatttcccaaagatttctctctgctgactgttgtccggacccgccctggtctccaagctcccctcctgactctctacagtgcccagggtgtccgacagctgggcctggagctgggcccacctgtccgcttcctgtatgaagaccagactgggcggcctcaacctccctctcagccagtcttccgaggcctcagcctagcagatggcaagtggcaccgtgtggctgtggctgtgaagggccagtctgtcaccctcattgttgactgcaagaagcgagtcacccggcctctcccccgaagtgctcgtccagtattggacacccatggagtgatcatctttggtgcccgtattctggatgaagaagtctttgagggtgatgtccaggagctggccattgtcccaggggtccaggcagcctatgaatcatgtgaacagaaggagctggaatgcgaggggggccagagggaaagaccccaaaaccaacagcctcacagagcccagagatctccacagcagcaaccatcaagacttcacaggccacaaaatcaggaaccccagagccagcccactgagtctctctactatgactacaagcccccctattatgatgtgatgactacggggacaacccctgattatcaggaccccaccccaggtgaagaggaagaaatcctggagtcgagcctcttgccaccccttgaggaggagcagacagatctccaggtcccccccacagccgacaggttccaggcagaggaatatggggagggtggcacagacccccctgaagggccctacgattacacctatggctatggggatgattatcgtgaggagacagagcttggccctgccctctctgcggagacagcccactcaggagccgctgcccatggaccccgagggctgaagggagagaaaggagagcctgcagtgttggaacctggtatgctcgtggaggggccccctggcccagaaggccctgcgggattgattggtccccctggcatccaggggaacccaggcccagttggagaccctggagagaggggcccccctggccgagcagggctccctggatcagatggggctcctggtcctcctggcacatctctcatgctcccattccggtttggcagtggtgggggtgacaagggccctgtggtggcggcccaggaggctcaggcccaggcgatcctgcagcaggcgaggctggcgctccgtggaccccctggccccatgggatacacagggcgccctggacccttgggccaacctgggagccctggcctgaaaggagagtctggagacttaggacctcagggccccagaggacctcagggcctcacaggccctcctggcaaggctgggcgaaggggccgggcaggtgctgatggagcccgagggatgcctggagatcctggagtgaagggtgaccgaggttttgatggactcccagggctccctggagagaagggccataggggtgatactggtgcccagggccttcctggtccccctggtgaggatggagagaggggagatgacggggagattgggcctcgagggctgcctggagagtcgggacctcgaggtctccttggccccaaaggcccacctggtattcctggaccccct

SEQ ID NO: 232549 - DNA, 6284 bp, Artificial Sequence
  derived and/or modified sequence
cacacagaagcggcagccaccgaggagggagcagtgccgggagccccgacggcgccttgctgcatggagctgggccgctgacagctgtcgctgcccgcagcctctgacctccctgggaccccggcgtctgaggctcatagtctgctccctgtcttctgtcagcctcagggcatccagcgtctcaggccgacctgggtccctgggacccggcgtttcggcttctcagccatggagcggtgcagccgctgccatcgcctcctcctcctcctacctctggtgctggggctgagcgcggccccaggctgggcaggtgcaccccctgtggatgtgctccgggccctgaggttcccctccctccctgatggtgtccggagagcgaaaggcatctgtccagctgatgtggcctaccgagtggcacgacctgcccagctcagtgcacccactcgccagcttttcccaggaggatttcccaaagatttctctctgctgactgttgtccggacccgccctggtctccaagctcccctcctgactctctacagtgcccagggtgtccgacagctgggcctggagctgggcccacctgtccgcttcctgtatgaagaccagactgggcggcctcaacctccctctcagccagtcttccgaggcctcagcctagcagatggcaagtggcaccgtgtggctgtggctgtgaagggccagtctgtcaccctcattgttgactgcaagaagcgagtcacccggcctctcccccgaagtgctcgtccagtattggacacccatggagtgatcatctttggtgcccgtattctggatgaagaagtctttgagggtgatgtccaggagctggccattgtcccaggggtccaggcagcctatgaatcatgtgaacagaaggagctggaatgcgaggggggccagagggaaagaccccaaaaccaacagcctcacagagcccagagatctccacagcagcaaccatcaagacttcacaggccacaaaatcaggaaccccagagccaggagcagacagatctccaggtcccccccacagccgacaggttccaggcagaggaatatggggagggtggcacagacccccctgaagggccctacgattacacctatggctatggggatgattatcgtgaggagacagagcttggccctgccctctctgcggagacagcccactcaggagccgctgcccatggaccccgagggctgaagggagagaaaggagagcctgcagtgttggaacctggtatgctcgtggaggggccccctggcccagaaggccctgcgggattgattggtccccctggcatccaggggaacccaggcccagttggagaccctggagagaggggcccccctggccgagcagggctccctggatcagatggggctcctggtcctcctggcacatctctcatgctcccattccggtttggcagtggtgggggtgacaagggccctgtggtggcggcccaggaggctcaggcccaggcgatcctgcagcaggcgaggctggcgctccgtggaccccctggccccatgggatacacagggcgccctggacccttgggccaacctgggagccctggcctgaaaggagagtctggagacttaggacctcagggccccagaggacctcagggcctcacaggccctcctggcaaggctgggcgaaggggccgggcaggtgctgatggagcccgagggatgcctggagatcctggagtgaagggtgaccgaggttttgatggactcccagggctccctggagagaagggccataggggtgatactggtgcccagggccttcctggtccccctggtgaggatggagagaggggagatgacggggagattgggcctcgagggctgcctggagagtcgggacctcgaggtctccttggccccaaaggcccacctggtattcctggaccccctggcgtccgaggcatggatggtccccagggccccaaagggagcttgggaccccagggagagccaggacctcctggacaacagggcacccctgggacccagggtcttcccgggccccagggtgccatcggccctcatggagagaagggtcctcaagggaagccagggctccccggcatgcctggctcagacggacccccgggtcacccagggaaggaaggtccccctggaaccaaaggaaaccagggtccctctggacctcagggacctctaggatacccaggacctcgaggggtcaagggtgtggacggaattcggggtctgaagggtcataagggtgagaagggtgaggatggctttcctgggttcaaaggtgacataggcgtgaaaggtgacaggggcgaagttggagtccctggttccaggggagaggatggtcctgaggggccaaagggacgcactggaccgactggagaccctgggcccccagggctcatgggcgagaagggcaagctgggtgttcctggtctgcctggctatcctggacgtcagggacccaaggggtccctaggatttcctggctttcctggtgccagtggagagaagggagcccggggcctgtcggggaagtcagggcctcggggagaacggggccccacgggtccacggggtcagcggggaccccgaggtgccactgggaagtctggagctaagggaacatctggtggtgatggcccccatgggccccctggagagaggggcctccctggacctcagggtcccaacgggtttcctggaccgaaaggacccccgggcccccctgggaaggacgggctgccgggacacccaggccaaagaggagaagtgggtttccaagggaagaccggcccccctggtcctccaggagtggtgggacctcagggagcagcaggagaaaccggccctatgggggagagaggtcacccaggccccccggggccccctggagagcagggactacctgggacagctggaaaagaaggaacaaagggtgaccctggtccccctggggccccagggaaggatggtcctgctggtctgaggggattcccaggagagagaggcctcccaggcactgctggtggacctggtttgaaggggaatgaaggtccgtctggcccccctggccctgcaggctcccctggggaacgaggtgcagcaggatcagggggacccattggtccgccagggcgcccaggcccgcagggtccccctggagcagcaggagagaaaggtgtcccaggtgagaagggccccattggcccaactggccgagatggagtgcagggtcctgtggggcttcctggtcctgctgggcctccaggtgtggctggagaggatggagacaagggtgaggtgggggaccccggacagaagggcaccaaagggaacaagggtgaacatggccctcctggaccccctggacccattggtcctgtggggcagcctggagcagcgggagcagatggggagcctggagctcggggaccccagggacactttggagccaaaggtgatgaaggaacaagaggattcaatgggcccccaggacccattggcctacagggtttgccaggcccctctggggagaagggagaaacaggagatgtgggtcctatgggaccacctggccccccaggacctcgaggtccagctggacccaatggcgctgatggcccacaaggtcccccaggaggtgttgggaacctgggtccccctggagagaagggggaaccaggagagtcaggatctccagggatccagggcgagccaggtgtcaagggtccacgcggggaacgtggagagaaaggagagtcggggcagccaggagagccagggccaccagggcctaaaggccccacaggcgatgatggccccaaagggaaccctggtcctgttggttttcctggtgaccctggcccccctggagaaggtggccctcggggccaggatggtgctaagggtgaccgaggcgaggatggtgagccaggacagcctggatcccctggtcccaccggggagaatggacccccagggccacttggaaagcgaggtcctgctggctcgcctggttccgaggggcgacaaggagggaagggagccaagggagatcctggcgctataggtgccccggggaagacaggcccggtgggtcctgcaggcccagcagggaaacctggccctgatggtctgagggggctcccaggctcagtgggtcagcaaggccgacctggagctacaggccaggctgggcccccaggtcctgtgggacccccagggctgcctggtctccggggcgatgctggagccaagggagagaagggccacccaggtctcattggactgattgggcccccgggtgagcagggagagaagggagatcggggacttcctgggcctcagggctcccctgggcagaagggtgagatgggtatcccaggagcatccggccccattggtcctggaggtccccccggcctccccggacctgctggccccaaaggagccaaaggagccacaggcccaggcggacccaagggagagaagggtgtgcagggccctccaggacacccgggtcccccaggcgaggtgatccagccactgcccattcagatgcccaagaagactcggcgctcggtggatggaagccgtctgatgcaggaagatgaggccataccgaccgggggagcccccggcagtcctggggggctggaggagatctttggctcactcgactccctgcgggaggagatcgagcagatgaggcggccaacagggacccaggacagccctgctcgcacctgccaggacctgaagctgtgccacccagagcttcccgatggagagtactgggtcgaccccaaccagggctgtgctcgggatgccttccgagttttctgcaacttcacagcagggggtgagacctgtgtgacgcctagggatgacgtcacgcagttctcttacgtggactcagagggctccccagtgggtgtggtccagctcaccttcctgcggctgctcagcgtctcagcccaccaggacgtctcctacccctgctctggagcagcccgtgacggtcccctgagactccgtggggccaatgaggatgagctgagcccggagactagcccctatgtcaaagaattcagagatggctgccagacacagcaaggccggacggtgctggaggtgcgaacgcctgtgctggagcagctgccagtgctggatgcctccttctcagacctgggagccccaccgaggcggggaggggtgctgctggggcctgtctgcttcatgggataggaccgtctctgtctgatcctgtccattcggaaccaggcccacctggaatcccacaacatcagctctgtgccacctcccaagagggctcctcactatctagggagccctgggccagggcgtggagagccctcagtcggggcaggccaggggaggggtgaagtggttgcctggacaccccacgggaggagtggcatctggggctcttggccctcccacctggagcctgttacccgttagagagctgagacccttatttaaaactcacctcccaatcaccccaaacaaatggaagagaagagaaaggacatggcgtattttgtatttaaaagtaattgtattaattatttaaagtgtggaaagcaaaataacaaaaaagagaaacgccaacaaaaatcagcagatgttgaagacaggggtctcgggggtgggctccggcacccacatcctggagtcaggactttcctcagtgactgtgtgtaggggggtttcagggctgaaccccacctccctcccaccttcctcccacctcacctgtcgcacccactgtgaaagttggaatatgtggtctccctggcctcagggctctgactctgccagggtggggctctctaacccacaggtgttggctgcctggcccatgtgcccactgtctcttccacttggtctgggtttggcaggcactgcctgctacttgagggccaggatgctcccccagggaagaaacggaatagtgtggggtgtgtgcagggctgcatcccgcagatggctggaatattaaaattcttctatattggctggtaaattgccatggccctgagccactgagtatgttcattgccacccctgtccctcccctgggcacccctcactttccctgatcctgcaattaaagggttaatgtgtggcatatggaagggactcccaggaccctgtgcccagcttccatgctgactgatggttaaataatgtgattgtctcctcccagg

SEQ ID NO: 232550 - DNA, 6347 bp, Artificial Sequence
  derived and/or modified sequence
cacacagaagcggcagccaccgaggagggagcagtgccgggagccccgacggcgccttgctgcatggagctgggccgctgacagctgtcgctgcccgcagcctctgacctccctgggaccccggcgtctgaggctcatagtctgctccctgtcttctgtcagcctcagggcatccagcgtctcaggccgacctgggtccctgggacccggcgtttcggcttctcagccatggagcggtgcagccgctgccatcgcctcctcctcctcctacctctggtgctggggctgagcgcggccccaggctgggcaggtgcaccccctgtggatgtgctccgggccctgaggttcccctccctccctgatggtgtccggagagcgaaaggcatctgtccagctgatgtggcctaccgagtggcacgacctgcccagctcagtgcacccactcgccagcttttcccaggaggatttcccaaagatttctctctgctgactgttgtccggacccgccctggtctccaagctcccctcctgactctctacagtgcccagggtgtccgacagctgggcctggagctgggcccacctgtccgcttcctgtatgaagaccagactgggcggcctcaacctccctctcagccagtcttccgaggcctcagcctagcagatggcaagtggcaccgtgtggctgtggctgtgaagggccagtctgtcaccctcattgttgactgcaagaagcgagtcacccggcctctcccccgaagtgctcgtccagtattggacacccatggagtgatcatctttggtgcccgtattctggatgaagaagtctttgagggtgatgtccaggagctggccattgtcccaggggtccaggcagcctatgaatcatgtgaacagaaggagctggaatgcgaggggggccagagggaaagaccccaaaaccaacagcctcacagagcccagagatctccacagcagcaaccatcaagacttcacaggccacaaaatcaggaaccccagagccaggaccccaccccaggtgaagaggaagaaatcctggagtcgagcctcttgccaccccttgaggaggagcagacagatctccaggtcccccccacagccgacaggttccaggcagaggaatatggggagggtggcacagacccccctgaagggccctacgattacacctatggctatggggatgattatcgtgaggagacagagcttggccctgccctctctgcggagacagcccactcaggagccgctgcccatggaccccgagggctgaagggagagaaaggagagcctgcagtgttggaacctggtatgctcgtggaggggccccctggcccagaaggccctgcgggattgattggtccccctggcatccaggggaacccaggcccagttggagaccctggagagaggggcccccctggccgagcagggctccctggatcagatggggctcctggtcctcctggcacatctctcatgctcccattccggtttggcagtggtgggggtgacaagggccctgtggtggcggcccaggaggctcaggcccaggcgatcctgcagcaggcgaggctggcgctccgtggaccccctggccccatgggatacacagggcgccctggacccttgggccaacctgggagccctggcctgaaaggagagtctggagacttaggacctcagggccccagaggacctcagggcctcacaggccctcctggcaaggctgggcgaaggggccgggcaggtgctgatggagcccgagggatgcctggagatcctggagtgaagggtgaccgaggttttgatggactcccagggctccctggagagaagggccataggggtgatactggtgcccagggccttcctggtccccctggtgaggatggagagaggggagatgacggggagattgggcctcgagggctgcctggagagtcgggacctcgaggtctccttggccccaaaggcccacctggtattcctggaccccctggcgtccgaggcatggatggtccccagggccccaaagggagcttgggaccccagggagagccaggacctcctggacaacagggcacccctgggacccagggtcttcccgggccccagggtgccatcggccctcatggagagaagggtcctcaagggaagccagggctccccggcatgcctggctcagacggacccccgggtcacccagggaaggaaggtccccctggaaccaaaggaaaccagggtccctctggacctcagggacctctaggatacccaggacctcgaggggtcaagggtgtggacggaattcggggtctgaagggtcataagggtgagaagggtgaggatggctttcctgggttcaaaggtgacataggcgtgaaaggtgacaggggcgaagttggagtccctggttccaggggagaggatggtcctgaggggccaaagggacgcactggaccgactggagaccctgggcccccagggctcatgggcgagaagggcaagctgggtgttcctggtctgcctggctatcctggacgtcagggacccaaggggtccctaggatttcctggctttcctggtgccagtggagagaagggagcccggggcctgtcggggaagtcagggcctcggggagaacggggccccacgggtccacggggtcagcggggaccccgaggtgccactgggaagtctggagctaagggaacatctggtggtgatggcccccatgggccccctggagagaggggcctccctggacctcagggtcccaacgggtttcctggaccgaaaggacccccgggcccccctgggaaggacgggctgccgggacacccaggccaaagaggagaagtgggtttccaagggaagaccggcccccctggtcctccaggagtggtgggacctcagggagcagcaggagaaaccggccctatgggggagagaggtcacccaggccccccggggccccctggagagcagggactacctgggacagctggaaaagaaggaacaaagggtgaccctggtccccctggggccccagggaaggatggtcctgctggtctgaggggattcccaggagagagaggcctcccaggcactgctggtggacctggtttgaaggggaatgaaggtccgtctggcccccctggccctgcaggctcccctggggaacgaggtgcagcaggatcagggggacccattggtccgccagggcgcccaggcccgcagggtccccctggagcagcaggagagaaaggtgtcccaggtgagaagggccccattggcccaactggccgagatggagtgcagggtcctgtggggcttcctggtcctgctgggcctccaggtgtggctggagaggatggagacaagggtgaggtgggggaccccggacagaagggcaccaaagggaacaagggtgaacatggccctcctggaccccctggacccattggtcctgtggggcagcctggagcagcgggagcagatggggagcctggagctcggggaccccagggacactttggagccaaaggtgatgaaggaacaagaggattcaatgggcccccaggacccattggcctacagggtttgccaggcccctctggggagaagggagaaacaggagatgtgggtcctatgggaccacctggccccccaggacctcgaggtccagctggacccaatggcgctgatggcccacaaggtcccccaggaggtgttgggaacctgggtccccctggagagaagggggaaccaggagagtcaggatctccagggatccagggcgagccaggtgtcaagggtccacgcggggaacgtggagagaaaggagagtcggggcagccaggagagccagggccaccagggcctaaaggccccacaggcgatgatggccccaaagggaaccctggtcctgttggttttcctggtgaccctggcccccctggagaaggtggccctcggggccaggatggtgctaagggtgaccgaggcgaggatggtgagccaggacagcctggatcccctggtcccaccggggagaatggacccccagggccacttggaaagcgaggtcctgctggctcgcctggttccgaggggcgacaaggagggaagggagccaagggagatcctggcgctataggtgccccggggaagacaggcccggtgggtcctgcaggcccagcagggaaacctggccctgatggtctgagggggctcccaggctcagtgggtcagcaaggccgacctggagctacaggccaggctgggcccccaggtcctgtgggacccccagggctgcctggtctccggggcgatgctggagccaagggagagaagggccacccaggtctcattggactgattgggcccccgggtgagcagggagagaagggagatcggggacttcctgggcctcagggctcccctgggcagaagggtgagatgggtatcccaggagcatccggccccattggtcctggaggtccccccggcctccccggacctgctggccccaaaggagccaaaggagccacaggcccaggcggacccaagggagagaagggtgtgcagggccctccaggacacccgggtcccccaggcgaggtgatccagccactgcccattcagatgcccaagaagactcggcgctcggtggatggaagccgtctgatgcaggaagatgaggccataccgaccgggggagcccccggcagtcctggggggctggaggagatctttggctcactcgactccctgcgggaggagatcgagcagatgaggcggccaacagggacccaggacagccctgctcgcacctgccaggacctgaagctgtgccacccagagcttcccgatggagagtactgggtcgaccccaaccagggctgtgctcgggatgccttccgagttttctgcaacttcacagcagggggtgagacctgtgtgacgcctagggatgacgtcacgcagttctcttacgtggactcagagggctccccagtgggtgtggtccagctcaccttcctgcggctgctcagcgtctcagcccaccaggacgtctcctacccctgctctggagcagcccgtgacggtcccctgagactccgtggggccaatgaggatgagctgagcccggagactagcccctatgtcaaagaattcagagatggctgccagacacagcaaggccggacggtgctggaggtgcgaacgcctgtgctggagcagctgccagtgctggatgcctccttctcagacctgggagccccaccgaggcggggaggggtgctgctggggcctgtctgcttcatgggataggaccgtctctgtctgatcctgtccattcggaaccaggcccacctggaatcccacaacatcagctctgtgccacctcccaagagggctcctcactatctagggagccctgggccagggcgtggagagccctcagtcggggcaggccaggggaggggtgaagtggttgcctggacaccccacgggaggagtggcatctggggctcttggccctcccacctggagcctgttacccgttagagagctgagacccttatttaaaactcacctcccaatcaccccaaacaaatggaagagaagagaaaggacatggcgtattttgtatttaaaagtaattgtattaattatttaaagtgtggaaagcaaaataacaaaaaagagaaacgccaacaaaaatcagcagatgttgaagacaggggtctcgggggtgggctccggcacccacatcctggagtcaggactttcctcagtgactgtgtgtaggggggtttcagggctgaaccccacctccctcccaccttcctcccacctcacctgtcgcacccactgtgaaagttggaatatgtggtctccctggcctcagggctctgactctgccagggtggggctctctaacccacaggtgttggctgcctggcccatgtgcccactgtctcttccacttggtctgggtttggcaggcactgcctgctacttgagggccaggatgctcccccagggaagaaacggaatagtgtggggtgtgtgcagggctgcatcccgcagatggctggaatattaaaattcttctatattggctggtaaattgccatggccctgagccactgagtatgttcattgccacccctgtccctcccctgggcacccctcactttccctgatcctgcaattaaagggttaatgtgtggcatatggaagggactcccaggaccctgtgcccagcttccatgctgactgatggttaaataatgtgattgtctcctcccagg

SEQ ID NO: 232551 - DNA, 6362 bp, Artificial Sequence
  derived and/or modified sequence
cacacagaagcggcagccaccgaggagggagcagtgccgggagccccgacggcgccttgctgcatggagctgggccgctgacagctgtcgctgcccgcagcctctgacctccctgggaccccggcgtctgaggctcatagtctgctccctgtcttctgtcagcctcagggcatccagcgtctcaggccgacctgggtccctgggacccggcgtttcggcttctcagccatggagcggtgcagccgctgccatcgcctcctcctcctcctacctctggtgctggggctgagcgcggccccaggctgggcaggtgcaccccctgtggatgtgctccgggccctgaggttcccctccctccctgatggtgtccggagagcgaaaggcatctgtccagctgatgtggcctaccgagtggcacgacctgcccagctcagtgcacccactcgccagcttttcccaggaggatttcccaaagatttctctctgctgactgttgtccggacccgccctggtctccaagctcccctcctgactctctacagtgcccagggtgtccgacagctgggcctggagctgggccgacctgtccgcttcctgtatgaagaccagactgggcggcctcaacctccctctcagccagtcttccgaggcctcagcctagcagatggcaagtggcaccgtgtggctgtggctgtgaagggccagtctgtcaccctcattgttgactgcaagaagcgagtcacccggcctctcccccgaagtgctcgtccagtattggacacccatggagtgatcatctttggtgcccgtattctggatgaagaagtctttgagggtgatgtccaggagctggccattgtcccaggggtccaggcagcctatgaatcatgtgaacagaaggagctggaatgcgaggggggccagagggaaagaccccaaaaccaacagcctcacagagcccagagatctccacagcagcaaccatcaagacttcacaggccacaaaatcaggaaccccagagccagcccactgagtctctctactatgactacgagcccccctattatgatgtgatgactacggggacaacccctgattatcaggagcagacagatctccaggtcccccccacagccgacaggttccaggcagaggaatatggggagggtggcacagacccccctgaagggccctacgattacacctatggctatggggatgattatcgtgaggagacagagcttggccctgccctctctgcggagacagcccactcaggagccgctgcccatggaccccgagggctgaagggagagaaaggagagcctgcagtgttggaacctggtatgctcgtggaggggccccctggcccagaaggccctgcgggattgattggtccccctggcatccaggggaacccaggcccagttggagaccctggagagaggggcccccctggccgagcagggctccctggatcagatggggctcctggtcctcctggcacatctctcatgctcccattccggtttggcagtggtgggggtgacaagggccctgtggtggcggcccaggaggctcaggcccaggcgatcctgcagcaggcgaggctggcgctccgtggaccccctggccccatgggatacacagggcgccctggacccttgggccaacctgggagccctggcctgaaaggagagtctggagacttaggacctcagggccccagaggacctcagggcctcacaggccctcctggcaaggctgggcgaaggggccgggcaggtgctgatggagcccgagggatgcctggagatcctggagtgaagggtgaccgaggttttgatggactcccagggctccctggagagaagggccataggggtgatactggtgcccagggccttcctggtccccctggtgaggatggagagaggggagatgacggggagattgggcctcgagggctgcctggagagtcgggacctcgaggtctccttggccccaaaggcccacctggtattcctggaccccctggcgtccgaggcatggatggtccccagggccccaaagggagcttgggaccccagggagagccaggacctcctggacaacagggcacccctgggacccagggtcttcccgggccccagggtgccatcggccctcatggagagaagggtcctcaagggaagccagggctccccggcatgcctggctcagacggacccccgggtcacccagggaaggaaggtccccctggaaccaaaggaaaccagggtccctctggacctcagggtcctctaggatacccaggacctcgaggggtcaagggtgtggacggaattcggggtctgaagggtcataagggtgagaagggtgaggatggctttcctgggttcaaaggtgacataggcgtgaaaggtgacaggggcgaagttggagtccctggttccaggggagaggatggtcctgaggggccaaagggacgcactggaccgactggagaccctgggcccccagggctcatgggcgagaagggcaagctgggtgttcctggtctgcctggctatcctggacgtcagggacccaaggggtccctaggatttcctggctttcctggtgccagtggagagaagggagcccggggcctgtcggggaagtcagggcctcggggagaacggggccccacgggtccacggggtcagcggggaccccgaggtgccactgggaagtctggagctaagggaacatctggtggtgatggcccccatgggccccctggagagaggggcctccctggacctcagggtcccaacgggtttcctggaccgaaaggacccctgggcccccctgggaaggacgggctgccgggacacccaggccaaagaggagaagtgggtttccaagggaagaccggcccccctggtcctccaggagtggtgggacctcagggagcagcaggagaaaccggccctatgggggagagaggtcacccaggccccccggggccccctggagagcagggactacctgggacagctggaaaagaaggaacaaagggtgaccctggtccccctggggccccagggaaggatggtcctgctggtctgaggggattcccaggagagagaggcctcccaggcactgctggtggacctggtttgaaggggaatgaaggtccgtctggcccccctggccctgcaggctcccctggggaacgaggtgcagcaggatcagggggacccattggtccgccagggcgcccaggcccgcagggtccccctggagcagcaggagagaaaggtgtcccaggtgagaagggccccattggcccaactggccgagatggagtgcagggtcctgtggggcttcctggtcctgctgggcctccaggtgtggctggagaggatggagacaagggtgaggtgggggaccccggacagaagggcaccaaagggaacaagggtgaacatggccctcctggaccccctggacccattggtcctgtggggcagcctggagcagcgggagcagatggggagcccggagctcggggaccccagggacactttggagccaaaggtgatgaaggaacaagaggattcaatgggcccccaggacccattggcctacagggtttgccaggcccctctggggagaagggagaaacaggagatgtgggtcctatgggaccacctggccccccaggacctcgaggtccagctggacccaatggcgctgatggcccacaaggtcccccaggaggtgttgggaacctgggtccccctggagagaagggggaaccaggagagtcaggatctccagggatccagggcgagccaggtgtcaagggtccacgcggggaacgtggagagaaaggagagtcggggcagccaggagagccagggccaccagggcctaaaggccccacaggcgatgatggccccaaagggaaccctggtcctgttggttttcctggtgaccctggcccccctggagaaggtggccctcggggccaggatggtgctaagggtgaccgaggcgaggatggtgagccaggacagcctggatcccctggtcccaccggggagaatggacccccagggccacttggaaagcgaggtcctgctggctcgcctggttccgaggggcgacaaggagggaagggagccaagggagatcctggcgctataggtgccccggggaagacaggcccggtgggtcctgcaggcccagcagggaaacctggccctgatggtctgagggggctcccaggctcagtgggtcagcaaggccgacctggagctacaggccaggctgggcccccaggtcctgtgggacccccagggctgcctggtctccggggcgatgctggagccaagggagagaagggccacccaggtctcattggactgattgggcccccgggtgagcagggagagaagggagatcggggacttcctgggcctcagggctcccctgggcagaagggtgagatgggtatcccaggagcatccggccccattggtcctggaggtccccccggcctccccggacctgctggccccaaaggagccaaaggagccacaggcccaggcggacccaagggagagaagggtgtgcagggccctccaggacacccgggtcccccaggcgaggtgatccagccactgcccattcagatgcccaagaagactcggcgctcggtggatggaagccgtctgatgcaggaagatgaggccataccgaccgggggagcccccggcagtcctggggggctggaggagatctttggctcactcgactccctgcgggaggagatcgagcagatgaggcggccaacagggacccaggacagccctgctcgcacctgccaggacctgaagctgtgccacccagagcttcccgatggagagtactgggtcgaccccaaccagggctgtgctcgggatgccttccgagttttctgcaacttcacagcagggggtgagacctgtgtgacgcctagggatgacgtcacgcagttctcttacgtggactcagagggctccccagtgggtgtggtccagctcaccttcctgcggctgctcagcgtctcagcccaccaggacgtctcctacccctgctctggagcagcccgtgacggtcccctgagactccgtggggccaatgaggatgagctgagcccggagactagcccctatgtcaaagaattcagagatggctgccagacacagcaaggccggacggtgctggaggtgcgaacgcctgtgctggagcagctgccagtgctggatgcctccttctcagacctgggagccccaccgaggcggggaggggtgctgctggggcctgtctgcttcatgggataggaccgtctctgtctgatcctgtccattcggaaccaggcccacctggaatcccacaacatcagctctgtgccacctcccaagagggctcctcactatctagggagccctgggccagggcgtggagagccctcagtcggggcaggccaggggaggggtgaagtggttgcctggacaccccacgggaggagtggcatctggggctcttggccctcccacctggagcctgttacccgttagagagctgagacccttatttaaaactcacctcccaatcaccccaaacaaatggaagagaagagaaaggacatggcgtattttgtatttaaaagtaattgtattaattatttaaagtgtggaaagcaaaataacaaaaaagagaaacgccaacaaaaatcagcagatgttgaagacaggggtctcgggggtgggctccggcacccacatcctggagtcaggactttcctcagtgactgtgtgtaggggggtttcagggctgaaccccacctccctcccaccttcctcccacctcacctgtcgcacccactgtgaaagttggaatatgtggtctccctggcctcagggctctgactctgccagggtggggctctctaacccacaggtgttggctgcctggcccatgtgcccactgtctcttccacttggtctgggtttggcaggcactgcctgctacttgagggccaggatgctcccccagggaagaaacggaatagtgtggggtgtgtgcagggctgcatcccgcagatggctggaatattaaaattcttctatattggctggtaaattgccatggccctgagccactgagtatgttcattgccacccctgtccctcccctgggcacccctcactttccctgatcctgcaattaaagggttaatgtgtggcatatggaagggactcccaggaccctgtgcccagcttccatgctgactgatggttaaataatgtgattgtctcctcccagg

SEQ ID NO: 232552 - DNA, 5211 bp, Artificial Sequence
  derived and/or modified sequence
atggagcggtgcagccggtgccaccggctgctgctgctgctgcccctggtgttaggcctatccgctgcaccaggttgggctggggccccgccggtggacgtgctaagggcgttgcgattcccctctctcccagacggagtgcgtagggcgaaaggcatctgtccggcagatgtggcataccgagtggcccggcccgcacagctcagtgctccaactcgacaactgttcccggggggtttccctaaggactttagcctattgacggtggtccgtacaagacccggtctgcaggctccacttctcacactgtattctgcacagggcgtcaggcagctagggttagagctgggacgccccgtgcgatttctctatgaggaccagaccggacggccacagccccccagtcagcccgtctttaggggactctctctagcagatggcaagtggcaccgggtggctgtcgccgtgaagggccagagtgtcacacttattgttgactgcaagaaaagagtgactagaccgctgccgcgatcagcccgcccagtgttggacacccacggcgtaataatattcggtgccaggattctggatgaagaggtctttgagggcgatgtccaggagctggcgatcgtacctggtgtgcaggccgcctacgagtcctgcgaacaaaaagaactggaatgtgaggggggccagcgggaacgtccccagaaccagcagcctcaccgtgcacagagatccccccagcagcagcctagtcggctccatagacctcagaatcaagaaccccagagccaaccaactgagagcttatactacgattatgagccaccatattacgatgtaatgaccacaggaacaacccccgactaccaagatcctaccccgggcgaggaggaagagattctcgagagcagtttgttaccaccactcgaagaagaacagacagacctccaggtgccaccaaccgctgacaggttccaggctgaagaatatggagagggaggaacagatccacccgaagggccctacgactacacttatggctatggagacgactacagggaagaaaccgaactgggacccgcactgtctgcagaaactgctcactcaggggccgcagctcatggtcctcgaggactgaagggcgaaaaaggggagcccgccgtgttggagcctggtatgctcgtggagggccctcccggccccgaaggtcctgccggtcttatcggcccccctggcatacagggtaatcctgggcccgtcggagatcccggagaacggggcccgcccggccgggccggactacccggtagcgacggggcccccggccctccagggacctcactgatgttaccctttagatttgggagcggtggcggcgacaagggccctgttgtggctgcccaggaggcccaggctcaagcaattttacagcaggcgcggttagctttacgaggccccccaggccccatggggtatacagggaggccgggaccactgggtcagccagggtcccctggattaaagggcgaaagcggcgatctcggaccccagggccctagagggccccagggtctgaccggtccccctgggaaggcaggccggaggggtagagccggcgcagatggagctcgcggaatgcctggcgatccgggtgtcaagggggaccgtggcttcgacggactgccaggcctgcccggagaaaaaggccaccgtggggacacaggggctcagggcttgccaggtccacccggcgaagacggagaacggggcgatgacggcgagatcggaccacgggggctaccaggagaaagcggtccaaggggactgttggggccaaaagggcctccgggtatacctgggccgccaggtgtccggggaatggatggccctcaggggcccaaaggctctctgggtccgcaaggtgaaccaggaccgcctggccagcagggcaccccgggtacacagggacttcctggcccccagggagccattgggccccacggggagaagggaccccagggcaagccagggctgccaggaatgcctggaagtgatgggcccccggggcatcccggaaaggaaggccccccaggtacaaaaggcaaccagggcccatccggaccgcagggccccctggggtatccaggtcctcgcggagtaaagggagttgacggaatcaggggcctcaagggccataaaggcgaaaaaggagaagacggattcccaggtttcaaaggagatattggcgtgaaaggagatcgcggggaggtcggtgtccctggtagcaggggcgaagacggacccgaaggcccaaaggggcggactggtcctactggtgatcccgggcctccaggactgatgggagaaaaaggtaaactcggagttcctgggttgccaggatacccagggcgacagggacccaagggctctctcgggtttcccggtttccccggagccagcggggagaagggtgctagggggctaagtggcaaaagcggccctagaggagagcggggtcctaccggtccacgggggcagcgagggccacgcggcgctactggaaagagcggagcaaagggcacgagtgggggcgacggcccccacggccctcccggggagagggggcttcctgggcctcagggaccaaacggttttcctggcccgaaagggcctccaggaccgccaggaaaggacggtctgccagggcaccctggtcaacgcggagaggtgggctttcaggggaagaccggacctcccggtccccccggagtggtggggccacaaggggcagctggcgaaacgggccccatgggcgaaaggggacaccctggcccgccaggaccgcccggtgaacaggggctgcccggcaccgcagggaaagaagggacaaaaggtgatccaggtccaccaggagcacctggtaaagacggccctgctggactgaggggttttccaggcgaacgcggccttccaggcacagccgggggcccaggcctgaaaggcaacgagggtccctccggacccccggggcccgctggaagccccggggaaagaggagctgccggatccgggggacctatagggccccctgggagacccgggccgcaggggccacctggcgccgccggcgaaaaaggcgttcccggagaaaagggacccatcgggcctaccggcagagacggggtgcaggggccagtaggattacccggacctgccggtccgcccggcgtggcgggagaagacggagacaagggcgaagttggggacccgggtcaaaagggaaccaaaggaaataagggagaacatggcccgcccggtccaccagggcctataggtcccgtcggacagccaggagccgccggcgctgacggcgagccaggcgcgcggggacctcagggccactttggggccaagggagacgaaggcactcggggctttaatggcccacccggcccaatcggcctgcagggtctccctgggccatcgggggagaagggggaaaccggagatgttggaccaatggggccaccagggccccccggaccccggggtccagccgggcctaatggagcagacggaccacaaggcccccccggcggagtggggaatctcgggccaccaggagagaagggcgagcccggagagtctgggagtccaggcattcagggtgagcccggggtaaaaggtccacggggagaacgcggtgagaaaggggagtcaggacagccaggggagccgggacctcctgggccaaaaggacctaccggcgatgacggtccaaaaggcaatcccggccccgtagggtttcccggggatccaggtcccccaggagagggtggccctaggggccaggacggagcgaaaggtgaccgaggcgaggacggagaacctggccaaccaggatcaccgggtccaacgggggagaacggtccaccaggtcccttagggaaaaggggaccagcgggaagccctggatccgagggacgccaggggggcaagggggccaagggagacccaggcgccattggggcccccggaaaaacaggacccgtcggacccgcaggtcctgctgggaagccaggccccgacgggctcagagggctgccaggctctgtagggcagcaaggcagacccggggcgactgggcaggcaggtccacctggtcccgttggccccccagggctaccagggttgcggggggacgccggcgcgaagggagaaaaggggcaccctgggctgatagggctgatcgggccccctggagagcaaggcgaaaaaggtgatagaggcctccctgggccccagggctcccccggtcaaaaaggggagatgggaatccctggtgcatcgggtcccatcggccccggcggcccacccgggctgcccggtccagctggacctaagggagccaagggcgctacagggccggggggccccaagggagaaaagggggtacaaggacctcctggccaccccggtcctcctggcgaagtcatacagcccctgccaatccaaatgcctaagaaaactcgaagaagtgtggacggcagccgcctgatgcaggaagacgaagccattcccacaggtggcgctccgggaagtccgggcggccttgaggaaatttttggcagcctagacagtttgcgggaagaaattgaacagatgcggcgtccaactgggacgcaggattcccccgctaggacatgccaggatctgaagctttgtcaccccgaactacctgatggagagtactgggttgaccccaaccaggggtgcgcgcgggacgcgttccgggtgttttgcaacttcacggcgggaggcgagacttgtgttacacctcgcgatgatgtaactcagtttagctacgtggatagcgagggctcccccgtgggcgtggtgcagctgactttcctccgcctgcttagcgtatcggcccaccaggatgtttcatatccctgtagcggggccgcccgcgacggaccactccgtttaaggggcgcgaatgaagatgagctcagtcccgagacatccccttatgtcaaggagttccgcgacgggtgccagacgcagcaggggcgtacggtcctcgaagtcaggacccctgtactcgagcagctgcccgtgctagatgctagtttcagtgacttaggcgcaccacctaggcggggtggcgtgctgctgggaccagtttgctttatgggttag

SEQ ID NO: 232553 - DNA, 5148 bp, Artificial Sequence
  derived and/or modified sequence
atggagcggtgcagccggtgccaccggctgctgctgctgctgcccttagtgctgggcctgtcagctgcccctggttgggctggcgctcctcctgtggacgttctgcgggcacttagatttcctagcttaccggatggagttagaagagcaaagggcatttgtccagccgatgtcgcctaccgggtggctcgccctgcacagcttagcgctccaacaaggcaactttttcccggaggctttccgaaggacttttcactgctgaccgttgtgcgcacgagacccggcttgcaagcgccacttctgactttgtacagcgcccagggagttcggcagcttggccttgaactcggaaggcccgtacgtttcctctacgaagaccagaccggacgccctcaacccccttcacagcctgtgttcaggggcctgtccctggcggacggcaagtggcatagagtagccgttgccgttaagggccaaagtgtgacactgattgtggactgtaagaaaagggtaacgcgacccctgcccaggtccgcacgaccagtattagatacccacggggtgattatcttcggcgctcgtatcctggatgaagaagtatttgaaggggacgtgcaagagctggcaattgtgccaggggtccaggcagcatatgaatcctgtgagcaaaaggaattggaatgtgaaggcggtcaacgagagcgacctcagaatcagcagccacatagagcccaacgcagcccacaacagcagccttctcggttgcataggccccagaatcaggaaccccagtctcagccaacagagagtctctattatgattatgaacccccatactacgatgtcatgacaactggcacaactcctgactatcaggaacagaccgaccttcaagtgccacccaccgctgaccgctttcaggccgaagagtatggcgagggcggaactgaccctcctgagggcccctacgactatacttacggctacggggacgactaccgtgaagagaccgaactgggccccgctctgtcagcggagactgctcactccggagccgcagcgcacggaccaagaggactgaagggagagaaaggtgagcccgccgtgctggagcccggcatgctagtcgaggggcccccgggtcctgagggcccagcaggtctaatcggccctccggggattcaaggtaatcccggtcctgttggcgaccccggcgagcggggaccacctggccgcgccgggctgccggggtccgatggagcccccggtccacccggaaccagcctgatgctgccgtttagattcggctccggtggtggcgataaaggacctgttgtagccgcacaggaggcccaggcgcaggccatattgcaacaggcgcgactcgcgctgaggggccctccgggccccatgggttacactggccgtcctggtcccttagggcagcctgggtccccaggtctcaaaggggaaagtggggacctggggcctcagggccctcggggccctcaggggctgacaggaccccccggaaaagctggaagaagaggtagagcgggcgcagatggtgcaagggggatgcctggcgacccgggggtgaagggagacaggggtttcgacgggcttccaggcctgcctggagaaaaaggccatcggggtgataccggcgcccagggactgccaggcccacctggggaagatggggaaagaggggacgacggcgaaatcggcccccggggcctgccgggagaaagtggaccacgtggactgctcgggcctaagggcccgcctggaataccaggcccgcccggagtgcggggcatggacgggcctcagggccccaagggcagtctggggccccagggagaaccaggacctcccggtcaacaggggaccccaggaacgcaaggactccccggccctcagggcgcaatcggtcctcacggtgagaaagggccccaggggaagccaggtctgcctggcatgccaggctccgatggtccacctggacatcctggcaaggagggtccccctggcaccaagggaaaccaggggcctagcggaccccagggacctctgggttaccccggaccaaggggcgtgaagggagttgatggcatccggggacttaaaggtcacaagggagaaaagggcgaagacggctttcctggattcaaaggcgatatcggcgtgaagggtgaccgaggcgaggtgggagttccaggtagccgcggcgaggatggcccagaaggccccaaaggccgcaccggcccgactggtgatccagggccacctggtttgatgggagaaaaggggaagctgggcgtgccaggtttacctggctacccaggccggcaaggtcctaaaggatctttgggtttccccggcttcccaggagcttctggcgagaaaggggcccggggcctatctggtaaaagcgggccaagaggggagcgcggccctaccggaccgcgggggcagcgtgggcccagaggcgccacaggcaagtctggcgcgaaaggaacatcaggcggagacggtccacacgggccaccaggtgagcgcggcctcccgggaccacagggccccaatggatttccgggcccaaaaggcccgccgggaccgcccgggaaggatgggctgccagggcacccaggccaacggggagaggtgggctttcaaggcaaaactgggccaccgggcccacccggtgtagtgggcccacagggggccgcgggcgaaacaggtcctatgggcgaaagagggcacccgggaccccccggacctcccggtgaacaggggctgcccgggacagccggtaaggaagggacgaagggggatcctggacctccgggtgctcccggaaaagatgggccagccgggttacgcgggttccctggcgagagagggctaccgggaaccgcgggcgggccaggcctcaaaggcaatgagggcccttcgggacctccaggccctgccgggtctcctggagagagaggagccgcaggctccggcggtcctatcggtccacctggccgccctggaccacagggacctcccggggcagcaggcgagaagggcgtgcccggggagaagggacccatcggccccaccgggcgtgatggcgtgcaggggccagtcggactgcccgggcccgctggcccgccaggagtggcgggagaagacggagacaagggtgaagtcggtgatcccggacaaaaggggaccaaaggaaacaagggtgagcatggtcctcctgggccacccggccccattggacccgtcggacagcccggcgctgcaggtgcagatggcgagccaggggcccggggtccacaaggccatttcggcgccaagggagatgaagggactcggggattcaacggaccaccgggaccaatcgggctgcagggtttgccaggacccagcggcgagaaaggcgaaaccggggatgtcggtccaatgggacccccaggaccccctggccctagaggccccgccggtccaaatggcgccgacgggccccagggaccacccggaggagttggcaatctgggtccccctggcgagaagggggagcccggggagtctggttctcccggcattcaaggtgagcctggggttaagggtcctaggggagaacgaggtgaaaagggagaatcagggcaaccaggcgagccagggccgccgggcccaaaaggccctaccggggatgatggacccaagggaaatcctggacctgtcggctttccaggcgacccaggtccgccaggcgagggtgggccacgggggcaagacggagccaagggcgatagaggcgaggacggcgagcccggccaacctgggtcacccggccccaccggtgaaaacggccccccgggccctcttggcaagcggggacccgcaggctccccaggatcagagggccgtcagggaggaaaaggtgcgaaaggcgaccctggtgccattggcgctccgggaaagaccggcccagtgggaccagccggacccgctggcaaaccagggccagacggcctgcggggcctgcccgggtccgtcggtcaacagggtcgaccaggtgcgactggtcaggccggacctcccggccctgtgggtccccctggcctaccggggctgcggggtgacgctggagcaaaaggggagaagggtcacccggggctcattggtctgatcggaccgccgggggagcagggagagaagggcgatagaggcctaccgggcccccaggggtctcctggccagaagggagaaatggggattcctggagcatccgggcccattgggccaggtggaccccctggcctgccgggcccggcaggaccgaaaggggcgaagggggcaaccggccctggaggtcccaaaggagaaaagggcgtccaagggccacctgggcacccaggccctccaggtgaggtaattcagcctttaccaatccagatgcccaaaaagactcgccgcagcgttgacgggagccgactgatgcaagaggatgaggctattcccactgggggggctcctggctcccccggtggccttgaagagatctttgggtcactcgattcgttgagggaggagatcgagcaaatgaggcgacccactggaactcaagacagccctgctagaacctgccaggacttaaagctgtgccacccagaactacctgatggcgagtactgggtcgatccgaaccagggatgtgctagggacgcctttagagttttctgcaattttaccgctggcggggagacatgcgttactcctcgggacgacgttacccagtttagttacgttgactccgagggatcccctgtaggggtggttcagctgacatttctgagactgctctcagtctctgcccaccaagacgtgtcttacccgtgctcgggcgccgcccgcgatggacctcttcggctccgcggtgccaacgaggacgaactgtctcctgagaccagcccttatgtaaaagagttccgcgatggctgccagacccagcaaggccgcaccgtgctggaagtgcgaacacctgtgttggagcagctcccagtgctagacgcctccttctccgacctcggggcccctccccgtagggggggggtgctgttggggccggtctgcttcatgggctag

SEQ ID NO: 232554 - DNA, 5070 bp, Artificial Sequence
  derived and/or modified sequence
atggagcggtgcagccggtgccaccggctgctgctgctgctgcccctggtgctgggcctctctgctgcccctggatgggcaggtgcacctcctgtggacgtgctacgagccctgcggtttccgtctctgcctgacggcgttcgcagggccaagggaatctgccccgcggatgtggcgtacagagttgcccgcccggcacagctgagcgctccgacacgccagctatttcctggaggcttccccaaggacttctcactgctgactgtggtgagaactagaccaggcttacaggcgcccctgctgacgctgtattctgctcagggcgtccgccagctgggcttggagttgggccgccctgtgagatttctgtatgaggaccagaccggtcggccccaacctccttcacagcccgtgtttagaggcctgtccctcgcagacggcaagtggcatagggtggcggttgcagtgaaaggccagtccgtgacgttgatcgtggattgtaaaaagcgagtcacccggcccctccctagatccgccaggcctgttctagacacgcatggggttatcatcttcggtgctcgaatcctggacgaggaagttttcgagggtgacgtacaggagttggccatcgttccaggagtccaagctgcctacgaaagctgcgagcagaaagaattagagtgtgaaggcggtcaacgcgagcgaccacagaatcaacagccgcatagagctcagcgcagcccccagcagcagccaagcaggctccatagaccacagaaccaggaaccgcagtctcaagagcagaccgacctgcaggtgcccccaaccgcagatcgattccaggctgaggaatacggcgagggggggaccgaccctcccgaggggccctatgactacacttacggatacggagacgattatagggaagaaaccgaactggggcctgcgttgtctgccgagaccgctcactccggggccgccgctcacggccctcgtggcctcaaaggcgagaagggtgaacccgcagtcctcgaacctggcatgttagtggaggggccaccaggaccggagggcccagccgggcttatcggccccccagggatccaggggaaccccgggcctgtgggtgacccgggcgagcgtggcccccctggaagggcgggcctaccaggctccgacggggcccccggtccccccggcacatccctaatgttacctttccggttcggctctggagggggagataaaggacccgtggttgcggcacaagaagcccaagcacaggctatattgcagcaggcacgcctggccctgcgcggcccccccggccccatgggatatacgggtcgccctggacccctgggacagcccggcagtccaggacttaagggcgaatccggagatttgggtccgcagggaccccgcgggccccaaggcctcaccggcccccccggcaaggcagggcgaaggggacgggccggtgctgacggtgccagagggatgccaggggatcctggggttaagggtgaccgcggttttgacggactaccgggccttcccggggagaaaggtcatcgaggcgacacaggcgcccaggggctgcctggcccccccggggaggatggagagagaggtgacgatggggaaatcggccctcgcgggctgcccggcgaaagcggccctcgtgggctcctgggccccaaaggacctccaggcatcccagggccccccggggtccggggaatggatggtccacagggacctaaaggaagcctgggtccacagggcgagcctgggccgcctggacagcaaggaacacccggaacacagggactgccaggcccgcagggagccatcggtccacatggagaaaaagggccccaaggaaaaccgggactgcctgggatgccaggctcagacggcccaccagggcatcccggaaaagagggaccccctggaaccaaagggaaccaggggccgtctgggccacaaggccctcttggctacccaggtccaaggggagtcaaaggggtggatggaattcgcggtctgaaaggacacaaaggcgagaagggggaagatggctttcctgggtttaagggtgacataggggttaagggggaccgaggcgaagttggcgtgcctggaagcagaggcgaagatggaccagaaggtccaaaaggccgcacaggaccaaccggcgatccagggccccccggcctcatgggcgagaagggcaaactgggcgttcccggactgcctggatatccgggacgccagggaccaaagggctcactgggcttcccggggtttcccggcgcgtctggcgaaaaaggagccagaggcctttccggcaaatctggccctagaggagagcgcggccctacgggacctcgtgggcagcgaggtccccggggtgcaaccggcaagtctggggcaaaaggcacctccgggggggacggccctcacgggccacccggggagcgaggcctgccaggcccccagggaccaaacggatttcctgggcccaaggggccaccagggccccctggcaaggacggccttccaggccatccaggacagcggggcgaagtgggtttccaggggaaaacgggcccacccggccccccgggtgtggtaggcccccaaggggcggccggtgagacggggccaatgggcgaaagagggcaccctggaccacctggcccccctggtgagcagggtctgcctggcacagctggcaaggagggcactaaaggtgatcctggtccccctggtgcccccgggaaggatggcccagccggactgaggggattccccggtgaacgtggactgcctggaacagccggcggtccgggactcaaaggcaatgagggcccttctggacccccagggccagccgggagcccaggcgagaggggcgccgcaggctctggcggacctattggacctcccggcagacctggaccgcagggaccaccaggcgcagcaggcgaaaaaggcgtgccaggggaaaagggccccattgggcctaccggaagagatggcgtccaaggccccgtgggtctccccgggcccgctgggccaccaggagtcgccggcgaagatggcgataagggagaagtgggagatccaggtcagaaggggacaaaaggcaataagggcgaacacggtcctccggggcctccaggaccaattgggccggtcggacaaccaggagccgcaggggccgacggggagccaggcgcgcggggccctcagggtcatttcggcgctaaaggcgacgagggcaccagagggttcaatggcccccctggacccattggcctccaggggctgcccggccctagtggcgagaaaggggagactggcgacgtcggacccatgggcccccctggccctcctggaccaaggggacccgccggccctaacggagcagatgggcctcagggcccacccggcggggtggggaacttgggcccacccggggagaagggcgaacctggcgagagtgggtctcccggcatccaaggggaacccggcgtaaaaggtcccagaggagagcggggcgagaaaggagagtcaggccagcctggagagccaggaccgccgggcccaaaaggccctactggagacgacggcccaaagggtaacccaggacccgttgggttcccaggcgatcctggaccgccaggcgagggggggccccgagggcaggacggtgccaaaggggataggggagaggatggagaaccgggacagccggggagcccgggccccaccggggaaaacggcccgcccggtcctctcggtaagcggggccccgctgggtcgcctggttccgaaggccgacagggggggaagggcgcaaaaggcgacccaggtgcaatcggggctccaggcaagacagggcccgtcggacctgctggaccagccggaaaaccaggaccagatgggctacggggactgcccggcagtgtgggccagcaggggaggcccggagccacgggtcaggccgggcctccaggaccagttggaccacccggcttacctgggctgagaggcgacgctggcgccaagggtgaaaagggccatcccggtctcatcggattgataggccccccaggcgagcagggcgagaaaggcgaccgtggcctccccgggcctcaaggtagccccggacagaagggagagatgggcattcccggcgcctcagggcctatcgggcctggaggtccgccagggctacctggtcccgccggccctaaaggggcgaagggcgctactggaccaggcgggcctaagggggagaagggcgtgcagggccccccaggacatccaggaccccccggcgaagtgatccagcctctgcccatacagatgccgaagaaaacaagacgcagcgtcgacgggagccgtttgatgcaggaagatgaagctatacctacggggggcgcaccgggcagtccaggaggactcgaagaaattttcgggtcattggatagtctccgggaggaaatcgaacagatgcgaagacctaccggtacccaagattctcctgctaggacctgccaggacctgaagctttgtcatcctgaactaccagatggggagtactgggtcgaccctaatcagggttgcgcccgggacgcatttagggtgttctgcaactttactgcggggggtgaaacctgcgtcaccccgcgggacgacgtgacgcagttcagctacgtggacagcgagggctcgcccgtgggggtcgtccagctcacatttctgcgcctgttgagtgtgtctgcccatcaggacgtgagctacccatgtagcggagctgctagggatggccctttgcgcctgagaggagcgaacgaggatgaattgtcccctgagacctctccttatgtgaaggagttccgcgatgggtgccagacgcagcaggggagaacggtcctcgaagtccgaacaccagtgcttgagcaactgccggtcttagacgcttccttcagtgatttgggagcccctcctcgcagaggtggagttttgctaggtcctgtgtgcttcatggggtag

SEQ ID NO: 232555 - DNA, 5133 bp, Artificial Sequence
  derived and/or modified sequence
atggagcggtgcagccggtgccaccggctgctgctgctgctgcccttggtcctcggactgagcgccgccccagggtgggccggcgccccacccgtcgacgtgctcagggctttgcggttcccatcactgcctgacggagtgcgcagggccaagggcatctgcccagccgatgttgcgtatagagttgccaggcccgcccagctatcagcacccactagacaactcttccctggcggatttcccaaggacttttcgctgctgaccgtggtgaggacacggcccggtctgcaagcgcccttgctgactttgtacagtgctcaaggggtccgacaactcggacttgagctcggacgcccggtgaggttcttgtatgaggaccagaccggcaggccacagcctccctcacagcccgtattcaggggcctcagcctagctgacggcaagtggcatagagtcgcagtggcagtaaagggccagagcgtgaccctgattgttgattgtaagaaacgggtcacacgccccctccccagaagcgctaggcccgtactagatacacacggtgtaataatttttggcgcccgcattcttgatgaggaggtgttcgaaggcgacgttcaggaactggccatcgtgccaggagtacaggctgcatacgaaagttgtgagcagaaggagttagagtgcgaagggggccaacgagaaaggccccagaatcagcaaccccatagagcccagcgcagcccacagcaacagcctagcagactccataggccacaaaaccaggaacctcagagccaggaccctacaccgggcgaggaagaggaaatccttgagagttccctgctgcccccgctggaagaagaacagaccgacctacaggtgccaccgaccgctgataggttccaggcagaggagtatggggaaggaggcacagacccccccgagggaccttatgattatacctacggctacggagacgactatagggaggagacggagctggggcctgccttaagcgccgagaccgcccattctggagcagccgcacatgggccccgcggactgaagggggagaagggggaaccagccgtgctggaacctggaatgcttgtggaaggccctccaggtccagaagggcctgccggtctaattggaccgcccggtatccagggcaatcccggtccagttggcgatcctggagagcggggaccccccgggcgtgccggcctccccggtagtgacggtgcacctgggccgcccgggacctcactgatgctccccttccgctttgggagcggaggtggagacaagggtcctgttgtggccgcccaggaagcacaggcgcaggccatcttgcaacaggcaagactcgcactccgaggaccaccaggacccatgggctacacgggccggcccggccctctggggcagccgggatcccctgggcttaaaggcgaatcaggggatctgggccctcagggaccaaggggtccccagggtctcactggaccaccgggtaaggccggcagacgcggcagagcaggcgcagacggtgctagaggtatgcccggcgatcccggagttaaaggggaccggggttttgacggcttgcctggcttgcccggagagaaagggcacagaggcgacacgggtgctcagggcctgccaggacctccgggcgaggacggcgagcgcggcgacgacggcgaaatagggcccagaggtctgcctggagaatccggtccacgcggcctcttagggcctaaggggcctcccgggatcccgggcccccctggagtgcgcggcatggacgggccccagggcccaaaaggctcgttggggccccaaggtgagcccggtccccccgggcagcagggcacacctgggactcaggggctccctgggccccagggagctatagggccccatggagagaaggggccacagggtaagccaggcctaccgggaatgcctgggtccgacggaccccctggccaccccggcaaagaagggcctcctgggaccaagggcaaccagggcccatccgggccacaaggcccgttaggttatcccggaccccggggcgtgaagggagtggacgggatcagagggctgaaagggcataagggggagaaaggcgaggatggatttcctgggttcaagggcgatatcggagtgaaaggagatcgcggggaggtgggcgtgcccggatcacggggtgaagatggccctgaaggccctaagggcaggaccgggccaactggtgatcccgggccacctgggctcatgggcgagaagggaaaactgggagtcccaggcctaccgggatatccaggtcgccaggggccaaagggatcattgggcttcccaggatttccaggcgcttccggcgagaagggcgcgagaggcttgtccggtaagagcggaccacgaggcgagcgagggccaacggggcctagagggcagcggggcccgcggggtgctacagggaagagcggcgctaaaggcaccagcggcggggatggtccccacgggccgcctggcgagaggggtctgcccggaccccagggcccaaatggcttccctggacccaagggacccccgggccctccagggaaggatgggctaccaggccatccgggtcagcgaggagaggtgggattccaggggaagaccggcccccctggccccccaggcgtagtgggcccccagggagctgccggcgagactggccccatgggcgagcgggggcatcctggacccccaggcccaccgggagagcaggggcttccggggaccgctggcaaggaggggactaaaggcgatcccggcccaccgggagctcccggcaaagatggccctgcaggactgcgtggtttccctggtgaaaggggattgccggggactgccggcggacccggcttgaaaggcaacgagggaccaagcggccctcctggccccgccggttccccgggggaaagaggggcagccggatcgggaggacctattggccctccaggcagacctggaccacagggcccaccaggagcagcaggagaaaaaggagtccctggggaaaaaggacccatcggacccacagggagggatggggttcagggcccggtaggtctaccaggtccggctgggccaccaggggttgcgggcgaggatggggataaaggggaggtcggagatccagggcagaagggcactaaaggaaataagggtgagcatgggcctccaggccctccaggtcccatcggacccgtcggccaacctggcgcagccggagccgacggcgaacctggcgccagaggaccccagggacatttcggcgcaaagggggacgaaggaacacgcggatttaacggtccaccaggcccgattggcctgcaggggctaccaggaccatctggcgagaagggtgaaacaggcgatgttggtccaatggggcctccggggccgcctggcccgcgtggccccgctggacctaacggagccgacggccctcaaggtcctcctggcggggtggggaacctggggccacccggtgaaaagggtgagcccggcgagtccgggagccccggaattcagggcgagccgggggtgaagggacctagaggtgaacgaggtgaaaagggtgagtctggtcaaccaggcgagcctgggccacccggacctaagggaccaactggtgacgatgggccgaaagggaaccccggtccagtagggtttcccggggaccccgggcctcctggcgagggaggtccacggggacaggatggagctaagggagatagaggggaagacggggagcccgggcagccgggctcaccgggaccaacaggcgaaaatggcccccctggcccactcggcaaacgaggaccagcaggaagcccagggtccgaagggagacaaggcggaaagggcgccaagggggaccccggtgcaatcggcgcgccgggcaagaccggaccagtgggtcctgcaggccctgcagggaagccgggtccggatgggctcagaggattgccaggatccgtgggacagcagggtagacccggagccacaggacaggcgggcccgccgggcccggtgggccctcctgggctccctggacttaggggggatgctggtgcaaagggcgagaagggccatccaggcctcattggcctaattggaccaccaggcgagcaaggcgaaaaaggcgatcggggcctgccaggcccacaggggtccccaggacagaagggagagatgggcatccccggggcgagcgggccgatcggcccggggggcccacctggactcccgggcccggctggaccaaagggcgccaaaggcgccaccggtcctggcggccccaagggagagaaaggggtccagggcccgcctggccatccagggcctcctggcgaggtgatccagccactccccatccagatgcccaagaagaccagaagatcggtggatggttcgagacttatgcaggaggatgaggcaataccaaccgggggagcaccgggcagtcctggaggccttgaggaaatttttggctccctggactccctgcgagaggaaatagagcagatgcgtaggccaactgggacacaagattcacccgctagaacctgccaggacctcaaactgtgtcaccccgaattgcctgatggcgaatactgggtggaccctaatcagggttgtgccagagatgcctttcgcgtgttctgcaattttaccgccggtggggagacttgtgtaacaccacgggacgatgtcactcagttttcttatgtggatagcgaaggcagtcctgttggtgttgtgcagctgacctttctaagattgctcagcgttagcgctcaccaggatgtatcatacccatgctcaggagctgcccgcgacgggccactgcgtctgcgtggcgccaacgaagatgaattgagtcccgagaccagtccatacgtaaaggaattccgggacgggtgtcagacccagcaggggcggacagtccttgaagtgaggacccccgtgttggaacagttgccggtcctggatgcctccttttcagatctgggggcaccaccacggagaggcggtgtgctcctgggacccgtttgttttatgggttag

SEQ ID NO: 232556 - DNA, 1875 bp, Artificial Sequence
  derived and/or modified sequence
atggagcggtgcagccggtgccaccggctgctgctgctgctgcccctggtcctcggcctgtccgcggcacccggatgggccggagcaccacctgttgacgtgctgagggcactgcgcttccctagtttacccgacggagtgcgcagggccaaggggatttgtcctgccgatgtggcttatagggttgccaggccagcccagctgtctgctcctacccgacagctcttccctggcggattccccaaggacttttcattgctgactgtggtgcgcaccagacctggattacaggcccctctgctgactttgtattcagcacagggtgttcgccagctgggactggagcttggtcgcccagtgcgctttctctacgaggaccagaccgggaggccacagcccccgagtcagcccgtattcagggggctgtctcttgcagacggtaaatggcatagggtggctgtagccgtcaagggtcagagtgtgaccctaatcgtggattgtaaaaaacgggtgaccaggcccctgccccgctctgcacgccccgttttggacacgcacggagttatcatctttggggctcggatcttggatgaggaagtttttgaaggggatgtgcaagagctggccatcgtacctggggtccaggccgcatacgaatcttgcgaacagaaagagctggagtgtgagggaggacagcgcgaacgaccccagaaccagcagccccacagagctcaaaggagcccccagcaacaaccttcccgcctgcacagacctcaaaaccaggaaccacagtcccagccaactgagagcctatattacgattataagcctccctactatgatgtgatgaccactggtaccacaccagactatcaggacccaaccccaggggaggaagaagaaattctggagagcagccttctacccccactggaggaggagcagactgatcttcaagtccccccaacggccgaccggttccaggctgaagaatacggtgaagggggaaccgatccgcccgagggcccatatgactacacgtatggctacggagacgattatagagaagagactgagcttggacccgctctcagcgcagagactgcccactcaggcgctgccgcccacggcccccggggcctcaaaggtgaaaaaggtgagccagcagtcctggaacccgggatgctagtggagggccccccaggacctgaagggcctgcaggattaatcggtccacccggaatccagggaaatccggggcctgtgggcgatcctggtgaaagaggtccccctggaagagccggcctcccagggtcagatggagctcctggcccccccggcaccagcctaatgttgcccttcagatttggcagcggaggcggagacaaagggcccgttgttgccgctcaagaggctcaagcccaagccatcctgcaacaggctagacttgctctgagaggccccccagggccgatgggctacactggtaggcccgggccactggggcaacctgggtcccctggactcaaaggcgaatcaggggatctcgggccccaggggcccaggggacctcagggcttgactggaccaccagggaaagcaggcaggagggggcgagctggcgctgatggcgctcgaggaatgccaggggatcctggcgtgaaaggagataggggtttcgacgggctgcccgggctacctggcgagaagggccaccgaggagatactggggcccaagggttgcccggccctcccggagaagatggcgaacgcggagacgacggcgagatcggcccacgagggttacccggcgaatccggccccaggggcctcctcggccccaagggccccccgggtatcccagggcctccgtag

SEQ ID NO: 232557 - DNA, 1875 bp, Artificial Sequence
  derived and/or modified sequence
atggagcggtgcagccggtgccaccggctgctgctgctgctgcccctcgtgctcgggctgtccgccgccccaggttgggcaggggcccccccagtggacgttctccgcgccttgaggttccctagcctgccagatggcgtccggagggccaagggtatttgccccgctgatgtagcctatcgggtggctcggccagcacagttatccgcccctacacgccagctcttccccggcgggtttccgaaggactttagtctgctgaccgtcgtaagaacccgcccagggctacaggccccactgcttaccttgtattccgcgcaaggagtccgccagttgggcctggaactgggacgcccagtgcgcttcctttatgaagatcagactggaagaccgcagcccccctcacagccagtgttccggggactgagtctcgccgacggcaagtggcaccgagtggcagtagccgtgaaaggccaatccgtgactctgatcgttgactgcaagaagcgggttacacgccccctgcctcgttcagcgcgaccagttctcgacacgcacggcgtgatcatattcggggcccgaattctcgatgaagaggtctttgagggcgacgtgcaagagctggccatcgtgcctggcgtccaggccgcctatgagtcctgtgaacagaaggagctggaatgtgaaggtgggcagcgagagcgaccccagaaccagcagccacatagagcccagcgttcaccccagcagcaacccagcagactacataggccccaaaatcaagagccccagagtcaacccacagaatctttatattacgattatgagccaccttattacgacgttatgaccaccggcacaactcccgactaccaggatccaacaccaggggaggaagaggaaatccttgaatcgtctttgctgcccccgctggaggaggagcagactgaccttcaagtcccacctactgctgaccggtttcaggcagaggagtacggtgagggaggcacagacccacccgagggcccttatgactacacatacggctatggggatgactatcgtgaggaaactgagctcggccctgccctttctgccgaaacagcccactctggagcggccgcccacgggccgagggggctgaaaggcgaaaaaggagagccagccgtgctggagcccggaatgctcgtcgaaggcccacctggccctgagggcccagccggtctgatcgggccccccgggatccagggtaatcctgggcctgtaggagatcccggcgagcgcgggccaccaggacgagctggcttgcccggaagcgatggcgccccaggacccccaggaacatccttaatgcttcctttccggttcggttcaggcggtggggacaaaggccccgtggtagcagcccaggaggcccaggctcaggcgatcctgcagcaggcacgactggccctaaggggccccccagggccaatggggtacactggaaggccaggacctctcggccagcccggttcccccggtctcaaaggagagagtggcgatctgggcccacaaggtccaagaggccctcaaggactgaccggtccacccggcaaagccggaagaagggggagggccggcgcagacggagcacgcgggatgcctggtgacccaggtgttaaaggagaccgcggcttcgacggcctgccagggcttcccggagaaaaggggcatcggggtgacacaggcgcccagggcctaccaggccctcctggcgaggatggagagaggggagacgatggcgagattggaccaaggggactcccaggcgagtccggcccgcgcggtctcctcgggcctaaagggcctcccggcatccctggccccccttag

SEQ ID NO: 232558 - DNA, 6035 bp, Artificial Sequence
  derived and/or modified sequence
ggtgcaccccctgtggatgtgctccgggccctgaggttcccctccctccctgatggtgtccggagagcgaaaggcatctgtccagctgatgtggcctaccgagtggcacgacctgcccagctcagtgcacccactcgccagcttttcccaggaggatttcccaaagatttctctctgctgactgttgtccggacccgccctggtctccaagctcccctcctgactctctacagtgcccagggtgtccgacagctgggcctggagctgggccgacctgtccgcttcctgtatgaagaccagactgggcggcctcaacctccctctcagccagtcttccgaggcctcagcctagcagatggcaagtggcaccgtgtggctgtggctgtgaagggccagtctgtcaccctcattgttgactgcaagaagcgagtcacccggcctctcccccgaagtgctcgtccagtattggacacccatggagtgatcatctttggtgcccgtattctggatgaagaagtctttgagggtgatgtccaggagctggccattgtcccaggggtccaggcagcctatgaatcatgtgaacagaaggagctggaatgcgaggggggccagagggaaagaccccaaaaccaacagcctcacagagcccagagatctccacagcagcaaccatcaagacttcacaggccacaaaatcaggaaccccagagccaggaccccaccccaggtgaagaggaagaaatcctggagtcgagcctcttgccaccccttgaggaggagcagacagatctccaggtcccccccacagccgacaggttccaggcagaggaatatggggagggtggcacagacccccctgaagggccctacgattacacctatggctatggggatgattatcgtgaggagacagagcttggccctgccctctctgcggagacagcccactcaggagccgctgcccatggaccccgagggctgaagggagagaaaggagagcctgcagtgttggaacctggtatgctcgtggaggggccccctggcccagaaggccctgcgggattgattggtccccctggcatccaggggaacccaggcccagttggagaccctggagagaggggcccccctggccgagcagggctccctggatcagatggggctcctggtcctcctggcacatctctcatgctcccattccggtttggcagtggtgggggtgacaagggccctgtggtggcggcccaggaggctcaggcccaggcgatcctgcagcaggcgaggctggcgctccgtggaccccctggccccatgggatacacagggcgccctggacccttgggccaacctgggagccctggcctgaaaggagagtctggagacttaggacctcagggccccagaggacctcagggcctcacaggccctcctggcaaggctgggcgaaggggccgggcaggtgctgatggagcccgagggatgcctggagatcctggagtgaagggtgaccgaggttttgatggactcccagggctccctggagagaagggccataggggtgatactggtgcccagggccttcctggtccccctggtgaggatggagagaggggagatgacggggagattgggcctcgagggctgcctggagagtcgggacctcgaggtctccttggccccaaaggcccacctggtattcctggaccccctggcgtccgaggcatggatggtccccagggccccaaagggagcttgggaccccagggagagccaggacctcctggacaacagggcacccctgggacccagggtcttcccgggccccagggtgccatcggccctcatggagagaagggtcctcaagggaagccagggctccccggcatgcctggctcagacggacccccgggtcacccagggaaggaaggtccccctggaaccaaaggaaaccagggtccctctggacctcagggacctctaggatacccaggacctcgaggggtcaagggtgtggacggaattcggggtctgaagggtcataagggtgagaagggtgaggatggctttcctgggttcaaaggtgacataggcgtgaaaggtgacaggggcgaagttggagtccctggttccaggggagaggatggtcctgaggggccaaagggacgcactggaccgactggagaccctgggcccccagggctcatgggcgagaagggcaagctgggtgttcctggtctgcctggctatcctggacgtcagggacccaaggggtccctaggatttcctggctttcctggtgccagtggagagaagggagcccggggcctgtcggggaagtcagggcctcggggagaacggggccccacgggtccacggggtcagcggggaccccgaggtgccactgggaagtctggagctaagggaacatctggtggtgatggcccccatgggccccctggagagaggggcctccctggacctcagggtcccaacgggtttcctggaccgaaaggacccccgggcccccctgggaaggacgggctgccgggacacccaggccaaagaggagaagtgggtttccaagggaagaccggcccccctggtcctccaggagtggtgggacctcagggagcagcaggagaaaccggccctatgggggagagaggtcacccaggccccccggggccccctggagagcagggactacctgggacagctggaaaagaaggaacaaagggtgaccctggtccccctggggccccagggaaggatggtcctgctggtctgaggggattcccaggagagagaggcctcccaggcactgctggtggacctggtttgaaggggaatgaaggtccgtctggcccccctggccctgcaggctcccctggggaacgaggtgcagcaggatcagggggacccattggtccgccagggcgcccaggcccgcagggtccccctggagcagcaggagagaaaggtgtcccaggtgagaagggccccattggcccaactggccgagatggagtgcagggtcctgtggggcttcctggtcctgctgggcctccaggtgtggctggagaggatggagacaagggtgaggtgggggaccccggacagaagggcaccaaagggaacaagggtgaacatggccctcctggaccccctggacccattggtcctgtggggcagcctggagcagcgggagcagatggggagcctggagctcggggaccccagggacactttggagccaaaggtgatgaaggaacaagaggattcaatgggcccccaggacccattggcctacagggtttgccaggcccctctggggagaagggagaaacaggagatgtgggtcctatgggaccacctggccccccaggacctcgaggtccagctggacccaatggcgctgatggcccacaaggtcccccaggaggtgttgggaacctgggtccccctggagagaagggggaaccaggagagtcaggatctccagggatccagggcgagccaggtgtcaagggtccacgcggggaacgtggagagaaaggagagtcggggcagccaggagagccagggccaccagggcctaaaggccccacaggcgatgatggccccaaagggaaccctggtcctgttggttttcctggtgaccctggcccccctggagaaggtggccctcggggccaggatggtgctaagggtgaccgaggcgaggatggtgagccaggacagcctggatcccctggtcccaccggggagaatggacccccagggccacttggaaagcgaggtcctgctggctcgcctggttccgaggggcgacaaggagggaagggagccaagggagatcctggcgctataggtgccccggggaagacaggcccggtgggtcctgcaggcccagcagggaaacctggccctgatggtctgagggggctcccaggctcagtgggtcagcaaggccgacctggagctacaggccaggctgggcccccaggtcctgtgggacccccagggctgcctggtctccggggcgatgctggagccaagggagagaagggccacccaggtctcattggactgattgggcccccgggtgagcagggagagaagggagatcggggacttcctgggcctcagggctcccctgggcagaagggtgagatgggtatcccaggagcatccggccccattggtcctggaggtccccccggcctccccggacctgctggccccaaaggagccaaaggagccacaggcccaggcggacccaagggagagaagggtgtgcagggccctccaggacacccgggtcccccaggcgaggtgatccagccactgcccattcagatgcccaagaagactcggcgctcggtggatggaagccgtctgatgcaggaagatgaggccataccgaccgggggagcccccggcagtcctggggggctggaggagatctttggctcactcgactccctgcgggaggagatcgagcagatgaggcggccaacagggacccaggacagccctgctcgcacctgccaggacctgaagctgtgccacccagagcttcccgatggagagtactgggtcgaccccaaccagggctgtgctcgggatgccttccgagttttctgcaacttcacagcagggggtgagacctgtgtgacgcctagggatgacgtcacgcagttctcttacgtggactcagagggctccccagtgggtgtggtccagctcaccttcctgcggctgctcagcgtctcagcccaccaggacgtctcctacccctgctctggagcagcccgtgacggtcccctgagactccgtggggccaatgaggatgagctgagcccggagactagcccctatgtcaaagaattcagagatggctgccagacacagcaaggccggacggtgctggaggtgcgaacgcctgtgctggagcagctgccagtgctggatgcctccttctcagacctgggagccccaccgaggcggggaggggtgctgctggggcctgtctgcttcatgggataggaccgtctctgtctgatcctgtccattcggaaccaggcccacctggaatcccacaacatcagctctgtgccacctcccaagagggctcctcactatctagggagccctgggccagggcgtggagagccctcagtcggggcaggccaggggaggggtgaagtggttgcctggacaccccacgggaggagtggcatctggggctcttggccctcccacctggagcctgttacccgttagagagctgagacccttatttaaaactcacctcccaatcaccccaaacaaatggaagagaagagaaaggacatggcgtattttgtatttaaaagtaattgtattaattatttaaagtgtggaaagcaaaataacaaaaaagagaaacgccaacaaaaatcagcagatgttgaagacaggggtctcgggggtgggctccggcacccacatcctggagtcaggactttcctcagtgactgtgtgtaggggggtttcagggctgaaccccacctccctcccaccttcctcccacctcacctgtcgcacccactgtgaaagttggaatatgtggtctccctggcctcagggctctgactctgccagggtggggctctctaacccacaggtgttggctgcctggcccatgtgcccactgtctcttccacttggtctgggtttggcaggcactgcctgctacttgagggccaggatgctcccccagggaagaaacggaatagtgtggggtgtgtgcagggctgcatcccgcagatggctggaatattaaaattcttctatattggctggtaaattgccatggccctgagccactgagtatgttcattgccacccctgtccctcccctgggcacccctcactttccctgatcctgcaattaaagggttaatgtgtggcatatggaagggactcccaggaccctgtgcccagcttccatgctgactgatggttaaataatgtgattgtctcctccc

SEQ ID NO: 232559 - DNA, 1794 bp, Artificial Sequence
  derived and/or modified sequence
tgagccccccccgtggacgtgctgcgggccctgcggttccccagcctgcccgatggcgttcgaagggctaaaggcatctgtcccgcagacgtagcctaccgggtggcgcgacctgctcagctgtctgctcctacacgtcagttgtttcctggagggttcccaaaagactttagcctgctcacagtggtgaggacgagacccgggctccaggcccccttgctgacactctatagtgcacagggcgtgcggcagctgggcctcgagctgggacggccggttagatttctgtacgaggaccagacagggaggccccagccaccctcacaacccgtattccggggactgtccctggccgacggcaagtggcatcgggtggcagtggcagttaaaggacagtctgtgaccttaatcgtggattgtaagaaaagggtgacaaggccactgccccgcagtgcgagacctgtgctggacacccacggcgtgatcatattcggagctagaatcctggatgaggaggtgtttgaaggagacgtgcaggaactggcgattgtgccgggcgtgcaggccgcatatgagagttgtgagcagaaagaattagaatgtgaggggggccagcgcgaacgcccccagaaccagcagccacacagagcccaaagaagccctcaacagcagcctagtcgactccatcgaccacagaaccaagagccccagtctcagcccacagagtcgctttattacgactataagcccccttactatgatgtgatgacaactggtaccactccagattaccaggatccgaccccaggagaagaggaagaaattctcgaatcttcgctgttgccaccactggaggaggagcagaccgacctgcaggtcccaccaaccgcagatagattccaagccgaagagtacggagaaggtggcactgatccaccagaaggcccttatgattacacttacgggtacggtgatgattatagggaagaaaccgagctggggccagccctgagcgctgagaccgcccacagcggggctgctgcacatggtccaaggggactgaagggcgagaagggtgagcctgcggttctggaacctggtatgctggtggagggaccacccggaccagaaggcccggccggcctgatcggcccgcccggcatccagggcaaccctggacccgtcggtgacccaggtgagcggggtccgcctggtagagctgggcttcccggcagcgacggcgctccaggaccccctggaacctcgctgatgcttccctttcggttcggctccggaggaggtgataaaggtccagtggtcgccgcccaagaagcccaggcacaagccatcttacagcaggccaggctcgcgttgcgaggtccaccaggtccaatggggtacactggacgtcccggacctctggggcaacctggctctccaggactcaaaggcgaatcgggagatcttggaccccaagggccccgcggtccccaaggtttgactggcccacccggtaaggccgggagacgtggccgcgcaggcgccgatggcgcccgcggcatgcctggtgatcctggggtcaagggtgatcgaggcttcgatggcctgcccgggctgccgggcgaaaaaggacatcgtggcgacactggggctcagggtttgccgggccctccaggagaagacggggaacgtggagatgacggagaaatcggccctaggggtctccctggtgaaagcgggcccaggggtctcttggggcctaaaggacctccaggaattcccggaccaccttag

SEQ ID NO: 232560 - DNA, 1875 bp, Artificial Sequence
  derived and/or modified sequence
atggagcggtgcagccggtgccaccggctgctgctgctgctgccccttgtccttgggctgtcagcagctccagggtgggctggtgccccccccgtggacgtactgcgggctctgagatttccaagcctgcccgatggggtccgccgcgccaagggcatctgcccggctgacgttgcttatagggtggcacgtccagcccagctatccgcaccaaccaggcaattgtttccaggaggattcccaaaggatttttccctgctgaccgtagttcggactaggcctggccttcaggctccactcctgacactctactcagcccagggcgtgcggcagctcggcttagaactcggcagacctgtacgctttctgtacgaggatcaaaccgggcggccacagcccccgtcccaacctgtcttccgcggtctttccttggctgatggcaagtggcacagggtcgcagtcgctgtaaaggggcagtcggtaaccctgatagttgactgtaagaagcgagtcacacgtcctcttccaaggtccgctcgtcctgtgctcgatacccacggggtaattatattcggcgcacgtatcttagacgaagaggtgtttgagggtgacgtccaggagctcgcgatagtgccgggcgttcaagctgcctacgagagttgtgagcagaaagagttagaatgtgagggaggacagagggagagaccacagaaccagcagccgcacagggcacagcggagcccacagcagcagccatcaaggctgcaccggccgcagaaccaagaaccacagtctcagcccactgaatccctgtattacgactacgagcccccatattatgacgttatgaccacgggaaccacaccggattaccaggatccaacacccggggaagaagaagagatccttgagtcatctcttcttcctccattagaggaggaacagacagatctgcaggtgccaccaacagccgataggttccaggcagaagagtacggagagggtggcactgatccacccgagggcccctacgattacacatatggctacggtgacgattaccgagaggagaccgagttaggacctgctctgtccgctgagactgcacacagcggggccgctgcacatgggccccggggactgaagggcgaaaagggcgaacccgcagtccttgaaccaggcatgctcgtggaggggcccccaggtcccgaaggccccgccggcctgattggcccacctggaattcaaggcaaccctggccccgtgggcgaccccggtgagcgggggcccccaggccgggccggcttaccaggatcggatggagctccaggcccgcccggcacctcattgatgctccctttccgcttcgggagcggcggcggtgataagggacctgtggttgctgcccaagaggcccaggcacaggcgattctccagcaagccagactcgccctgcgcggacccccaggtcccatgggatataccggaagacccgggccacttggacaacccggatcccccggcttaaaaggcgaatccggggaccttgggccacagggaccaaggggaccgcagggcttaacggggcctccaggcaaggctggccgaagagggagggctggtgccgatggcgccagagggatgcctggtgaccctggcgttaaaggggaccgcggcttcgacggactacccggactgccgggcgaaaagggccacaggggcgacacaggtgcacaaggcttgcccgggcctcccggcgaagatggtgaacggggtgacgacggggaaattgggccccggggactgccaggggaatctgggccacgaggcctattgggtcctaagggccctccaggaatccccggccctccctag

SEQ ID NO: 232561 - DNA, 1875 bp, Artificial Sequence
  derived and/or modified sequence
atggagcggtgcagccggtgccaccggctgctgctgctgctgcccctcgtgctgggcctttccgccgctccaggttgggcaggagcaccccccgtagacgtgctcagagctctccgatttccaagcctcccagatggggtgaggcgggccaaggggatttgtccagcagatgtggcttacagggtcgcccgtcctgctcagttaagcgcaccgacccgccagctctttcctggaggatttccgaaggacttttctttgcttacggtggtgagaacgaggccgggtttgcaggcgcccctactcaccttgtactccgcacagggtgtgcgacagctggggctggagctgggtccccccgtgaggttcctttacgaggatcagaccggcaggccccaaccacccagtcagccagtgttccgcgggttgagtctcgccgatggaaagtggcatcgtgtagccgtcgcagtaaaaggtcaatccgtgactctcatagtcgattgcaagaagcgggtgaccagacccttgcccaggagcgcacgacctgttctggacacacatggagtgatcatattcggcgcaaggatccttgatgaggaggttttcgagggggacgtacaggagctggcaatcgtacctggggttcaagctgcctacgagtcttgtgaacagaaagaactggagtgtgagggaggtcaaagggagcgacctcagaatcaacaaccacacagggcccagcgttcccctcagcaacagccatcaaggctgcatagaccccagaaccaagagcctcagagtcagcctaccgaaagcctgtactacgactacaaaccaccatactatgacgtgatgactaccggaacaacacccgattaccaggaccctactcctggcgaggaggaggaaatcctggagtctagtttgctgccacccttagaagaggagcagaccgaccttcaggtgccaccaactgccgacaggtttcaggccgaggaatatggcgaaggcgggaccgaccccccagaaggcccttacgattacacatacggttacggagatgattatagggaggagaccgagctaggccctgccctttcggccgaaacagcccactccggggccgccgcgcacgggccccggggccttaagggagagaaaggagagccggccgttctggagccaggcatgttagtcgaaggtcccccaggaccggaagggcccgctggcctgatcggtccgcctgggatccaaggaaaccctgggcccgtgggagatcctggcgagagaggaccccccggccgagctggtcttccaggctcagacggcgctcctgggccccctgggaccagtcttatgctgccgtttagattcggaagtggcggcggcgataagggaccggtggttgcggcacaggaagcccaggcacaggccatactccaacaggcccgcttagccctacggggaccccccggccctatgggttacacaggtaggcctggaccactcggccagccgggatccccagggctgaagggcgagagcggggatctggggcctcagggcccacgcgggccgcaaggactcacgggcccccctgggaaggcgggccggcgcggtcgcgctggtgccgacggagctagaggaatgcctggagaccctggggttaagggtgatcgtggattcgatgggctaccaggtctcccaggtgaaaaaggccaccgcggggatacgggcgcccagggcctccccggtccaccgggggaagatggcgagcgcggcgatgatggggaaattggtcctcgcgggctgccgggcgaaagcgggccgagaggcttgcttggtccaaagggtccaccaggcatcccgggacctccctag

SEQ ID NO: 232562 - DNA, 1875 bp, Artificial Sequence
  derived and/or modified sequence
atggagcggtgcagccggtgccaccggctgctgctgctgctgccccttgtcctgggcctgtccgcagccccaggatgggcaggagctccacccgtcgatgtgttacgtgccttgcggttccccagtttacctgatggtgtcaggcgcgctaaggggatttgcccagctgacgtagcctatagggtcgccagacctgcacagttgagcgctccaacacggcagctctttcccggcggcttccctaaagacttcagcctgttgaccgtggtacgcacaaggccgggtctgcaagcgcctctgctgactctttatagtgcccagggagtcaggcagctgggcttggaactaggccgccctgtgcgattcctgtatgaggatcagacagggagacctcagccccctagtcaacctgtgttcagaggcctcagtcttgctgacgggaaatggcacagagttgctgtggccgtgaaaggccagagtgtcaccctcatcgtggactgcaaaaaaagggtgactcgccctctccctcgttctgccagaccagtgctggacacccacggggtgattatctttggggccagaatactggatgaggaggttttcgaaggtgacgtccaagagttagcaattgtccccggagtgcaagcagcttacgaatcctgcgaacagaaggagttggaatgcgagggcggtcaaagggaaagacctcagaaccaacaaccacaccgggcacagagatcaccccaacagcagccaagccgtctgcaccgtccccaaaatcaagaacctcagtcccagcctaccgaaagtctctattatgattacaaacccccatactatgatgtcatgacaactggaaccacccccgactaccaggatcccactcccggggaagaggaagaaattctggaatctagcctgctgccccctctcgaggaggagcagactgacctgcaggtgccaccaacggctgatcgtttccaagccgaagagtacggcgaggggggtacagaccccccggagggcccctacgattatacatacggttacggcgatgactacagagaggagactgagttgggacccgcactaagcgctgagaccgcgcactcaggggctgccgcacatgggccccgtggtctgaagggcgaaaagggcgaacctgcagtcctggaacccggtatgctagtcgaaggaccgcctggtcctgagggcccagccggtctgattggacctcctggcattcaagggaacccgggcccggttggcgatccaggggaacggggtcctcccgggcgtgctggcctgcctgggagcgatggagccccaggccctccgggcacatccctgatgctgccattccgctttggctccggtggtggtgataagggccccgtcgtggccgctcaagaagcccaggcccaggccatcctgcagcaggcaagactcgccctgaggggacctccaggtccgatgggatacactgggcgtcccggccccctcggtcagcccgggagccccggcttgaagggtgaatctggagacctcggcccacaagggcctcggggtcctcagggcctgaccggccctccaggcaaggcagggagacggggacgggcaggggctgatggtgcaaggggaatgccaggagaccccggtgtgaaaggagaccgcggctttgacggtctgcccggcttgcccggtgagaaaggacacaggggcgacaccggcgcacagggtctccctggtcctccaggcgaagatggggaacgcggggacgatggggagattggtcccaggggcctcccaggcgagtctggccccagaggactgttgggcccgaagggtcctccaggtattcctggaccgccatag

SEQ ID NO: 232563 - DNA, 6347 bp, Artificial Sequence
  derived and/or modified sequence
cacacagaagcggcagccaccgaggagggagcagtgccgggagccccgacggcgccttgctgcatggagctgggccgctgacagctgtcgctgcccgcagcctctgacctccctgggaccccggcgtctgaggctcatagtctgctccctgtcttctgtcagcctcagggcatccagcgtctcaggccgacctgggtccctgggacccggcgtttcggcttctcagccatggagcggtgcagccgctgccatcgcctcctcctcctcctacctctggtgctggggctgagcgcggccccaggctgggcaggtgcaccccctgtggatgtgctccgggccctgaggttcccctccctccctgatggtgtccggagagcgaaaggcatctgtccagctgatgtggcctaccgagtggcacgacctgcccagctcagtgcacccactcgccagcttttcccaggaggatttcccaaagatttctctctgctgactgttgtccggacccgccctggtctccaagctcccctcctgactctctacagtgcccagggtgtccgacagctgggcctggagctgggccgacctgtccgcttcctgtatgaagaccagactgggcggcctcaacctccctctcagccagtcttccgaggcctcagcctagcagatggcaagtggcaccgtgtggctgtggctgtgaagggccagtctgtcaccctcattgttgactgcaagaagcgagtcacccggcctctcccccgaagtgctcgtccagtattggacacccatggagtgatcatctttggtgcccgtattctggatgaagaagtctttgagggtgatgtccaggagctggccattgtcccaggggtccaggcagcctatgaatcatgtgaacagaaggagctggaatgcgaggggggccagagggaaagaccccaaaaccaacagcctcacagagcccagagatctccacagcagcaaccatcaagacttcacaggccacaaaatcaggaaccccagagccaggaccccaccccaggtgaagaggaagaaatcctggagtcgagcctcttgccaccccttgaggaggagcagacagatctccaggtcccccccacagccgacaggttccaggcagaggaatatggggagggtggcacagacccccctgaagggccctacgattacacctatggctatggggatgattatcgtgaggagacagagcttggccctgccctctctgcggagacagcccactcaggagccgctgcccatggaccccgagggctgaagggagagaaaggagagcctgcagtgttggaacctggtatgctcgtggaggggccccctggcccagaaggccctgcgggattgattggtccccctggcatccaggggaacccaggcccagttggagaccctggagagaggggcccccctggccgagcagggctccctggatcagatggggctcctggtcctcctggcacatctctcatgctcccattccggtttggcagtggtgggggtgacaagggccctgtggtggcggcccaggaggctcaggcccaggcgatcctgcagcaggcgaggctggcgctccgtggaccccctggccccatgggatacacagggcgccctggacccttgggccaacctgggagccctggcctgaaaggagagtctggagacttaggacctcagggccccagaggacctcagggcctcacaggccctcctggcaaggctgggcgaaggggccgggcaggtgctgatggagcccgagggatgcctggagatcctggagtgaagggtgaccgaggttttgatggactcccagggctccctggagagaagggccataggggtgatactggtgcccagggccttcctggtccccctggtgaggatggagagaggggagatgacggggagattgggcctcgagggctgcctggagagtcgggacctcgaggtctccttggccccaaaggcccacctggtattcctggaccccctggcgtccgaggcatggatggtccccagggccccaaagggagcttgggaccccagggagagccaggacctcctggacaacagggcacccctgggacccagggtcttcccgggccccagggtgccatcggccctcatggagagaagggtcctcaagggaagccagggctccccggcatgcctggctcagacggacccccgggtcacccagggaaggaaggtccccctggaaccaaaggaaaccagggtccctctggacctcagggacctctaggatacccaggacctcgaggggtcaagggtgtggacggaattcggggtctgaagggtcataagggtgagaagggtgaggatggctttcctgggttcaaaggtgacataggcgtgaaaggtgacaggggcgaagttggagtccctggttccaggggagaggatggtcctgaggggccaaagggacgcactggaccgactggagaccctgggcccccagggctcatgggcgagaagggcaagctgggtgttcctggtctgcctggctatcctggacgtcagggacccaaggggtccctaggatttcctggctttcctggtgccagtggagagaagggagcccggggcctgtcggggaagtcagggcctcggggagaacggggccccacgggtccacggggtcagcggggaccccgaggtgccactgggaagtctggagctaagggaacatctggtggtgatggcccccatgggccccctggagagaggggcctccctggacctcagggtcccaacgggtttcctggaccgaaaggacccccgggcccccctgggaaggacgggctgccgggacacccaggccaaagaggagaagtgggtttccaagggaagaccggcccccctggtcctccaggagtggtgggacctcagggagcagcaggagaaaccggccctatgggggagagaggtcacccaggccccccggggccccctggagagcagggactacctgggacagctggaaaagaaggaacaaagggtgaccctggtccccctggggccccagggaaggatggtcctgctggtctgaggggattcccaggagagagaggcctcccaggcactgctggtggacctggtttgaaggggaatgaaggtccgtctggcccccctggccctgcaggctcccctggggaacgaggtgcagcaggatcagggggacccattggtccgccagggcgcccaggcccgcagggtccccctggagcagcaggagagaaaggtgtcccaggtgagaagggccccattggcccaactggccgagatggagtgcagggtcctgtggggcttcctggtcctgctgggcctccaggtgtggctggagaggatggagacaagggtgaggtgggggaccccggacagaagggcaccaaagggaacaagggtgaacatggccctcctggaccccctggacccattggtcctgtggggcagcctggagcagcgggagcagatggggagcctggagctcggggaccccagggacactttggagccaaaggtgatgaaggaacaagaggattcaatgggcccccaggacccattggcctacagggtttgccaggcccctctggggagaagggagaaacaggagatgtgggtcctatgggaccacctggccccccaggacctcgaggtccagctggacccaatggcgctgatggcccacaaggtcccccaggaggtgttgggaacctgggtccccctggagagaagggggaaccaggagagtcaggatctccagggatccagggcgagccaggtgtcaagggtccacgcggggaacgtggagagaaaggagagtcggggcagccaggagagccagggccaccagggcctaaaggccccacaggcgatgatggccccaaagggaaccctggtcctgttggttttcctggtgaccctggcccccctggagaaggtggccctcggggccaggatggtgctaagggtgaccgaggcgaggatggtgagccaggacagcctggatcccctggtcccaccggggagaatggacccccagggccacttggaaagcgaggtcctgctggctcgcctggttccgaggggcgacaaggagggaagggagccaagggagatcctggcgctataggtgccccggggaagacaggcccggtgggtcctgcaggcccagcagggaaacctggccctgatggtctgagggggctcccaggctcagtgggtcagcaaggccgacctggagctacaggccaggctgggcccccaggtcctgtgggacccccagggctgcctggtctccggggcgatgctggagccaagggagagaagggccacccaggtctcattggactgattgggcccccgggtgagcagggagagaagggagatcggggacttcctgggcctcagggctcccctgggcagaagggtgagatgggtatcccaggagcatccggccccattggtcctggaggtccccccggcctccccggacctgctggccccaaaggagccaaaggagccacaggcccaggcggacccaagggagagaagggtgtgcagggccctccaggacacccgggtcccccaggcgaggtgatccagccactgcccattcagatgcccaagaagactcggcgctcggtggatggaagccgtctgatgcaggaagatgaggccataccgaccgggggagcccccggcagtcctggggggctggaggagatctttggctcactcgactccctgcgggaggagatcgagcagatgaggcggccaacagggacccaggacagccctgctcgcacctgccaggacctgaagctgtgccacccagagcttcccgatggagagtactgggtcgaccccaaccagggctgtgctcgggatgccttccgagttttctgcaacttcacagcagggggtgagacctgtgtgacgcctagggatgacgtcacgcagttctcttacgtggactcagagggctccccagtgggtgtggtccagctcaccttcctgcggctgctcagcgtctcagcccaccaggacgtctcctacccctgctctggagcagcccgtgacggtcccctgagactccgtggggccaatgaggatgagctgagcccggagactagcccctatgtcaaagaattcagagatggctgccagacacagcaaggccggacggtgctggaggtgcgaacgcctgtgctggagcagctgccagtgctggatgcctccttctcagacctgggagccccaccgaggcggggaggggtgctgctggggcctgtctgcttcatgggataggaccgtctctgtctgatcctgtccattcggaaccaggcccacctggaatcccacaacatcagctctgtgccacctcccaagagggctcctcactatctagggagccctgggccagggcgtggagagccctcagtcggggcaggccaggggaggggtgaagtggttgcctggacaccccacgggaggagtggcatctggggctcttggccctcccacctggagcctgttacccgttagagagctgagacccttatttaaaactcacctcccaatcaccccaaacaaatggaagagaagagaaaggacatggcgtattttgtatttaaaagtaattgtattaattatttaaagtgtggaaagcaaaataacaaaaaagagaaacgccaacaaaaatcagcagatgttgaagacaggggtctcgggggtgggctccggcacccacatcctggagtcaggactttcctcagtgactgtgtgtaggggggtttcagggctgaaccccacctccctcccaccttcctcccacctcacctgtcgcacccactgtgaaagttggaatatgtggtctccctggcctcagggctctgactctgccagggtggggctctctaacccacaggtgttggctgcctggcccatgtgcccactgtctcttccacttggtctgggtttggcaggcactgcctgctacttgagggccaggatgctcccccagggaagaaacggaatagtgtggggtgtgtgcagggctgcatcccgcagatggctggaatattaaaattcttctatattggctggtaaattgccatggccctgagccactgagtatgttcattgccacccctgtccctcccctgggcacccctcactttccctgatcctgcaattaaagggttaatgtgtggcatatggaagggactcccaggaccctgtgcccagcttccatgctgactgatggttaaataatgtgattgtctcctcccagg

SEQ ID NO: 232564 - DNA, 1875 bp, Artificial Sequence
  derived and/or modified sequence
atggagcggtgcagccggtgccaccggctgctgctgctgctgcccctagtgctggggctcagcgccgccccggggtgggccggcgcaccccctgtcgatgtgttgcgggccctgcgcttcccttcccttccagatggagtgagacgagctaagggcatttgccctgcagatgtggcctaccgagtcgcccggccagcccagctgtctgcgcctacccggcagttattcccggggggctttcccaaggatttttctctgctcaccgtggtgcggacccgccctggactgcaggcccctcttctgaccctgtatagcgcccaaggcgtcagacaactgggtctcgaacttggacgacctgtgcggtttctgtatgaagatcagacggggagacctcaacctcccagtcaacccgtgttccgggggctgtccctcgccgacggaaaatggcaccgtgtggccgttgccgtcaagggccagagtgtgactctcattgtcgattgcaaaaagagagtgacccggccgctccctcggagcgcacgtcctgtcctcgacacccatggagtcattatatttggtgcaagaatcctggatgaggaagtgttcgagggcgacgtgcaggaactcgcaattgtacccggggttcaggccgcatatgaatcttgtgaacagaaagaactggaatgcgaaggcggccaacgagaacgcccgcaaaaccagcaacctcatagagctcagagatctccacagcaacagccctcacgcttacatagaccacagaatcaggaacctcaatcccagccaacagaatctctgtactacgattacgaacccccctattacgacgtgatgactactggcaccactccagactaccaggaccctacacctggggaagaggaagagatcctggagtcgagtcttctccccccgctggaggaggaacagacagacttgcaagtgcccccaacagccgaccgctttcaggccgaggagtacggtgaaggcggaacagacccaccagaagggccctacgattacacatacggttatggcgacgactacagagaggaaaccgagctgggccctgccctatccgctgagaccgcccactcaggggccgcagcccacgggccacggggactcaagggcgagaaaggggagcccgccgtgcttgagccggggatgctcgttgagggccctccaggccccgagggacctgccggcctcatcggcccccctggcatccaaggtaacccaggccctgtaggagaccccggcgagcgcggtccacccgggcgtgccggactgccagggagcgacggtgcccccggtcctcccggcacgagcctcatgctgccatttcgctttggcagcggaggtggggacaaggggccggtagtagcggctcaggaggcccaagctcaggccattttacagcaggcaagactggcattgcgaggcccccctgggccaatggggtatacgggacgccctggacccctcggccagcctggcagtcctgggctgaagggggagagtggggacctaggaccgcagggacccaggggcccccaaggtttgaccggcccccctgggaaggccggccgccgggggcgggccggcgcagacggagctaggggtatgcccggcgatcctggggtgaaaggggatagaggattcgacggactgccgggactacccggggagaagggtcataggggagacactggggctcagggcttgccaggtccacccggagaggatggcgagcggggggatgatggcgagattggccctagaggcttgcccggagaatctgggcctcgtggactgctgggacccaaaggcccaccgggtatccccgggccgccgtag

SEQ ID NO: 232565 - DNA, 5070 bp, Artificial Sequence
  derived and/or modified sequence
atggagcggtgcagccggtgccaccggctgctgctgctgctgcccttggtgctcggactatcggccgcccctgggtgggcgggagcaccacctgtcgatgttcttcgagctctgcggttcccatctctgcctgatggcgtgcggagggctaagggcatttgtcccgccgacgtcgcttacagggtggcaagacctgctcagctcagcgctcctacacgtcagctgttcccagggggatttcccaaggatttctccctgttaaccgttgtccggactaggcctggcctccaggccccattgctcaccctatattctgcccagggagtccgacaactggggctagagctaggcccccctgttagattcttatacgaagatcaaacaggcagaccacagccgccgagtcagccagtcttccgcggcctctccctggccgatgggaaatggcatcgcgtggccgtcgccgtgaaggggcagtctgtgaccctgatcgtagactgcaagaagagagtcactagacctcttcctagatcagctcgtcctgtgttggatacccatggggtcatcatattcggggcgcgcatccttgacgaggaggtgtttgagggtgacgtgcaggagctggcaattgttcctggcgtgcaggccgcatatgagagctgtgagcagaaagaactagagtgcgagggtggccagcgcgagaggccgcagaatcagcagccccacagggcacagagatctcctcaacagcagccatccaggctacaccgcccccaaaatcaggagccccaatctcaagagcagacggacctccaagtccctcccacagccgaccgcttccaggctgaagaatatggggaaggcggaacagaccctcctgaggggccctacgattacacgtacggctacggagatgactaccgggaagagaccgaactgggtcctgctttaagcgctgagacagcccattcaggagccgccgcccatggtcccagaggactcaaaggagaaaaaggagaaccagctgtcctggagcctggcatgctggttgagggtcctccaggacctgagggccccgctgggcttattggtccaccaggcatccagggcaaccccggcccagttggcgatcctggtgagcggggccctccaggtcgagctggccttccagggagtgatggagctcctggcccgccagggacctcgttgatgttaccgtttaggtttggatcaggggggggtgacaagggtcctgtggtggccgctcaggaggcacaagcccaggctattctccagcaggcgcgtcttgccctgagaggcccacctggaccaatggggtacaccggcaggccaggtcccctgggtcagcctgggtcaccagggctgaaaggtgaatccggggatttgggcccccagggccccagggggcctcagggcttgaccgggcccccgggaaaagccggtaggcgaggtagagcaggggccgacggcgcacgtggaatgccaggggaccccggggtcaagggcgaccggggcttcgatggattgcctgggctccccggcgagaaagggcatagaggagatacaggtgctcaagggctgccgggacccccaggtgaggatggagagcgaggtgacgacggcgagataggcccccgtggcttgccaggtgaatcaggaccgcgtggcctcctgggacccaaaggacccccaggcattcccggcccacctggcgtacggggcatggacggcccccagggacctaaaggtagcctcggaccacaaggcgaacccggaccccccggccaacagggcactccaggtacccagggcctgcccggacctcaaggcgctatcggcccacatggagaaaaggggccacagggcaagcctggattgccaggaatgccaggctccgacggaccccctggacatcccgggaaagagggcccccctggcacaaagggcaaccaggggccatcagggccccagggcccactgggctatcccggccctagaggcgtcaaaggggttgacggtataagaggtctcaaaggacacaagggcgagaaaggtgaggacggctttcctggcttcaagggggacatcggcgttaaaggagatcggggggaagtcggcgtgcccggctcccgcggggaagatggcccggaagggccaaaaggaaggacaggcccaacgggcgacccagggcccccggggttgatgggggagaagggaaagctgggggtacctgggctgcctggctatccaggtcgacagggcccaaagggatctctcggatttcccgggtttcccggcgcgagcggcgagaaaggcgctaggggcctgagtggaaagtccgggcctcgaggggaacgcgggcccaccggtccgcgcggccagaggggcccccggggcgccactgggaaaagcggggccaaaggtacaagcggaggggatgggccacatgggcctccaggagagcgcggtctcccaggtcctcagggtccaaatggttttcctgggccaaaaggtccccccgggcctccaggcaaagatggtctgcccggacaccctggacagagaggcgaagtcgggtttcaaggaaaaaccggcccaccagggccacccggcgtggttgggcctcagggtgctgccggtgaaacaggcccaatgggtgaacggggacaccctggaccacccgggccaccaggtgagcaaggtctgcccggcacggctggtaaggagggtaccaaaggcgaccccggaccgccgggagccccgggtaaggacgggccagccgggttgagaggctttccaggcgaacggggactcccaggcaccgctggaggccccgggctcaaaggtaacgagggtccctcgggccctcccggcccagccgggtcaccgggggagagaggggccgcaggctctggagggcctattggccctcccgggcgcccaggaccacaggggccgccaggggcggccggcgagaagggcgtccccggagagaagggcccaatcggacctaccggccgcgatggggtgcagggccccgtgggactacccgggccagcaggccctcccggagttgccggagaagatggagataagggtgaggtgggcgatcccgggcaaaagggcaccaaggggaacaagggcgagcacggacctccgggacctcctggccccataggccctgtcggacagcctggggctgccggggctgacggagagccaggtgccaggggcccccaaggccatttcggcgccaaaggtgatgagggtacacggggctttaatggacctcccggccccatcggactgcagggtctccccggtcctagtggagaaaagggagagaccggcgatgtggggccaatgggcccacctggacctccaggccccagaggccccgccgggccaaatggcgcggatggaccacaggggcctcctggcggagtgggcaaccttgggccgccgggggagaagggagagccaggcgagtccggaagccctggcatccaaggggagcccggcgtgaaggggcctcgcggggaacggggtgaaaaaggcgagtccgggcagcccggcgaacccggacctcctgggccgaaggggcctactggcgatgacggccccaagggcaatccgggacccgttgggttcccaggagatcctggtccccctggcgaaggggggccaagaggccaggacggggccaaaggcgacagaggcgaagacggggagcctggtcagccagggagccccggcccgacgggagaaaacggtcctcctggccccctcggcaagaggggcccggccggatcccctggctccgagggccgccaaggcggcaagggagccaaaggggatcctggagcaatcggggctccagggaagaccggaccggtcggacctgccggaccagctggtaaaccgggcccagacggcctgcgagggctgcccggcagcgtgggccagcagggaagaccaggggctaccgggcaggccggccctccaggtcctgtgggacctcctgggctccccgggctcaggggcgacgctggcgccaagggggagaaagggcatcccgggctgattggcttgattgggccgcccggggagcaaggggagaagggtgatcgcggcttacccgggccacagggatcacctgggcagaaaggggaaatgggcatccccggcgcctcgggtcctatcggacccggtggtcctccaggactaccaggtcctgctggaccaaaaggggcgaaaggcgcaacaggtcccgggggtcccaagggggaaaagggagttcaggggcctcccggacaccctggtcctccaggggaggtcatccagccattgcctatccagatgccaaagaaaaccaggcgttccgtggacggaagcagactcatgcaggaagatgaagcaatccctaccggcggagccccaggctcgcccggaggtctggaggagatattcgggtctttagacagtcttcgcgaggagatcgagcagatgaggaggcctactggcactcaagactcccccgcccggacatgccaggatctcaaactgtgtcaccctgaactgccagatggagaatactgggtggatcctaaccagggatgtgcgcgcgatgcatttagagtattctgtaatttcaccgcagggggagagacatgcgttactccaagagatgatgtcacccagtttagttatgtggattccgaaggaagcccagttggggtagtccagctgaccttccttcggctgctgagtgtgtctgctcatcaggatgtctcttacccctgctccggcgctgcaagagacggcccactccgcctgaggggggcgaacgaagacgagctttcccctgagacctcaccttatgttaaggaatttcgggacggctgtcagacacaacagggccgaacagttctcgaggtgagaacccccgtgttggaacagttacctgtccttgatgcctctttcagcgatctcggagctcctcccagaagaggcggcgtgctgctgggccccgtgtgtttcatgggctag

SEQ ID NO: 232566 - DNA, 5133 bp, Artificial Sequence
  derived and/or modified sequence
atggagcggtgcagccggtgccaccggctgctgctgctgctgccccttgtgctgggcctgtcagcggcgcctggatgggcaggagctccgcctgtggatgttctacgggccctcaggttcccatcattacccgatggagtgaggcgcgccaagggcatctgccccgcagatgttgcttatcgggtcgctcgtccagcccagctgagtgctcccacccgtcagctgtttccaggtggctttcccaaggatttttctctgctgacagtcgtgcgaactcgccccgggttgcaggccccactgctcacgctctactcagcgcaaggagttaggcagctgggactggaattgggaccaccagtcaggttcttatatgaagatcagacaggcagaccacagccaccgtcacagccagtctttagaggattgtcgttggcagacggaaagtggcatagggtggcggtcgctgtaaagggacaatccgtgacactgattgtggactgtaagaagcgagtcacccgcccgctgccccggtcagcacgccctgttctggatactcatggcgtgatcatctttggtgctcgcatcttggatgaagaagtgtttgagggtgatgtgcaggaacttgcgatcgtcccgggcgtgcaggccgcatacgagtcttgtgaacagaaagagctggaatgcgaaggaggccagcgtgagaggccccaaaaccagcaaccgcatcgcgcgcagcggtctcctcaacagcagccctcccggcttcaccgccctcagaaccaggagccccaatcacaagaccctacacccggcgaggaggaggagatcttggagtcaagccttcttccaccgcttgaggaagagcagactgacctgcaggtcccgcccacagcagacaggttccaggccgaggagtacggcgagggcgggaccgatcctccggagggaccgtacgactatacatacggatacggcgatgattatcgcgaagagaccgagctcggccctgctctctctgctgagaccgcccattctggtgctgcggcgcacggccctcgaggcctgaagggcgaaaagggagagcccgccgtgttagagcccggcatgctggtggagggtccccccgggcccgagggaccagctgggctcattggtccaccgggcatccagggcaacccaggaccggtaggcgatcccggggagagaggcccaccaggtcgggccgggctcccgggaagcgatggagcccctgggcctccggggaccagcttaatgctgccttttcggttcggaagtgggggcggagacaaaggcccagtggtggccgcgcaagaggctcaagcccaagctattctgcaacaggctaggcttgccttgagaggccctccaggtccgatgggctacaccgggaggcctggaccccttggccagccaggcagccccggccttaaaggcgaatctggtgacctgggtccacaaggccctcgcgggccacaggggctgacgggacctcctggcaaggctgggcggcgaggaagagcaggcgccgacggggctcgagggatgcctggcgatccgggagtaaaaggcgaccggggatttgatgggctgcctggactccccggcgagaaaggacatcgaggtgacaccggggctcaaggactgccaggcccccctggtgaggacggggaacggggtgatgacggcgagatcggccctcggggcctcccaggagagtccggcccccgcggcctgctgggcccaaaggggccacccgggattccaggcccccctggcgttagagggatggatggccctcagggtcccaagggttcgcttgggccgcagggagaacccggtcctccggggcagcagggtacccccggcacccagggactcccagggccccagggtgccatcgggccccacggcgagaagggcccacagggcaagcctgggttgccgggcatgcccggtagcgacggaccaccagggcaccctggaaaggagggtcctcctggaaccaaaggaaatcaggggcctagtggacctcagggtccactgggatatccgggcccacgcggtgtcaaaggtgtggacggcatcaggggactgaagggtcacaagggggaaaaaggagaggatggctttccaggatttaaaggcgatattggcgtgaagggcgacagaggagaagtgggagtacctggcagtcgcggtgaagacggccccgaaggaccaaaagggcgcaccggaccaacaggggacccaggacctccaggcctgatgggggaaaaaggaaagcttggggtgcctggcctccctggatatcccggtcggcagggtccaaaagggtccctgggctttccagggttcccaggggcctcaggtgaaaagggtgccagaggcctctcagggaaatcaggaccgcgcggtgagagaggaccgactggtccacgaggacaacgggggccccggggtgctacaggaaaatctggggcgaagggcacatcagggggggacggaccccacggcccacccggagagcgtggtcttcctgggccgcaaggcccgaatggatttcctggccccaagggccccccgggtcctccaggcaaggacgggctcccaggccatcctggtcagaggggagaggtaggattccagggcaagaccgggcccccgggaccacctggtgtagttgggccacagggggcagccggggaaacgggccccatgggtgagcgtggacaccccgggcctccaggaccaccgggcgagcagggcctgcctggaacagccggcaaggagggtaccaaaggtgaccctggaccaccgggcgcacctggcaaggacggccccgctgggctgcgggggtttcccggagaacgtggacttcccgggaccgccggcggccccgggcttaaagggaacgagggcccaagcggacccccagggcctgctggcagccctggcgaaaggggtgctgcgggatcgggcggaccaatcggcccgccagggagaccgggccctcagggccctcctggggccgccggggagaagggcgttcccggcgaaaagggtccaattgggccgaccgggagggacggtgtgcagggcccagtggggttgcccgggccagcagggccccccggtgttgctggagaagatggcgacaagggagaagtgggcgacccgggacagaagggcacaaaaggaaataagggagagcacgggcctcctggtccaccgggacccatcggccctgtcggtcaacctggggccgctggagccgacggggagccgggagcaagggggcctcagggccacttcggtgccaagggcgatgagggtacacgcggatttaacgggccccctgggccgattggcctgcagggtctgccgggaccaagtggcgagaagggcgagactggcgacgtgggtcccatgggccccccgggtcctccaggaccacgagggcctgctgggcccaacggagcggacggaccacaggggcctccaggaggagttggcaatctgggccctccaggagagaagggcgagccgggtgaatcaggcagcccagggatccagggggagccaggagttaagggtccccggggagaaagaggagagaaaggagagtctggccagcccggggaacccggccccccaggtccaaaaggacctacgggcgatgatggcccgaagggtaaccctgggccggtcggattcccgggagaccctggtccacccggggagggaggaccacgtggacaggacggtgccaagggcgaccgaggggaggatggcgaaccaggacagcctggttcacccgggcctactggtgagaatggcccacccgggcctctgggcaaaagagggcccgctggctcacccggttcagaaggaaggcaggggggtaaaggggcgaaaggggacccgggcgccataggcgcgcctggaaagacaggcccagtcggccccgcgggcccagctgggaagcccggacctgatggcctacggggacttcccggctctgtcggtcagcagggacgccctggcgccacggggcaggcaggcccccctggccccgtcggaccacccggcctccctggcttaaggggcgatgccggagctaaaggtgagaagggccaccccggcttaatagggttgatcgggcctccaggagagcagggagagaagggggatagggggctcccgggcccacaaggttcccctggacagaaaggcgagatggggatcccaggagccagtggtcccataggtccggggggaccacctgggctccctggccctgctgggccgaagggagcaaagggcgctacaggcccaggcggaccgaaaggcgagaaaggcgttcagggacctcccgggcatcctgggccgcctggtgaagtaatccagcctctccccatccagatgcctaaaaagactaggaggagcgtcgatggcagtcggctgatgcaggaagacgaggctattcccacaggcggcgccccgggctctcctggtggcctggaggagatttttggttcccttgactcgttacgcgaggagatcgaacagatgcgccggcctactgggacccaggactcccccgctcgaacctgccaagacctgaaactctgccaccctgaactgcccgacggagagtattgggtggatccaaatcagggttgcgctcgtgatgctttcagagtgttttgtaatttcacagccggcggagaaacctgcgtcacaccaagagacgatgtcacccagttctcgtacgtggattcagaggggtctccggtcggtgtggtgcagctgacctttttgcgcttgctgtccgtctctgctcaccaagacgtgtcttacccctgcagcggtgctgcccgggacggccctctgcgcttgcgcggtgcgaatgaagatgagctcagccctgagacatcgccttacgtgaaggagtttagagacggttgccaaactcagcagggacggacagttctcgaggtacggactcccgttctggaacagctgcctgtgctggacgcttcgttctccgaccttggagcgcccccaaggagagggggtgtcctgctgggacccgtctgcttcatggggtag

SEQ ID NO: 232567 - DNA, 5148 bp, Artificial Sequence
  derived and/or modified sequence
atggagcggtgcagccggtgccaccggctgctgctgctgctgcccctcgttctggggttatcggctgcgccaggatgggctggagcacctccagtggacgtgctccgagcactgcgcttcccatctctccccgacggcgtcagacgagccaagggcatttgtcccgcagatgtggcgtatagagtcgcgcgaccagcacaattatccgcccccacacgccagctctttccggggggcttccccaaagatttctctctcctgaccgtggtgcgtacccgtcctggcttgcaggcaccgcttttgacgctgtattccgcacaaggggtgaggcagctgggactggagctaggaagacccgtaaggttcctatacgaggaccagaccggtcggcctcaaccacccagccaaccggtgttccgaggcctgtcgcttgcggatggtaaatggcatcgggtggccgtcgccgtgaagggacagtcagtcaccttaatcgtggattgtaagaaacgcgtgacaagaccactgcctagatccgctagaccagtgctggacacacacggggtcatcatttttggcgcccgcatcctagatgaagaagtctttgagggagacgtccaggagctggctatcgtccccggggttcaggcagcgtatgaatcatgcgaacagaaagaactcgagtgcgaggggggccagcgcgagaggccacaaaatcagcagccacatagggcacagcgcagtccccagcagcagccttcccggctacaccggccccagaaccaggagcctcagagccaacccactgagagcctgtactacgactatgaacccccctattacgatgttatgaccacaggaaccactcctgattaccaggagcaaaccgatctgcaggtgccgccaacagcagatcgttttcaggctgaggaatatggggagggcggaacagaccctcccgagggcccctacgattatacctatgggtatggggacgattatagagaggagactgagttgggccctgccctctctgccgagacagcccactctggagctgccgcccatggaccgagggggttgaagggcgaaaagggcgagccagccgtattggaaccaggcatgctcgtagaggggcctccgggcccggaagggcccgccggcctcatcggacctccaggtatccaaggcaacccgggccccgtgggcgacccaggggagagagggcccccgggcagggccggcctccctgggagtgacggcgcccccggaccacccgggacttcattgatgctgccattcaggtttggcagcggcggtggtgataagggccccgttgttgctgctcaggaagcacaggcacaggccatcttacagcaggccaggctagcattgagaggaccgcccggccctatgggctacacaggccgtcctggtcccctgggacaaccagggagcccgggtcttaagggggaatctggggatctgggcccccagggaccgcgagggccacagggcctgaccggcccacccggaaaagccgggcggcggggccgggcaggggccgacggcgcccggggtatgcccggggaccctggggtgaaaggggatcggggtttcgacggactccctggcctaccgggcgagaaaggccaccggggagatacaggggctcaaggactgcctgggccacctggggaagacggagaaaggggagacgatggagagattgggccacgcggtctcccgggtgaaagcgggccaaggggactgctgggaccaaaggggccaccaggcatccctggtccgcctggggtgcggggtatggatgggccccagggccccaaggggtccttgggacctcagggagaaccgggtccacctgggcagcagggaacaccgggcacccagggtctccccgggcctcagggagccatcggaccccatggcgagaaggggccgcagggtaagccaggattgcccggtatgcctggctctgacggtccgccaggtcaccctggtaaagaagggccccccggtactaagggaaatcaaggaccttcaggaccacaagggccattgggctatcccggcccaagaggtgtgaaaggcgttgacggtatccgtggcctgaagggccacaaaggcgagaaaggcgaagacgggtttcctggttttaagggtgacatcggcgtcaagggcgacagaggagaagtcggggtgcctggctcaagaggcgaggacggtcctgagggtcctaaaggccggactggccccactggggacccaggaccaccaggacttatgggggagaagggcaaactgggcgtcccaggactccccgggtatccaggtaggcagggccctaagggcagtttaggcttccccggttttcctggggcgtctggagagaagggagctaggggcctgagcggtaaaagcggacccagaggagagcgtgggccgactggcccaagaggccagcgaggcccacgcggtgctaccggtaaaagcggagccaagggaacaagtggcggtgatgggccccatggaccccccggcgaacgaggcctgcctggtccccagggacccaacgggtttccaggtccaaaagggcctttggggccccccggaaaggacggactgccaggacacccaggccagaggggtgaggtgggcttccaaggaaagacaggacctccagggccgcctggggtagtggggccccagggggccgcaggcgaaaccggccctatgggtgagcgcggacatccaggaccgccagggccacccggcgaacagggcctccccggtacagctggaaaggagggaactaaaggcgacccaggcccccccggagcacccggtaaggacggccctgccggactccgaggcttcccgggagaaagagggctgccagggactgctggcggacccggccttaaaggtaatgagggaccctcaggaccaccaggccccgccggatctcccggggaacgtggtgctgcaggctcaggtggccctatcggacccccgggcagacccgggccacagggacctccgggtgccgcaggagaaaaaggcgtgccaggcgaaaagggccctatagggcctactgggagagatggcgtccaggggcccgtgggcctcccaggtcccgcgggtccacctggcgttgccggagaggacggcgacaagggtgaggtaggcgatccaggccagaaagggactaaaggtaataaaggagagcatggcccgccaggcccacccggcccaataggaccagtgggtcagcccggcgccgccggggccgatggtgaacctggagcacgcgggcctcaaggtcattttggcgccaagggggacgagggcacaaggggattcaatggaccgccaggtcctattggactgcaggggcttcctggacccagtggcgagaaaggggaaacgggcgacgtggggcctatgggaccgcccgggcctccaggcccacggggccccgccggccccaatggggcagacggacctcaggggccgcccggaggcgtcgggaatctgggaccgcctggtgagaaaggtgaaccgggggaaagcgggagtcctggcatacagggagagcccggagtcaagggcccacgtggagagaggggggagaaaggggagagcggacagcctggcgagcccgggccccccggaccaaaaggtcccaccggcgatgatgggcccaaaggcaatcccgggcccgtcggatttcccggagaccctggaccgcctggggagggtggtcccagagggcaggacggcgcaaagggagatagaggcgaggacggggagcctggccagcccggttccccgggtcccacaggagagaatggccctccaggaccactcgggaaacgagggcccgcagggtcaccaggttctgagggtcgccagggaggaaagggtgccaaaggagaccctggagcaattggcgctcctggtaagacgggcccagtcggcccggctggtcccgctggcaagcctggtcccgatggattgcgcggcctaccagggagtgtaggtcagcagggcaggccaggtgcaacagggcaggcaggtcccccaggtcctgtagggcctcctggtcttccaggcctgcgcggtgacgccggcgctaaaggcgagaagggccaccctggcctcatcggacttatcggccctccaggggaacagggagagaagggcgaccgtgggttaccgggtcctcaaggctcccctggtcagaaaggggaaatgggaattcccggagcttctgggcccatcggtccgggcggccctcccggactgcctgggccagccggaccaaaaggggctaagggcgctaccggtcctggcggccccaaaggcgaaaagggggtacaaggccctcctggccacccggggccccccggggaggttattcaacctctgccaattcaaatgccgaagaagacacgacgtagcgtcgatggatccagactcatgcaagaggacgaggctatcccaactggcggcgctccaggatctcccgggggattagaggaaatcttcggctcattagactctctccgtgaggaaatcgagcagatgcggcgaccaacaggcacacaggattctccggctcggacttgccaggacctgaaactgtgtcaccctgaactaccagatggcgaatactgggtggatcctaaccagggatgcgcccgggatgcttttagagtcttttgcaattttacggctgggggggagacctgcgtaacccctagagatgatgtcactcagttctcctatgtagattctgagggcagtcccgtgggtgtggtgcagcttaccttcctgcggctgttgtctgtgagtgcccaccaggatgtcagctacccctgctccggggccgctcgcgatggcccattaagactgaggggcgccaatgaggacgagttgtctcccgagacaagcccttatgtcaaagagtttagggacggctgtcagacccagcaggggaggaccgtcctggaggtgaggacgccagttcttgagcagctccctgtgctcgacgcttccttctccgacctgggagcaccacccagacgtggcggggtcttattgggcccggtctgctttatgggatag

SEQ ID NO: 232568 - DNA, 6347 bp, Artificial Sequence
  derived and/or modified sequence
cacacagaagcggcagccaccgaggagggagcagtgccgggagccccgacggcgccttgctgcatggagctgggccgctgacagctgtcgctgcccgcagcctctgacctccctgggaccccggcgtctgaggctcatagtctgctccctgtcttctgtcagcctcagggcatccagcgtctcaggccgacctgggtccctgggacccggcgtttcggcttctcagccatggagcggtgcagccgctgccatcgcctcctcctcctcctacctctggtgctggggctgagcgcggccccaggctgggcaggtgcaccccctgtggatgtgctccgggccctgaggttcccctccctccctgatggtgtccggagagcgaaaggcatctgtccagctgatgtggcctaccgagtggcacgacctgcccagctcagtgcacccactcgccagcttttcccaggaggatttcccaaagatttctctctgctgactgttgtccggacccgccctggtctccaagctcccctcctgactctctacagtgcccagggtgtccgacagctgggcctggagctgggccgacctgtccgcttcctgtatgaagaccagactgggcggcctcaacctccctctcagccagtcttccgaggcctcagcctagcagatggcaagtggcaccgtgtggctgtggctgtgaagggccagtctgtcaccctcattgttgactgcaagaagcgagtcacccggcctctcccccgaagtgctcgtccagtattggacacccatggagtgatcatctttggtgcccgtattctggatgaagaagtctttgagggtgatgtccaggagctggccattgtcccaggggtccaggcagcctatgaatcatgtgaacagaaggagctggaatgcgaggggggccagagggaaagaccccaaaaccaacagcctcacagagcccagagatctccacagcagcaaccatcaagacttcacaggccacaaaatcaggaaccccagagccaggaccccaccccaggtgaagaggaagaaatcctggagtcgagcctcttgccaccccttgaggaggagcagacagatctccaggtcccccccacagccgacaggttccaggcagaggaatatggggagggtggcacagacccccctgaagggccctacgattacacctatggctatggggatgattatcgtgaggagacagagcttggccctgccctctctgcggagacagcccactcaggagccgctgcccatggaccccgagggctgaagggagagaaaggagagcctgcagtgttggaacctggtatgctcgtggaggggccccctggcccagaaggccctgcgggattgattggtccccctggcatccaggggaacccaggcccagttggagaccctggagagaggggcccccctggccgagcagggctccctggatcagatggggctcctggtcctcctggcacatctctcatgctcccattccggtttggcagtggtgggggtgacaagggccctgtggtggcggcccaggaggctcaggcccaggcgatcctgcagcaggcgaggctggcgctccgtggaccccctggccccatgggatacacagggcgccctggacccttgggccaacctgggagccctggcctgaaaggagagtctggagacttaggacctcagggccccagaggacctcagggcctcacaggccctcctggcaaggctgggcgaaggggccgggcaggtgctgatggagcccgagggatgcctggagatcctggagtgaagggtgaccgaggttttgatggactcccagggctccctggagagaagggccataggggtgatactggtgcccagggccttcctggtccccctggtgaggatggagagaggggagatgacggggagattgggcctcgagggctgcctggagagtcgggacctcgaggtctccttggccccaaaggcccacctggtattcctggaccccctggcgtccgaggcatggatggtccccagggccccaaagggagcttgggaccccagggagagccaggacctcctggacaacagggcacccctgggacccagggtcttcccgggccccagggtgccatcggccctcatggagagaagggtcctcaagggaagccagggctccccggcatgcctggctcagacggacccccgggtcacccagggaaggaaggtccccctggaaccaaaggaaaccagggtccctctggacctcagggacctctaggatacccaggacctcgaggggtcaagggtgtggacggaattcggggtctgaagggtcataagggtgagaagggtgaggatggctttcctgggttcaaaggtgacataggcgtgaaaggtgacaggggcgaagttggagtccctggttccaggggagaggatggtcctgaggggccaaagggacgcactggaccgactggagaccctgggcccccagggctcatgggcgagaagggcaagctgggtgttcctggtctgcctggctatcctggacgtcagggacccaaggggtccctaggatttcctggctttcctggtgccagtggagagaagggagcccggggcctgtcggggaagtcagggcctcggggagaacggggccccacgggtccacggggtcagcggggaccccgaggtgccactgggaagtctggagctaagggaacatctggtggtgatggcccccatgggccccctggagagaggggcctccctggacctcagggtcccaacgggtttcctggaccgaaaggacccccgggcccccctgggaaggacgggctgccgggacacccaggccaaagaggagaagtgggtttccaagggaagaccggcccccctggtcctccaggagtggtgggacctcagggagcagcaggagaaaccggccctatgggggagagaggtcacccaggccccccggggccccctggagagcagggactacctgggacagctggaaaagaaggaacaaagggtgaccctggtccccctggggccccagggaaggatggtcctgctggtctgaggggattcccaggagagagaggcctcccaggcactgctggtggacctggtttgaaggggaatgaaggtccgtctggcccccctggccctgcaggctcccctggggaacgaggtgcagcaggatcagggggacccattggtccgccagggcgcccaggcccgcagggtccccctggagcagcaggagagaaaggtgtcccaggtgagaagggccccattggcccaactggccgagatggagtgcagggtcctgtggggcttcctggtcctgctgggcctccaggtgtggctggagaggatggagacaagggtgaggtgggggaccccggacagaagggcaccaaagggaacaagggtgaacatggccctcctggaccccctggacccattggtcctgtggggcagcctggagcagcgggagcagatggggagcccggagctcggggaccccagggacactttggagccaaaggtgatgaaggaacaagaggattcaatgggcccccaggacccattggcctacagggtttgccaggcccctctggggagaagggagaaacaggagatgtgggtcctatgggaccacctggccccccaggacctcgaggtccagctggacccaatggcgctgatggcccacaaggtcccccaggaggtgttgggaacctgggtccccctggagagaagggggaaccaggagagtcaggatctccagggatccagggcgagccaggtgtcaagggtccacgcggggaacgtggagagaaaggagagtcggggcagccaggagagccagggccaccagggcctaaaggccccacaggcgatgatggccccaaagggaaccctggtcctgttggttttcctggtgaccctggcccccctggagaaggtggccctcggggccaggatggtgctaagggtgaccgaggcgaggatggtgagccaggacagcctggatcccctggtcccaccggggagaatggacccccagggccacttggaaagcgaggtcctgctggctcgcctggttccgaggggcgacaaggagggaagggagccaagggagatcctggcgctataggtgccccggggaagacaggcccggtgggtcctgcaggcccagcagggaaacctggccctgatggtctgagggggctcccaggctcagtgggtcagcaaggccgacctggagctacaggccaggctgggcccccaggtcctgtgggacccccagggctgcctggtctccggggcgatgctggagccaagggagagaagggccacccaggtctcattggactgattgggcccccgggtgagcagggagagaagggagatcggggacttcctgggcctcagggctcccctgggcagaagggtgagatgggtatcccaggagcatccggccccattggtcctggaggtccccccggcctccccggacctgctggccccaaaggagccaaaggagccacaggcccaggcggacccaagggagagaagggtgtgcagggccctccaggacacccgggtcccccaggcgaggtgatccagccactgcccattcagatgcccaagaagactcggcgctcggtggatggaagccgtctgatgcaggaagatgaggccataccgaccgggggagcccccggcagtcctggggggctggaggagatctttggctcactcgactccctgcgggaggagatcgagcagatgaggcggccaacagggacccaggacagccctgctcgcacctgccaggacctgaagctgtgccacccagagcttcccgatggagagtactgggtcgaccccaaccagggctgtgctcgggatgccttccgagttttctgcaacttcacagcagggggtgagacctgtgtgacgcctagggatgacgtcacgcagttctcttacgtggactcagagggctccccagtgggtgtggtccagctcaccttcctgcggctgctcagcgtctcagcccaccaggacgtctcctacccctgctctggagcagcccgtgacggtcccctgagactccgtggggccaatgaggatgagctgagcccggagactagcccctatgtcaaagaattcagagatggctgccagacacagcaaggccggacggtgctggaggtgcgaacgcctgtgctggagcagctgccagtgctggatgcctccttctcagacctgggagccccaccgaggcggggaggggtgctgctggggcctgtctgcttcatgggataggaccgtctctgtctgatcctgtccattcggaaccaggcccacctggaatcccacaacatcagctctgtgccacctcccaagagggctcctcactatctagggagccctgggccagggcgtggagagccctcagtcggggcaggccaggggaggggtgaagtggttgcctggacaccccacgggaggagtggcatctggggctcttggccctcccacctggagcctgttacccgttagagagctgagacccttatttaaaactcacctcccaatcaccccaaacaaatggaagagaagagaaaggacatggcgtattttgtatttaaaagtaattgtattaattatttaaagtgtggaaagcaaaataacaaaaaagagaaacgccaacaaaaatcagcagatgttgaagacaggggtctcgggggtgggctccggcacccacatcctggagtcaggactttcctcagtgactgtgtgtaggggggtttcagggctgaaccccacctccctcccaccttcctcccacctcacctgtcgcacccactgtgaaagttggaatatgtggtctccctggcctcagggctctgactctgccagggtggggctctctaacccacaggtgttggctgcctggcccatgtgcccactgtctcttccacttggtctgggtttggcaggcactgcctgctacttgagggccaggatgctcccccagggaagaaacggaatagtgtggggtgtgtgcagggctgcatcccgcagatggctggaatattaaaattcttctatattggctggtaaattgccatggccctgagccactgagtatgttcattgccacccctgtccctcccctgggcacccctcactttccctgatcctgcaattaaagggttaatgtgtggcatatggaagggactcccaggaccctgtgcccagcttccatgctgactgatggttaaataatgtgattgtctcctcccagg

SEQ ID NO: 232569 - DNA, 5052 bp, Artificial Sequence
  derived and/or modified sequence
ggcgccccccccgtggacgtgctgcgggccctgcggttccccagcttgcccgatggtgtgagaagggccaagggcatctgtccagctgatgtcgcttatagggtagccagacccgctcagttatccgcgcctacccggcagctgtttcccggcggcttccctaaagatttctctttgctgactgtggtaaggacccggccaggcctgcaggccccattgctgaccctgtactcagcgcagggagttaggcagctcggattggagttgggccgccccgtgcggtttctgtatgaggatcaaactgggcgaccacagcccccttcacaacctgtgttccgagggctgtccctggctgacggaaagtggcatagggtggcagtggctgtcaagggtcaaagtgtgactcttatcgtcgactgcaagaagagagtgaccagaccacttccccggagcgccagaccagtcttagatacccatggcgtcattatcttcggggcccgcatccttgacgaggaagtattcgagggggacgtccaagagttggccatcgtcccgggggtacaagccgcgtacgaatcctgtgagcagaaggaattagagtgcgaaggcggacagcgagagcgaccacagaaccagcagccacatcgagcccagcgctcccctcagcaacaacctagtcggctccaccgcccccagaaccaggagcctcagtcccaggatccaacaccgggggaggaagaagaaattctggaatcttcactgctccccccgcttgaagaggagcaaaccgatcttcaagttccaccaaccgcagacaggtttcaggctgaagaatacggagaaggcgggacagaccccccagaggggccctacgattatacttacggatatggggatgactacagggaggaaacagagcttggacctgccttaagcgcggaaactgctcacagtggcgcagcagcccacggaccacgcggtctgaagggagagaaaggagaaccagcggtgttagaacctggaatgctagtggaaggaccacccggccctgaaggacccgccggcctgatagggccaccaggaatacaaggcaatcctgggcccgtgggcgaccctggggagcggggtcccccagggcgagccggtcttccgggaagcgatggtgcccctggaccccccggcacctctctcatgctccccttccggttcggatccggcggcggggacaaaggcccggttgttgccgctcaagaggcgcaagcccaggccatcttgcagcaggctcggctggcactgcgagggcctcctgggccaatgggctacacaggacgaccaggcccgctgggtcagcctgggtctccgggtctaaaaggagagtctggagacttggggcctcagggcccaagaggcccacagggattgacaggacccccaggaaaagcgggtaggcgcggtagagcaggagccgatggtgcaaggggcatgcctggcgatcctggagttaaaggagatcggggcttcgatggcttaccaggtttgcctggtgagaaaggacaccggggcgataccggagcccaaggtttacccggaccaccaggtgaagacggtgagcgtggcgacgatggggaaattgggccgagaggccttccaggcgagagcggcccgcgcggtctgctgggcccaaagggaccacctgggatccctggcccaccaggggtgaggggaatggacgggccacaaggcccaaagggctccctggggcctcagggtgaacccgggcctccaggtcagcagggtactcccggaacacaagggttgcccggtccacagggcgctatagggccccatggcgaaaaaggaccacaaggcaagccaggtctgcctggtatgccgggaagcgacggtccaccaggacacccaggaaaggaggggcctcccggcacaaaaggtaaccaagggccctccggcccgcagggtcctttaggttatccgggccctagaggggtgaaaggagtggacggaattcgggggctgaagggccacaagggcgaaaaaggggaggatgggttcccaggattcaaaggcgatattggggtgaagggagaccgaggggaggtcggagttcccgggtctcggggagaggacggaccggaggggcctaagggccgcactggtccaacaggcgacccaggccccccgggattgatgggcgaaaaaggaaaacttggtgtccccgggttgccaggatatcccggtcgacagggccccaaaggctcgctggggttccctggctttcctggcgcctcaggagaaaagggcgcgaggggcctcagtggtaagtccgggccccggggcgagcgggggcccaccggaccccgcggccaaagaggcccgaggggagcaactggaaaatctggtgcgaaagggacttccggcggcgatggaccccatggaccacccggggagagaggtttgcccggtccgcagggaccgaacgggttccccggccctaaaggaccaccaggccctcctggcaaagacgggttgcccggacatccgggccaacggggggaagttgggttccagggaaagaccggcccacctggcccacctggcgtggtgggcccccagggagccgccggcgagaccggcccaatgggtgaacgaggtcaccccggtcccccaggtcctcccggtgaacagggactcccaggcaccgcgggcaaggaaggtacaaagggggacccaggccccccaggtgctcccggcaaggacggtcctgccgggctgagaggttttcccggagaaaggggactacccggaaccgcaggcggcccaggcctgaaaggcaacgagggcccttcaggcccccccggccccgccggaagtccaggggaacggggagcggccggttcgggaggcccaataggaccccctggcagacccgggcctcaggggccacctggagcggcaggcgagaagggcgtacctggagagaaaggtcctataggcccaacagggagggacggtgtgcaggggcccgtgggcctcccaggacccgctggccctccgggagtagctggggaggatggagacaaaggggaagttggagatccaggtcaaaaaggaaccaagggaaacaagggggaacacggaccgcctggtccccccgggccaattgggcctgtcgggcagcccggagctgccggggccgacggtgaacctggtgcccggggaccccaaggacacttcggcgccaagggcgacgaggggacacgcggatttaacgggccaccgggccccatcgggctgcagggcctgcctggcccaagtggcgagaagggcgagaccggggacgtgggaccaatgggacctcccggaccaccaggccctcggggacccgcggggcccaacggcgccgatggtccccaggggcctcctgggggggtcggtaacttgggccctccaggcgagaagggcgagcctggagaatccggatcccccggaattcagggtgagcccggcgttaaaggacctcgaggtgagagaggcgaaaaaggcgaaagcggacaaccgggcgagcccggaccacctggccccaagggcccgaccggcgacgacggaccaaagggaaatcctggccctgtgggattccccggtgatccaggcccgcccggagaaggaggtccaaggggtcaggacggagcaaaaggtgatcgcggggaggatggggagcctggccagcctggaagtccaggtcccaccggagaaaatggcccaccaggacctctcggcaagcgagggccagccggttctcccggaagtgagggcagacaagggggcaagggagccaagggagatccaggtgccatcggcgctcccggaaagaccggccccgttgggcccgccggtccagcagggaagcctgggccagatggactgcgcggtctgcccgggtccgtcggacagcagggccgaccaggtgccaccgggcaagccgggcccccagggcctgtcgggcccccggggcttccaggcctccgcggcgatgccggcgccaaaggggagaaagggcatccaggattaattggccttattggcccccccggggagcaaggggagaagggagataggggccttcccggacctcaaggttcccccgggcaaaagggggagatgggcatccccggtgcctctggccctattggcccaggtggacctccaggcttgccgggacccgcggggcccaagggtgccaagggggccacaggtcccggcgggccaaagggagagaaaggagtccagggccctccgggccaccctgggcctcccggtgaggttattcagcctctgcctatacaaatgccaaaaaagactcggaggtccgtggatggtagccgtttaatgcaggaggacgaagctatacccacagggggggcacccggctctccaggaggtctagaagagattttcggctctttggactccctccgtgaagaaatagagcagatgcggcgtcccactggcacccaagactctcctgcacgcacctgtcaggatttaaaactatgtcaccccgagcttccagatggcgagtattgggtggaccctaatcaggggtgtgctcgggatgcgtttagagttttttgtaatttcacggccggcggggagacttgcgtcacacctagagacgatgtaactcagttttcatacgttgatagcgaaggctccccagtcggtgtcgtgcagcttacgtttctcagactcctgtccgtgtccgcccatcaagacgtctcttacccatgttccggggcagcccgtgatggtcctctgcgactgagaggcgccaacgaggacgaactgtctcccgagaccagcccctacgtgaaggagttccgcgacggctgccagactcagcagggtagaaccgtgctagaagtgcggaccccagttttagagcagttgccagttctcgacgccagtttttccgatctgggcgctcctccacggcggggaggcgttctgctaggcccggtgtgcttcatggggtag

SEQ ID NO: 232570 - DNA, 5133 bp, Artificial Sequence
  derived and/or modified sequence
atggagcggtgcagccggtgccaccggctgctgctgctgctgcccctagtcctcgggctgtccgccgcacccgggtgggccggggccccccccgtggacgtgctgcgcgccctgagattcccgagtctgcccgatggcgtgagaagggccaaggggatttgtcctgcagacgtggcctacagagtggctcggcctgcgcagttgagtgcacccactcgccagttgttcccaggtggcttccccaaggattttagcctgttaaccgtggtgcgaacccgacccgggctgcaagctcccctgctcactctgtattccgcccagggcgtacgccagctgggtctcgaactgggccgaccagtaaggttcctgtacgaagaccagactggccgcccccagccacccagccaaccggtatttagaggactcagtctggccgacggtaagtggcaccgggtggccgtcgcagtgaagggacaatcggtaacactgattgttgactgtaagaaacgcgtcacacgccccttaccccggtctgccagacccgttctcgatactcatggtgttataatcttcggggcacgaattttagatgaggaagtcttcgaaggcgacgtccaggaactggccattgtcccgggagtacaggctgcatacgaaagttgcgagcagaaggagcttgagtgcgagggcgggcagcgagagcgtccacagaaccagcagccacacagagctcagagaagtccccagcaacaacccagccgcctccatagaccccagaatcaggaacctcagtcacaggaccccacaccgggggaagaggaggaaatcttggagtcttcgctactgccacccttagaggaggagcaaacagatttgcaggtgccacccaccgctgatcgtttccaagccgaggagtacggagaaggtggaaccgacccccccgaggggccatacgactacacatacggctacggcgatgattaccgggaagagaccgagctgggcccagctttgagcgctgaaacagcacatagtggcgccgctgcccatgggccacgcggacttaagggagagaaaggcgaaccagctgtgctagaacctggaatgctggtcgagggtccacccggaccggaaggaccagctggtcttatcggacccccaggaatacagggaaatcccgggcccgttggggacccgggggaacgcggtcctcctggacgtgcaggacttccagggtcagatggcgctcccggaccccctggtacttcattgatgctcccgttcagattcggctccggagggggagataagggacctgtggtggccgctcaagaagcgcaggctcaggcgatcctccagcaagcaaggttggctctgagaggtccccctggaccaatgggttataccggaaggcctggcccactgggccagcctggttcgcctgggctgaagggcgagtcaggcgatttagggccccagggccccagaggccctcagggactgacaggtcctccaggcaaggccggcagacgagggagagccggcgctgacggggccagaggtatgccaggcgacccaggggtgaagggcgatcgggggtttgacggtcttccaggcttacccggggaaaaaggccacaggggggacactggtgcacagggtctccctggacctccaggtgaggacggtgagcggggcgatgacggggagatcggcccccgcggcctgcctggtgagtctgggcctcggggcctgctgggccccaaaggcccccccggcatccctggaccaccgggcgttagaggtatggatggtcctcagggacccaaggggtctctcggacctcagggcgagcctggccccccggggcaacaggggactcccggaacccaggggctcccagggccgcaaggggccattggccctcacggagagaaaggaccacagggcaaacccgggcttccggggatgccagggtctgatgggccaccaggtcatcctggaaaggaaggcccccctggcacgaaaggcaaccagggcccctctgggcctcagggacccctgggctatccgggcccacgtggagttaagggagtcgatggtattagaggattaaaaggtcataagggcgagaagggtgaggatggcttccctggctttaaaggagacattggggtgaagggcgacagaggagaagttggggtgccgggatctcgcggggaagacgggcccgaagggcccaagggccggactggtcctaccggggaccccgggcctcccgggctgatgggagagaagggtaagctgggagttccgggtcttcccggctatccagggcggcagggccctaaagggtcactgggcttccctgggtttcctggtgcatccggagagaagggagccagagggctgtccggaaagagtggcccgcggggcgagcgcggcccaaccgggcctagggggcaaagaggcccacgcggggctacgggaaagagcggggccaaaggcacgtctggaggtgatggacctcacggtccaccaggagagagaggcctaccgggaccccaaggacccaacggatttcctgggcctaaaggccctccggggcctccaggaaaagatggcctgcccggccaccctgggcagagaggagaagtgggtttccagggcaagacaggcccacctgggcctcctggcgtggttgggcctcagggtgccgccggagaaactggaccaatgggcgaaagggggcacccagggcctcccgggccccctggcgagcaggggctgccagggacggctggtaaggaggggactaagggtgatccgggaccccctggcgcgccaggcaaagatgggcctgccggtctcaggggtttcccgggcgaaagggggttgcctgggaccgctggaggtccaggtctgaaaggaaatgaggggcccagcggaccacccggacccgctggctcgcctggcgagcggggcgccgccggctctggcgggccaatagggccgcccgggaggccggggcctcaaggtccacccggcgctgccggtgaaaagggagtacctggggaaaagggtcctattggccccaccgggcgtgacggtgtacagggcccagtcggacttccagggccagcaggccctcctggagtcgccggggaggacggtgacaagggggaggttggtgaccccggccagaaaggaaccaagggtaacaagggggagcacgggccccccggccctcccggtccaattggccccgtggggcagccaggagctgcgggagccgatggtgagcctggggcccggggcccacaggggcacttcggcgcaaaaggggatgaggggaccaggggatttaatggacccccaggacccattggcttacagggactgccaggcccctcgggagaaaaaggagaaactggagacgttggcccaatgggtcctccaggccctccggggcccagggggcctgcgggacccaatggagccgatgggccgcagggaccaccaggaggagtaggcaatcttgggccgcccggagaaaaaggtgagcccggagaatctgggtctcccgggatccaaggggagcctggtgtgaagggccccaggggcgaacgaggcgaaaagggcgaatccggccagcccggagagccagggccaccaggcccgaaggggcccacgggagacgacggtccaaaaggcaatccagggcctgtagggttccccggggatcccggaccgcctggagagggcggacccaggggccaagacggagcaaagggcgacaggggcgaggacggcgaaccaggacagcccggatctccaggtcccacaggagaaaatggaccccccggcccactgggcaaacggggaccagctggttcccctgggtccgagggtaggcagggtgggaagggggctaagggggatcccggcgccattggtgcgcccggtaagactgggccagttggacccgcaggtcctgcaggtaaaccggggcctgacgggttgagagggctgccaggctcggtcggccagcagggtcgtcccggtgctaccgggcaggccgggccgccaggacctgttgggcctcccgggcttccaggattgagaggcgatgccggcgctaaaggggagaaaggacatcccggactcatcggcctgatcggtcctcctggggagcagggtgagaaaggggataggggattgcccggccctcaggggtcccccggccagaaaggggagatgggcatcccaggtgcatctggccctatcggaccggggggcccccctggactgccgggtccagccggtcccaagggcgccaagggtgccacggggcccggtggtccaaagggcgaaaaaggtgttcagggcccccctggacaccctgggcctccaggtgaagtaatccagcctctgccgattcagatgcccaaaaagactagaagatcagtcgatggctcacggctgatgcaagaggacgaggcaattcctactgggggtgcacccgggtctccaggaggactggaagagatctttggctccttggactctctcagggaggaaattgaacagatgaggaggcccactggcacccaagattcccctgctagaacgtgtcaagaccttaagctctgccatccggagttacctgacggggagtattgggtcgatcccaatcagggatgcgccagggatgcgtttcgggtgttctgcaacttcactgcgggcggagaaacgtgcgtgacaccaagagacgacgtcactcagttctcttacgtcgacagcgaggggtcacccgtaggcgtcgtccaactgacctttttgcgcctgttatccgtcagcgcccatcaggatgtctcctacccatgctctggagccgctcgtgacggcccgctgagattgcggggcgccaatgaggacgaattatcccctgaaacctccccctacgtcaaagagttcagagatggctgccagactcaacaaggaagaactgtattagaggttagaacacccgtgttggaacaactgcctgtcctcgatgcttctttctctgacctgggtgcccctccccgccggggcggagtgctcctggggcccgtgtgctttatgggatag

SEQ ID NO: 232571 - DNA, 5133 bp, Artificial Sequence
  derived and/or modified sequence
atggagcggtgcagccggtgccaccggctgctgctgctgctgcccctggtactgggcctaagtgcggctcctggttgggccggagccccgccagttgacgtcctgagagcgctaaggtttccttccctaccggacggagtaaggagagctaaggggatttgcccagctgacgtggcatatagggtcgcccgcccagctcagctgagtgctccgacgcggcagctcttccctggcggtttccctaaggacttcagcctgctgacagttgtcagaacccgacctgggttgcaggccccgcttctgaccctctattctgcccagggcgtacgccaactgggtttagaacttggtaggccggtacggttcctttacgaagaccagaccggaaggccccagccgccgtctcagccagtcttccgtggcctgtcccttgctgacggcaaatggcaccgggtcgccgtcgcagtcaaaggacagagtgtgaccctgatcgtcgattgtaagaaacgggtaactcgaccactgccccgaagcgcacggccagtgctagacacacacggggtgattatatttggggcccggatactggatgaagaagtgttcgagggagatgtgcaggagcttgctatcgtgccgggagtccaggcagcttacgaatcttgtgaacagaaggagctggagtgtgaagggggccaacgagagagaccgcagaatcagcagccccatagggcccagcgttcaccacagcagcaaccaagccgtctgcacagacctcagaatcaagagccccagagtcaagacccaacccccggggaggaggaagagattctagagtctagcctcttgccgcctttagaagaagaacagacggacctgcaagtgccacccacagccgatcgcttccaggccgaggaatacggggaaggcgggaccgatccccctgagggaccctacgactatacttacgggtacggggacgactacagggaggagaccgagcttggccctgccctgtctgccgagaccgcccattccggagctgctgcccacggtcctcggggcttgaagggagagaagggcgagccggccgtcctcgagccggggatgctagtcgagggccctccaggtcctgaaggccccgccggtttaattggcccaccagggattcaagggaaccccggacccgttggcgacccaggagagcgaggccccccgggtcgcgcaggattgcctggctccgatggagctcccggaccgcctggaacctccctgatgctacccttccgctttggctccggcggtggagataaaggtcccgtggtcgcggcacaggaagctcaagcacaagcaattttacagcaagcacggttagccctgaggggaccccctggccccatgggctacaccggccgccccggaccactcgggcaaccagggtctccaggcttgaagggtgaatcaggggatttggggcctcaggggccacgaggacctcagggactgaccggaccacccggtaaggccggccgccgaggaagagctggcgctgatggagccaggggcatgccaggcgatccgggcgtaaagggggatcgggggtttgacggccttccaggcctgccaggggagaaaggccaccgaggcgacacaggagctcagggcctccccgggcctccaggcgaggacggagaacgtggggatgatggtgagattgggccacgcgggctgcccggggaatctggacctcggggtcttctgggtcctaagggtccacccggtatcccagggccacctggcgttcgcggaatggacggaccgcagggtccaaaaggctccctggggccacaaggcgagccaggccccccaggacaacagggaactccagggacacaggggttacctggccctcaaggcgcaattggacctcacggcgaaaagggaccacaggggaaaccgggtctgcccggcatgcctggaagtgatggtccccccggtcatcctggcaaggaagggcctcccggtacaaaaggaaatcaaggcccgagcggcccacagggcccgctcgggtatcctggccctagaggggtcaagggtgtggacggaattcgtggcctcaaaggccacaagggcgagaagggggaagatggtttccctgggtttaagggcgacattggggtcaagggggacaggggcgaagtgggagtaccagggtctagaggcgaggacggtcccgaagggccaaaggggagaaccggccctacgggagatccaggcccaccaggtcttatgggcgagaagggcaaactcggtgtgcccggcctccccggatatccagggcgccaggggccaaaggggtcattgggttttcctggcttcccaggcgcctccggagagaagggcgctcgtgggctctctggcaagagcggtccccggggggaaagagggccaaccgggcctcgaggacagagggggccccgcggcgccacgggcaagtccggtgcaaaggggactagcggcggagacggtcctcacgggccaccaggcgaacgaggcctgcccgggccccagggccctaacggcttccccggtccaaaagggccccccggtccacccgggaaggacgggttgcctggacatcctggtcaaaggggtgaagtaggatttcaaggaaagaccggccctcccggtcccccgggcgtcgtgggccctcaaggtgctgccggggagactggtccaatgggcgaacggggtcatccaggtccccctggaccgccgggtgagcagggtctaccagggaccgcaggcaaggagggaaccaaaggtgatccgggcccccctggtgcgcccgggaaagatggaccagctggactgagaggcttcccaggggagagaggactccctggcacggcgggtggccctggtttaaagggcaatgaggggcctagtggcccccccgggcctgccggctctccaggcgagagaggagccgctgggtccggcgggccgatcggccctcccggaaggcccggtcctcagggaccccccggcgctgctggggagaaaggggttcccggagagaagggacccataggccctactggccgcgacggggtgcagggccccgtcgggctccccggacctgctggacccccaggagtggctggtgaagatggagataagggtgaagtgggggacccgggacagaagggcacaaaaggtaataagggcgaacacgggccaccgggtccccccgggcctatcggacccgtgggacagccgggggctgccggcgctgatggagaaccaggagctcgaggccctcagggccacttcggggctaagggcgacgagggtacacgcggttttaatggccctcccggccccattggtttgcagggactgcctggcccatcaggtgagaagggcgagaccggggatgtgggccccatgggtccgccagggcctccggggccgcgcggccctgctggacccaatggagccgatggacctcaagggcctcctggaggcgtgggcaatctcggaccccctggcgagaaaggtgagccgggcgagtcaggttcacctggaattcagggtgagccaggcgtaaaaggcccacgtggcgaaagaggtgagaaaggtgagagtggccagcctggagagcccggcccacctggacccaaggggccaacaggcgatgatggacccaagggaaaccctggccccgtgggctttcccggtgatcctgggcctccaggcgaggggggtcctagaggccaagatggagccaaaggtgaccgaggtgaggatggggagcctggacagcctggatctcccgggcccaccggtgagaatgggccacccggccctttgggaaagaggggccctgcgggctcacccggttcggaaggtagacaaggaggcaagggagctaaaggcgatcctggtgcaattggcgccccagggaaaaccggccctgttggacccgcgggcccagcaggtaaacctggaccagacggtctgagagggctgcctggatcagttggtcaacagggacgccctggcgccactgggcaggcaggtccacctggtccagtcggcccgccgggtctgccaggcttaagaggcgatgccggagcaaagggtgaaaaaggccaccccggactgatcggacttatcgggccgccaggtgaacagggcgaaaagggtgatcgggggctgcccggccctcaaggctccccagggcagaagggcgagatgggcatcccaggcgcttctggtcccattggccccggcgggccccccggcttgcctggtccggccgggccaaagggtgccaagggcgcaacaggccccggaggacccaaaggagagaagggcgtgcagggacccccagggcaccctgggccgcctggagaggtaatacagccattgccaatccagatgccgaagaagacccgcagaagcgtggacggcagccggctgatgcaagaggacgaggccataccaaccggcggcgctccaggcagcccaggtggcttggaggagatttttggatcactcgacagcttgcgggaggaaattgaacagatgcggcgacctactggaacgcaggactctccagctcggacctgccaagatctaaagctgtgccatcctgagcttcccgatggcgagtattgggtagatcccaaccagggctgtgcgcgcgacgccttccgcgttttttgcaactttacagcagggggggagacctgcgtgactccacgggacgatgtcactcagttctcatatgtggatagcgaaggatcacccgttggcgtggtacagctgacattcttgcgtctgctaagcgtgtctgctcatcaggatgtgtcttatccttgcagtggggccgcccgagatggtccactgcgactgcgcggagctaacgaagatgaattatctcctgagacatcaccttatgtgaaggaattcagggatgggtgtcagacacagcaggggcgaacagttctggaggtcaggaccccagtgctcgaacagttacccgtgctcgatgcatcattctccgacctgggagcaccgccacgcaggggcggggtgcttcttggcccagtgtgctttatgggctag

SEQ ID NO: 232572 - DNA, 5070 bp, Artificial Sequence
  derived and/or modified sequence
atggagcggtgcagccggtgccaccggctgctgctgctgctgcccctggtacttggtctcagtgctgctccgggatgggccggggccccccctgtagacgtgctgcgggccctcagatttcctagtctgccagatggcgtgcggcgcgctaaggggatttgccccgccgatgtggcgtacagagtggctaggccagctcagctgtccgcgccgacccgacagttattccctggaggcttcccgaaagacttctcgctattaaccgtcgtcagaacaagacctggcttacaggcaccccttctgaccctgtactccgctcagggtgtgagacaactcggacttgaactgggccgcccagtgcgattcctgtatgaagaccagacgggacgccctcaaccaccttcacagcctgtgtttcgaggactgagcttggctgacggcaagtggcatagggtcgccgtagccgtgaagggtcagtctgtaacactaatcgtggactgtaaaaagagagttactcggccactgcctaggtcagcacgtcccgtgctggatactcatggcgtcatcatcttcggagcccgcatactggatgaagaggttttcgagggtgacgtccaggagctggctatcgttcctggggttcaggctgcttacgagagttgtgagcagaaagaactcgagtgtgaaggcggacaacgggagcggcctcagaatcagcagccacaccgcgcccagcgttctccccagcaacaaccttcacgcctgcaccgcccccagaatcaggaaccccaatctcaggaacagaccgatcttcaagtcccacccactgctgacagattccaagcagaagagtacggcgaaggtggcacagacccacccgagggtccctacgactatacctatggctacggggatgactaccgggaagaaacagagttaggccccgctctgagcgccgagacggctcatagcggcgcggccgctcacggaccaagagggttaaaaggagaaaagggtgagccggccgttttagagcctggcatgctcgttgaggggccgcctgggcctgaagggcctgcggggctgattggacctcctggcattcagggaaaccctggtcccgtgggagatcctggagagagagggcctccaggcagggcaggccttccaggctccgatggagccccggggcctccagggactagcctaatgctcccttttcgatttggctcaggtggaggcgacaaaggccccgttgttgcagcccaggaggcgcaggctcaagcaattctccagcaagcccggttggcactgcgaggaccccccggtcctatgggatacacggggaggcccggtccgttaggccaaccaggcagccctggtcttaagggcgagagcggagacctcggcccccaggggccgagaggaccacagggcctgactgggcctcctggcaaggcaggacgcagaggacgtgccggcgccgacggggcccggggcatgcctggggatccaggagttaaaggcgataggggtttcgacggtcttcccggactgcccggtgagaagggacatcgtggcgatactggcgcgcagggcttgcccggaccacctggagaagacggcgaacgtggcgacgacggagagattggacccaggggattacccggtgaatccggaccccggggtcttctgggccctaaaggtcctcccggaatccccggccctccaggagttcgaggaatggacgggccccaggggccaaagggatccctgggaccccagggtgagcccggtcctccaggacagcagggcacccctgggacacagggactgcccggtcctcaaggagctatcggcccccacggagaaaaaggaccccaggggaagcccggcctgcctgggatgccgggatcggatggtcctcctgggcaccccgggaaagaagggcctcccggcacgaaaggtaaccaagggccctccggcccccagggcccactgggataccccggtccccggggcgtcaagggagtggatggaatacgaggcctgaaagggcacaagggggaaaaaggggaagacgggtttcccggttttaagggggacatcggagttaaaggtgaccgcggggaagttggagtccccggctcacggggcgaagacggacctgagggcccaaaagggagaaccgggcctacgggggaccccggacctcccggtttgatgggagagaagggcaagctgggagttccaggcctgccaggatatccggggagacagggccccaaaggatcattaggctttccaggcttccctggagctagcggcgaaaagggcgctagggggttatccggtaagagcggcccacgaggcgagcggggcccaaccgggccacgaggccagcgtggcccgagaggtgcaacgggtaaatctggcgccaaaggaacaagcggcggagatggaccccacggccccccgggcgagcggggattacccggacctcaaggtcccaacggatttccgggtcccaaaggcccgttagggccgccagggaaagatggccttcctgggcatcccggccagcgcggggaggtggggtttcagggaaagaccgggcctcctggaccacctggcgtggtgggccctcaaggagccgcgggagagacggggcccatgggcgagcgtggtcaccctggtcctccgggcccacctggcgaacaggggctgcccggcacggccgggaaggaaggaactaaaggagaccccggacctccgggagctcccggaaaagatggtcccgcaggtttacgcggcttccccggagaacggggacttcctgggaccgcaggcggccccggtttaaaagggaatgaaggtccatccggaccccctgggcccgccggcagtccaggagaaagaggcgctgcaggcagtgggggaccaatcggcccacctggcagaccagggccgcagggcccaccaggcgccgcaggcgaaaaaggcgtacccggggagaaggggcctattggccctaccggacgggacggcgtgcagggcccagtagggctgccggggcccgccgggccacctggcgtagccggcgaagacggcgataaaggcgaggtgggggacccgggtcagaaagggactaaagggaacaagggggagcatggccctcccgggcccccaggacccatcggtcccgtgggtcagcccggcgcagctggggcggatggcgagccgggtgccagaggccctcagggccacttcggagcaaaaggcgacgagggcactagaggatttaacggaccacccgggccaatcggattgcagggcttaccaggcccgagtggcgaaaagggggagacgggagacgtcggccctatgggccccccgggtccaccaggaccgcgcggtcctgctggtccaaacggagccgacggccctcaggggccaccaggcggggttggtaacctcggccctcctggcgagaagggcgaacccggcgagtccgggtctccaggtattcagggtgaaccaggcgtgaaaggtcccaggggagagcgcggcgagaaaggagagagcggccagccaggagagccaggccccccaggtcctaaggggcccacaggagatgatggacccaaaggtaacccgggcccggtgggattcccaggagacccagggccaccgggagaaggtggacctcggggccaggatggggccaagggcgaccgtggcgaggatggcgaaccaggccagccgggatccccaggacccaccggtgaaaacgggcccccaggacctctaggcaagcgcgggcccgccggcagccctggcagtgaaggtcgacaggggggaaagggcgccaagggggaccccggagctataggggcccccggcaagacgggccctgtgggaccagccgggccggctggcaagccgggccctgacggacttcggggcctccccgggtccgtgggacaacaggggcgacccggagctaccggacaggcagggccccccgggcctgtcggacccccggggctgccaggactccgaggggacgccggcgccaagggagagaaaggacacccaggtcttataggtctgatcgggccacccggggagcagggcgagaagggagacagaggcctccctggaccccaggggtcacctggccagaaaggagaaatgggaatacctggcgcctccgggcccatcggccctgggggtcctcctgggctaccaggacccgcaggccccaagggtgctaagggcgctaccggccctgggggcccgaagggcgagaagggcgtccagggcccgcccggacaccctgggccacccggcgaagtgattcagcctctccccatccaaatgccaaaaaagacccgacgtagcgttgatggatcccgactgatgcaagaagacgaggcgatacctaccggcggcgcccctgggtcacccgggggactggaggaaatcttcggctctctggacagcctacgcgaggagatcgagcagatgagaaggccaaccggcactcaagattcccctgctaggacatgtcaggatttgaaattatgccatcctgaacttcctgacggcgagtattgggtggatcccaatcagggctgtgccagggacgcctttcgcgtattttgtaacttcacagccggcggtgagacttgcgtaacgcctagggatgacgtgacacagttctcttatgtggactctgagggtagccctgtgggagtagtgcagctgacttttctccgacttttgtctgttagtgcgcatcaggatgtgtcctacccctgttctggagccgctcgcgatggtccactgcggctcaggggggctaatgaagacgaactcagccctgaaacctccccctacgtcaaagagtttagggacggatgccagactcagcagggcagaaccgtgctcgaggtacggacaccagtgctcgaacaattgccagttctggatgcttcattctctgatctcggcgcccccccacggcgaggcggcgtactgttgggtccagtgtgtttcatgggctag

SEQ ID NO: 232573 - DNA, 5211 bp, Artificial Sequence
  derived and/or modified sequence
atggagcggtgcagccggtgccaccggctgctgctgctgctgcccctggttctggggctgtccgcagcacctgggtgggccggcgctcctccagttgatgtcctgcgggccctcagattcccctcccttcctgatggcgtgcggcgggccaaaggcatatgtccagctgatgtggcctaccgcgtggcccggcctgcccagctgtctgcgcctacccggcagctgttcccaggcggtttccccaaggacttctcgcttctgactgtagtacgcactagacccggcctgcaggccccactcctgaccctttattcagcacagggcgtaagacagttgggactggagcttggcaggcccgtaaggtttctatacgaggaccagaccggccgtccacagcctccgtctcagcctgtgtttcgtggtctgtccctggccgacggaaaatggcacagggttgctgtcgccgtaaaaggccaatccgtcaccctgatcgtagattgcaaaaaacgtgtcacccggcctctcccccgctcagcgcgtccagtgttggacacacacggagtgattatcttcggtgcccgaattcttgacgaagaagtgtttgagggggatgtgcaggaactcgcaattgtgccaggcgtgcaggccgcatacgaaagctgcgaacagaaagaactcgaatgtgagggcggacagcgggagcgaccccagaatcagcagccgcatagagctcagaggtcccctcagcagcagccatctcgactacatcggccccagaatcaggagccgcagagtcagccaaccgagagtctgtactatgactacgagcccccttactacgacgtgatgaccactggtaccacacccgattatcaagatccaacccccggcgaagaggaggagatcctggagtcctcgctccttcctcccttggaagaggagcaaacagatctgcaggtgccccccacagccgacaggtttcaggcggaagaatatggcgaaggagggactgacccaccagagggtccgtacgattatacttatggttacggagatgattatagagaagagaccgagctgggacctgccctttccgctgaaactgctcattccggagcggcagcacatggcccacgagggttgaagggagaaaagggtgaacctgctgtgctggagcccggtatgttggtggaagggcctcccggacctgaaggccctgctggtttaattggcccacccggaattcagggcaatcccggccccgtcggtgatccaggtgagagaggccccccgggaagggccgggttaccaggcagcgacggggccccaggcccaccagggacatctttgatgctgccatttagattcggtagtggaggaggcgacaaaggacccgtggtggccgcccaggaagcccaggcccaggccattctccagcaggctaggcttgctctgcggggtccccccgggcctatgggatacaccggccggcccggacccttgggacagccgggaagtcccggcctgaagggtgaaagcggcgaccttggcccgcagggacctagaggtccgcaaggacttacaggcccacccgggaaggcaggaaggcgggggcgggcaggcgccgatggggcccgcgggatgccgggtgatcctggcgtcaaaggcgacagaggattcgacggactgcccggactgcccggagaaaagggtcatcgtggggacactggcgcccaggggcttcctgggccccctggagaggatggggagcggggtgacgatggggagatcggtccacggggtctgccaggcgagtccggtccgcgtgggctgctagggcctaaaggccctccaggcatacctggaccaccaggtgtgcggggaatggacggcccccaggggcccaaaggttcgttgggcccccaaggcgagcccggaccaccagggcaacaaggaactccggggacacaaggcttgccagggccccaaggtgctatcggcccccacggcgaaaagggcccgcagggcaagccaggattgcctggaatgcccggctccgacggcccccccggccacccagggaaggagggacctcccggaaccaagggcaaccagggacccagtgggccccagggccccctggggtaccccggtccacgcggcgtcaagggagtagacggtatccgcggattgaagggtcataagggggagaagggagaagatgggtttccggggtttaagggcgatataggcgtcaagggcgatcggggtgaagttggcgttcctggatcccgcggggaggacggccccgaaggacctaagggcagaactggcccgaccggggacccagggccacccgggttgatgggcgagaaggggaaattgggggtgcccgggttgcctggctaccctggtaggcagggcccaaaaggttctttgggatttcccggcttccctggcgcttcgggggagaagggagctcgcgggttgtccggaaaatcagggcctcgcggcgaaaggggaccaacgggaccacggggccagaggggaccccgtggcgccactggtaaatccggcgctaagggcacaagcggtggggacggcccgcatggtcctccgggagagcgtggactgcccggaccccaaggacctaatgggttccctgggcctaagggccccctgggtccacctggcaaggacgggctgcccggccacccaggccagaggggagaggttggattccaaggcaaaacaggcccaccaggaccccctggagtcgtcggacctcagggggcagccggagagacaggacctatgggggaaaggggacacccgggtccaccaggaccccctggggagcagggactgcctggcactgccgggaaggagggaacgaagggagatccagggcctcctggggcacctggcaaggatggccctgcagggctcagagggttcccgggcgagcgaggcttacccggcacagccggcggcccggggctcaaaggcaatgagggaccaagcggacctccggggccagcagggagcccaggagagaggggcgccgctgggtccggcggaccaattggtccgcctgggcgcccaggtccccaaggtccacctggggcagcgggcgaaaagggagtgcccggagagaaggggcctattggcccaactggaagggacggggtccaaggacccgtaggtctgccaggtcccgctgggccgcccggcgtcgccggggaagatggagataagggtgaggtcggcgatccaggccaaaaggggacaaagggaaacaagggggagcacggtcctccaggcccccctggccccatcggtcctgtcggacaacctggcgctgcaggagccgacggcgagcctggcgccagaggccctcaagggcatttcggcgccaagggtgacgaaggcacaagaggcttcaacggaccaccagggccaatagggctgcagggtctacctggcccctccggagaaaaaggggagacaggcgacgtcgggccgatgggcccacccggaccacccggtccaagagggccagcaggcccaaatggagctgacggaccacagggtccgccaggcggagtcggcaatctggggccccccggagagaaaggtgagcccggtgaaagcggctcccctgggattcagggcgagccaggtgtgaagggcccccgcggggaacgaggagagaagggggaatcaggccagcccggagagcccggccccccaggacctaagggccctaccggcgatgatggaccaaaaggtaatcccggtcctgtcgggttccccggggacccaggcccaccaggcgaaggaggacctcggggacaggacggcgcgaaaggcgatagaggcgaagatggcgagcctgggcagcccggatctccaggccctacaggtgagaacggacctccgggtccactcgggaaaagaggtcccgccggaagccccggctccgagggacggcaagggggcaaaggagcgaaaggagacccgggggccattggagcacctggcaagacaggccctgttggccctgccggtcctgccggtaaaccgggacctgacggactgagggggctgccaggatccgttggccaacagggcagacccggggcaaccgggcaggcaggacctccagggcctgtgggccctcctgggctccccggacttcggggtgatgccggcgcaaagggggaaaaaggccacccgggcctgattggcttgattggccccccaggggaacagggcgagaaaggcgacagaggcttacctggacctcaggggtctcctggccaaaagggtgaaatgggcatcccaggggctagtggacctataggcccaggcggccctccaggactcccgggacccgcaggccccaagggtgcaaagggtgccaccggacctggcggtccgaagggcgagaaaggcgtgcagggcccgcctggccacccaggcccccctggagaagtaatacaacccctgcctattcaaatgcccaaaaaaacgcgcaggtccgtggacggttccaggctgatgcaggaggatgaagccatccccaccgggggggctcctggatcacccggcggcctagaggagattttcggctctctggacagtcttcgcgaggaaatcgagcagatgcggcggcctacagggacccaagattctccagccaggacctgccaagatcttaaattgtgccatcccgagctgcctgatggtgaatactgggtcgacccgaaccagggttgtgctagggacgcattccgtgtcttctgcaattttacagccggtggtgagacttgcgtgacccctagagatgacgtcacccagttctcgtacgttgactctgaagggagcccagtgggcgtggtgcaattgactttcctgcgcctgttgagtgtgagtgcgcaccaagatgtgagctatccttgttcaggagcggctcgagacggtcctctgcgactgcgcggagcaaatgaggatgagttatccccggaaacctcaccatatgtgaaggagttcagggacggctgccagacccaacagggaagaactgtattagaagttagaacgcccgtacttgagcagctgcctgtactcgatgcctcttttagcgatctgggcgccccacctcgtcgggggggagttttgctcggccctgtctgttttatgggctag

SEQ ID NO: 232574 - DNA, 5211 bp, Artificial Sequence
  derived and/or modified sequence
atggagcggtgcagccggtgccaccggctgctgctgctgctgccccttgtgcttggactttctgcagcacccggatgggcaggagcgccaccagtagacgtgctgcgtgccctgaggttcccttcccttccagatggagtccgcagagccaaaggcatctgccccgccgacgtggcatacagagttgcgcgacccgcccagctctctgcccctactcgccagcttttccctggggggttccccaaggacttcagcttgctgaccgtcgtgcgaacgcgaccgggtctgcaggcaccactcctcaccctctattctgcgcagggtgtgcgccaacttggactggagttaggaagacccgttcggtttctgtacgaggatcaaacgggacgcccccagcccccttctcagcctgtgttcaggggactgtcactagctgatggcaagtggcacagagttgctgtggccgttaaagggcaaagtgtgaccctgatcgtcgattgtaaaaagcgcgttacacgacctctgccaaggagcgcccggcctgtgttggacactcacggagttataatttttggcgcacgaatcttagacgaggaggtttttgagggagacgtccaagagctggccattgtgccgggcgtgcaggcagcttacgagagctgtgagcagaaggagttagagtgtgaaggtggacaacgtgaacgaccccagaatcagcaacctcacagggcacagagatctcctcagcaacagcccagcagactacatcgtcctcaaaatcaggagcctcagtcccaaccaacggaaagtctctactatgattataagccaccctactacgatgttatgaccactggcactacccccgactaccaggaccctacccccggagaagaggaagaaattctggagtcaagtctgctcccacctctcgaggaggagcaaacggacctgcaggtgcctccgacggccgatcggtttcaggcagaagagtacggcgagggtggaactgatccgcccgaagggccttatgactatacctacggttacggagatgactatcgggaggagactgagctgggccccgccttgagcgccgagaccgcccactctggagctgctgcgcacgggccaagaggcttaaaaggcgagaagggcgaacccgccgtcttagaacccggcatgctggtggagggccctccgggaccagaaggacctgccggactcatcgggccaccaggaattcagggaaatcctggacccgtgggggaccctggtgagcggggcccaccaggacgagcgggactgccaggaagcgatggggctccgggccctccgggaacttcacttatgttaccctttcggtttgggagtgggggaggcgacaagggccccgtcgtcgccgcccaggaggcccaggcccaggctatcctgcaacaggcaagactggcgttacgcgggccccctggccctatgggctacaccggacgacctggcccactgggtcagcctggcagcccagggttgaaaggggaaagcggcgatctgggaccgcagggaccccgagggccccaggggcttaccggcccccctggaaaggctggaagacggggccgggccggcgcagatggcgcaagaggaatgccaggcgacccaggcgtcaaaggtgatagagggttcgatggcctgcccggattacccggcgaaaaaggacaccggggcgatactggcgctcagggactccccgggccacccggagaagacggcgaacgcggagatgatggagaaatcggcccgcgtgggctacccggcgagtcaggacccaggggccttttagggcccaagggcccacccggaatccccggccctcccggcgtgagaggaatggacggcccccaggggccaaagggaagcttaggcccccagggggaacctggccctccgggacagcagggcactcctggcacccaaggcctgcctggtccacagggcgctattggcccccacggagagaaaggaccacagggcaagcctggactgccaggaatgcccggctccgatggccccccaggacatccgggaaaggaaggtccacctggcacgaaggggaaccagggtccctctggcccacagggccctctggggtatcctggcccaaggggggtgaagggcgttgatgggattagaggtcttaaggggcataaaggcgagaagggcgaagatggattcccagggttcaaaggagacattggagtgaaaggcgatcggggggaggtgggcgtcccaggctcgagaggggaggatgggccggaaggccccaagggacgcacagggccaaccggtgatcctgggccgcctgggctcatgggcgagaaggggaaactgggcgtaccaggactgcctggctaccccggccggcagggtccgaagggcagtcttgggtttcccggcttcccaggagcttcaggagagaaaggagccaggggtttgagtgggaaaagcgggccccggggggagcgtggtccaaccgggccccgcggtcagcgcggcccaagaggtgcaacagggaaatccggagccaaaggcaccagtggaggggacggcccccacgggcctcccggtgagagaggcctgccagggccccagggtccaaatggattcccaggccctaagggacctccgggaccgccaggaaaggacggattgcctggacaccccgggcagcggggcgaagtgggattccaaggaaagacagggccaccgggacctccgggggtggtggggcctcagggggctgccggagagacagggccgatgggggaacgtggtcatcctgggccccctgggcctccaggggagcagggactcccaggaaccgctgggaaggagggaaccaaaggggacccaggtcctcctggcgctccaggaaaagacgggccggcaggactgcgcggttttccgggcgagcgtgggttgccgggcaccgctggcgggccgggcctcaagggcaatgaaggtccctccggccctcctggacctgcaggatctcctggagaacgcggtgccgcagggagcgggggtccaataggtccaccaggacggccgggcccacagggtccgcctggcgccgccggcgagaagggcgtgcctggtgagaaaggtccgatcgggcctaccggacgtgacggagtacagggaccggtgggcctgccaggaccagccggccccccaggcgtggccggagaggacggggacaagggggaggttggggaccctggacagaaggggactaaaggtaataaaggggaacatggaccgcctggtcctccagggcccatcgggcctgtaggacagccaggggccgcaggagctgatggggaaccaggggcgagaggcccccaaggccactttggcgccaagggagacgagggcactagaggattcaatggtccaccggggcccataggcctacagggcctcccggggccatccggagaaaagggggaaacaggagatgtgggacctatggggccaccagggccacccggcccaagaggacctgcaggcccgaacggtgcagatggaccccagggcccccccggtggagtggggaaccttgggccccctggagaaaaaggtgaaccgggggaatccggctcccctgggatacaaggcgaacccggtgtgaaggggcctcgaggggaaagaggtgagaaaggcgagtccggacagcctggagaacctggtccaccaggaccaaaaggacccaccggagacgatggcccaaaagggaacccagggcctgtagggttccccggagaccccgggccgccaggagaaggagggccccgaggacaagatggggctaagggtgacaggggtgaggacggtgaacctgggcaacccggctcccccggacccactggcgaaaatgggccacctggacctctgggaaagaggggccccgccggtagccccggcagtgagggacggcagggtgggaagggagcaaaaggtgaccccggcgccataggggcccctggcaagaccgggcccgtgggccccgcgggcccagctggaaagcctggacccgatggactacgcggcctcccagggtctgtggggcagcagggccggcccggagcaaccggccaggctgggcctccagggcccgtcggtcctcccggtctgcccggtcttcgcggcgatgccggcgccaagggggagaaagggcaccctgggcttattggccttatcggacctcctggagagcagggcgaaaagggcgatcggggactgccgggcccccagggctccccgggccagaagggtgagatgggcatccccggtgcaagcggcccgatcggacccggcgggccaccgggactgcctggtccggctggtcctaagggcgctaaaggggccactgggcctggcggacccaagggcgaaaaaggcgtccaaggaccgcctgggcatccaggccccccaggcgaggtgattcagcctctgccaattcagatgcctaagaagacccggcgctccgttgacggttccagacttatgcaggaagacgaggcaatccccaccggtggtgccccagggtcacccggcggtctggaggagatctttggctctctcgacagtctgcgcgaggagattgaacaaatgcggcgtcccacaggaactcaggattcacccgcgcgcacctgtcaggacttgaaactctgtcatcctgagctgcccgacggcgagtattgggtggacccaaatcagggttgtgcaagagacgcctttcgtgtgttttgcaacttcaccgccggtggcgagacatgtgtgactccgagggacgatgtgacacaatttagttacgtggattctgaaggatctcccgtgggcgtggtacagctgaccttcctcagactgttgtctgtgagcgcccatcaggacgttagctatccttgttctggggccgctcgcgatggccctctgcgccttcgcggcgcaaacgaagacgagctgtctcccgaaacatccccgtacgtcaaagagtttagggatggctgtcagacacagcagggccggactgtactcgaagttcgaaccccagtgctcgagcagctgccagtcttggatgccagtttcagcgaccttggcgcaccacctcggcgtggtggtgtccttctcggtcccgtgtgcttcatgggttag

SEQ ID NO: 232575 - DNA, 5211 bp, Artificial Sequence
  derived and/or modified sequence
atggagcggtgcagccggtgccaccggctgctgctgctgctgccccttgttttaggactgtccgcagcccctggatgggcaggcgcccccccagtggacgtgctgcgtgcactgcggtttccatccctacccgatggagtgaggagggctaaaggcatctgccccgcagacgtggcctatagggttgccagaccagcccaactgtccgccccaacccgccagctctttccaggcgggttccccaaggattttagtctgcttaccgtggtgcggactcgtcctggactgcaggcccccctcttaactctgtactccgcccagggggttcggcaacttgggctggaactgggccgtccagtgaggtttctctatgaagaccagacgggaaggccgcagcccccatcccagcctgtgttccggggtctgtcactggccgatgggaagtggcaccgcgtggctgtggcagttaaaggacagtcagttacactgattgtggactgcaaaaaaagagtgacaaggcccctgccccgcagtgctcgcccggtgctcgacacacacggtgtgataatcttcggagcaaggattctggacgaagaggtatttgaaggagatgttcaggaactcgcaatcgttcctggcgtccaagcagcgtacgaatcttgtgaacagaaagagctagagtgcgaaggcggtcagcgtgaacgccctcagaaccagcagccgcatagggcccagcggtctccgcagcagcaaccatcgcgtctgcataggccccagaaccaggagccccagtcccagcctactgaatccctttactatgactacaaacccccgtactacgacgtaatgacaacaggtacaacaccagactaccaggacccaactcccggagaagaagaagaaatactcgagtcgtcactccttcctcctctggaagaggagcagacggacttgcaagtccctcccaccgccgatcgtttccaggcagaagaatacggcgaaggaggaactgatccccctgaaggcccatacgattacacctacggatatggcgacgactatcgtgaagagacagaactaggtccggctttatccgctgaaactgctcacagcggcgctgccgcgcatggcccgcgaggcctcaagggcgaaaaaggagagccagccgtcctcgaaccgggcatgcttgtggaaggtccgcccggtcctgagggccccgctggcctgatcggcccccctgggattcaagggaacccaggtcctgttggcgatcccggagaaagagggcctcctggaagggcagggttgcctggctctgacggcgctcctggacctccaggcactagcctaatgctgccatttcgctttggctcagggggtggtgataagggccccgtggtggcagctcaggaagcacaggctcaggcgattttgcagcaggcccgactggctctgcgtggtcccccaggacctatgggatatactggacgccccggccctctcgggcagccgggatcccccggtctgaaaggcgaaagcggcgaccttggaccccaaggccctcggggacctcagggactcaccggcccacccggcaaggcaggccgacgcgggcgcgcaggcgcagacggagcgagaggcatgccaggagatccaggcgtgaaaggagataggggatttgatgggcttccaggcctgcctggagagaaaggccatcggggcgataccggagctcagggattacccgggcctcctggcgaggatggtgaacggggcgatgatggggagatcgggccgcggggtctccccggggagtccggccctaggggactcctaggacccaaggggcccccgggcatacccgggcctcccggagtgcgcgggatggatgggccccagggacctaaggggagcctgggcccccagggtgaacccggaccacctggacagcagggaacacctggaacccagggcctgccagggccccagggcgccattggcccacacggtgagaagggcccacagggaaagcccggcttgccggggatgcctggatcggacggccctcccggccatcctgggaaagaggggccccccgggacaaaaggtaatcagggcccctcagggccccaggggcctctcggatatccaggaccccgtggcgtgaagggtgtggacggcatcagaggactgaaagggcataaaggtgagaagggcgaagatgggtttccgggcttcaaaggggacatcggggtcaagggcgacaggggcgaggtcggagtcccaggatcacggggtgaggacggccccgaaggccccaaagggagaactggtccaactggggaccccgggcctcctggtctcatgggcgaaaagggaaagcttggagtgccgggcttgcccggctaccctggaagacagggccccaaggggtctctgggctttcctgggttccccggagcttccggagagaaaggggctcgaggcctcagtggcaagagtggtccaaggggtgaaagaggccccaccggtcctagagggcagcggggtccccgaggagctaccgggaagagtggggcaaaggggacatccggtggagatggaccccacgggcccccaggggagaggggtctccctgggccacaaggtcccaacggcttccccggcccaaaaggcccccccggcccacccggtaaggacgggctgcctggacatccgggtcagcgcggcgaagtgggttttcagggcaaaactggcccccctggccctccaggtgtggtgggccctcaaggcgccgccggggaaactggtcccatgggagagagggggcatccggggcctccaggcccacccggggagcagggattacccggcactgctgggaaggaggggaccaagggtgatcccggccctccaggggcgcccggaaaagacggccctgcaggactgcgtgggtttccgggggaaagaggcctgcccggaacagcgggaggccccggcctcaaggggaacgaaggaccgagcggcccccccggaccagccggcagcccaggcgagcgcggagcagccgggtctgggggcccgattggacctccgggccgcccaggcccacagggtcccccaggagcagccggcgaaaagggcgttccgggagagaaggggccgatagggcctacaggtagggacggggtccagggccccgtgggattgcctggacctgcagggccccccggagtggccggcgaggacggtgataaaggggaggttggcgaccctggacaaaaaggcaccaagggaaacaagggagagcacgggccacctgggccaccaggcccaatcggtcccgtgggacagcctggggcggccggagccgacggcgagccgggtgcgagagggcctcaggggcacttcggagctaagggggatgagggcacccgggggttcaacgggccccccggtccaatcggactgcagggcctcccaggtcccagtggagagaagggtgaaacaggcgatgtcggccctatggggccccccggacctccgggcccccggggccccgcaggccctaatggggcggatggaccacagggacctcccgggggcgtgggcaaccttggtccacctggtgagaagggagagcccggagaatccggaagtcctggtattcagggcgaacccggtgtgaagggaccaaggggcgaaagaggtgagaagggtgagagtggccagccaggggaaccaggtcctcccggtcctaaagggcctactggcgacgatggaccgaagggaaatcccggccccgtcggctttcctggtgatcctgggccaccgggcgagggggggccaagagggcaggacggtgccaagggggaccgaggagaagatggcgaacccggacagcccggaagccccggcccaaccggagaaaatgggccccccgggcccctgggcaaaaggggacctgcgggcagtcctggatcggaaggcagacaggggggcaaaggcgccaagggggacccaggggctattggagcaccaggcaagacagggccagtgggcccagctggacccgctggaaagcctggtccggacggcctccgcggtctgcccggaagtgtgggccagcaggggcgccccggggccaccgggcaggcaggaccacctggccccgttggacccccggggctccccggcctgcgtggtgatgccggcgcaaagggcgagaagggccacccagggctgatcggtcttatcggtcccccgggggagcagggagaaaagggtgaccgcgggctgcctggaccccaaggctctcccggacagaagggagaaatgggcattcccggcgcgagcgggcctattgggccaggtggccctccaggcctgcccggccctgccggcccaaaaggcgcaaaaggcgccaccgggccaggaggtcccaaaggagaaaaaggagtccaggggcctccagggcacccagggccccccggggaagtgattcagccattgccaattcagatgcctaagaagacgcggagatcagttgatggaagcagattgatgcaggaggacgaggcaatccccacggggggtgcgcctggttcacccggcggcttggaggagatcttcggcagcctggatagtctccgggaggaaatcgaacagatgcggcgcccaactgggacccaggacagcccggctcgcacctgccaagacttgaaattgtgtcatcctgaattgcctgatggagagtactgggttgaccccaatcaaggctgcgccagagatgctttcagagtgttttgcaatttcacagccggcggagaaacctgcgttacgccccgtgacgacgtaacgcagttttcttacgtcgatagtgaggggtcccccgttggtgtcgtccagctgacgtttctccgactcttatcagttagcgctcaccaggatgtgtcgtacccatgtagcggtgcggccagggatgggcccttaagactacggggcgctaacgaagacgaactctcccccgagacatccccctacgtgaaggagttccgtgatgggtgccagacgcagcagggaaggaccgtcctcgaagtacgaacacctgtgctagaacaactgcctgttttagacgcatcattctctgacctcggcgcgcctcccagacgcggcggcgtactccttgggcctgtctgctttatgggatag

SEQ ID NO: 232576 - DNA, 5070 bp, Artificial Sequence
  derived and/or modified sequence
atggagcggtgcagccggtgccaccggctgctgctgctgctgcccttagtcctcggtctgtccgctgcacccgggtgggcaggtgctccgccggttgacgtgctgcgggcactccgttttcctagcttgccagacggcgttcggcgagccaagggaatttgtcctgccgatgttgcttaccgtgtggccagacccgcacagctgtctgcacctaccaggcagctcttccctggcgggtttcctaaggatttcagcttgctgacagtggtgaggactaggcctgggcttcaggcaccccttcttactttgtacagcgcccagggcgttaggcagctcggactggaactgggaaggcccgtccgatttctctatgaggaccagacaggaaggccgcagcccccctctcaacccgtgttccgcggactaagcctggcagacggaaaatggcatcgggttgctgtggccgtcaaggggcagtctgtcacactaatcgtggactgtaaaaagagagttaccagacctcttcctcgctccgccaggcctgtcttggacacacacggggtaattatcttcggagctagaatcctcgatgaagaggtttttgagggggacgtccaggagctagctatcgtgccgggagtgcaggccgcttacgagtcctgtgagcagaaggagctggagtgtgaaggaggccagcgggaacggccgcagaaccagcaaccacaccgcgctcagcggtcacctcaacaacagcctagccgacttcacaggccccagaaccaagaaccccagtctcaggaacagaccgacctgcaggtgcctccgacagctgatcgtttccaggcagaggagtacggggagggtggtacagatcccccagaagggccttatgactatacatatggttatggagacgactacagggaggagactgaattggggcccgctctgtctgccgaaaccgctcactccggagcagccgcacacggtccccgtgggcttaagggcgagaagggagagccggccgtgctggaacctggaatgcttgtggagggcccacctgggcccgagggccctgccggtctcataggccccccagggattcagggaaacccaggccccgtcggcgatccgggagagcgcggaccccccggccgcgccggactgccgggtagtgatggcgcccctggaccccccggtacctcgctcatgcttcctttccgcttcggaagcggcggcggtgacaaaggacccgtcgttgccgcgcaggaggcccaggcccaggctattctccaacaagcccgactggcactccgggggccaccaggaccgatggggtatacaggacggcctggacctctggggcagcctggctcaccaggactgaaaggcgaaagcggtgatctcggaccccagggaccacggggacctcagggactgaccgggcctcctggtaaggctgggcgcaggggtcgagccggggcagacggagcccgaggcatgcccggagacccaggagttaaaggcgaccgaggctttgacggtttaccaggtctccccggcgagaaggggcaccggggcgatacaggtgcccaggggctgcctgggccacctggtgaggatggtgagcgaggcgacgatggcgaaataggacctcgtggtttacctggcgaatccgggccgagaggcctgctggggccaaagggaccacctgggattcctggcccacccggagtccgaggaatggacggcccgcagggtcctaaaggcagcctcgggccacagggggaacctgggccaccaggccagcaaggcacccccggtacccaagggctgcccggccctcaaggcgctatcggaccccacggcgagaagggccctcagggaaaacctgggctcccagggatgccaggctccgacggaccacctggccaccccgggaaagagggcccacccggaaccaaaggtaaccaggggccttcaggtccccaagggcctctgggatatcctggtccccggggcgtgaagggtgtggatggtattcgtggattgaagggccacaagggcgagaaaggcgaggatggattcccaggctttaaaggcgacatcggcgtcaaaggtgatcgaggagaggtaggcgtccctggtagccggggcgaggacggaccagagggccccaagggaaggaccgggcccaccggtgatccgggaccccctggcctgatgggtgagaaagggaaacttggcgtacccggtctgcccggctatcccggcaggcagggcccaaaaggctccctggggttcccaggatttccaggggcatcaggtgagaagggagccagaggtctgagcggaaagagcggccctagaggcgaacggggccctacgggcccgcggggccagcgcggcccacgcggcgcaactggcaagtctggggcaaaagggacatctggtggcgatggtccgcacggtcctccaggggagagaggtcttccagggccacaaggcccaaacggcttcccaggcccaaagggtcctcccggcccacctggcaaggacggcctgcccgggcaccctggccagcggggggaggtaggcttccaaggcaagacaggtccaccaggtccacctggtgtggttgggccccaaggtgccgctggggagacagggcccatgggtgagaggggtcaccctggccctcctggtccccctggcgaacaaggcttaccaggtaccgcaggcaaagaagggactaagggagacccagggccacccggagctccgggcaaagacggtcctgctgggctacggggctttccgggagagagaggactgcccggcactgctgggggcccgggccttaaggggaacgaaggaccctctggacctccagggcccgcgggttcccccggtgagcggggggcagcagggagcggtgggcccatcgggcctccaggcagaccaggccctcagggaccaccaggcgctgctggtgagaaaggggtgcccggagaaaaaggcccaatcgggccaaccggccgggatggggtccaaggcccggtgggcctgcccggacccgccggccctcccggggtcgccggcgaggacggggacaagggggaggtcggcgatcctggccagaagggtacaaaaggaaataaaggtgaacatggcccacctggaccccctggacccatcgggcccgtgggccagccgggcgctgctggggctgacggagagccaggggcccgcggtccacaggggcatttcggagctaagggtgacgagggcacacgaggatttaacgggccgcccgggcctattggcctgcaggggctcccaggacctagtggagaaaagggtgagacaggggacgtcggccccatgggccctcccggaccacctggtccacgagggcctgctggcccaaatggggccgacggccctcaaggaccaccaggcggcgtgggtaacctgggcccccctggagagaaaggagaaccgggtgagagcgggtctcccgggattcagggcgagccaggtgtgaaggggccgcgaggggaacggggagagaagggagagagtggacagccaggcgagcccggaccccccggaccaaaaggtccaacaggcgacgacggaccaaaaggcaatccgggccccgttggatttcccggggaccctggccctcctggagagggcggaccgcgtggacaggatggagctaaaggggaccgcggggaggacggcgagcctggacagcccggctctccaggccctaccggcgaaaacgggcctccggggccccttggtaaaagaggaccagccggttcgcccggcagcgaggggaggcaaggcggtaaaggggctaagggtgaccctggggctataggggctccaggcaaaaccgggcctgtgggccctgctggaccagcagggaagccgggaccagatggactgaggggcctacctgggtctgtcggccagcaaggtcgtcctggcgcgacggggcaagccggtcctcccggaccagttggacccccaggcctgccgggccttaggggagatgccggggccaagggagaaaagggtcacccggggcttatcgggcttataggacccccaggggagcagggagaaaaaggcgatagaggactgcccggaccacagggcagcccgggtcaaaagggtgagatgggcattcccggtgcatctggcccgatcggacccggcggcccccccggtctgcccgggcctgctggacccaaaggggccaagggagctactgggcctggaggacccaagggagagaaaggcgtgcagggaccccccggccacccagggcctccaggcgaggtaatccagccactgcccatccagatgccgaagaaaacgcggcgctccgtggatggcagcagactcatgcaagaagacgaagccattcctaccggcggagcccccggttctccaggaggcctggaggagatctttggctctctggattctctgcgcgaagagattgagcagatgagacgcccaaccggcacccaggactcacccgcccgcacgtgtcaagacctgaaactttgtcatcccgagctccctgatggggaatactgggtggatcctaatcaaggttgcgccagagacgccttccgcgtcttctgcaatttcactgctggcggggaaacatgtgtaactccaagagacgatgttacacagttctcatatgtggattcggaaggatctcccgttggcgtggtacagcttacgttcctccgacttctgagcgtatctgcgcatcaggacgtgagctacccatgctccggagcagcgcgggatgggccgctcaggctgagaggtgccaacgaggacgagctcagtcctgagacgtctccgtatgtcaaggagttcagggacggatgccaaacccagcagggacgaactgttcttgaggtgagaaccccagtgctggaacagctgccagttctggacgcgagctttagcgatctcggcgcccccccacgcagggggggagttttgcttggcccagtgtgttttatgggatag

SEQ ID NO: 232577 - DNA, 5133 bp, Artificial Sequence
  derived and/or modified sequence
atggagcggtgcagccggtgccaccggctgctgctgctgctgcccttagtactgggcctgtccgcagctccaggctgggcaggagccccaccagtagatgtgctgcgggccctgagatttccctctttgcccgacggcgtaaggcgggcaaaaggcatctgcccggccgacgtggcataccgggtcgccaggccagcccagctctctgctcccacacgtcagctgtttcccggaggttttcccaaagacttctcactgctcactgttgtcaggacacggccggggctgcaagccccactgttgaccctttactccgcccagggcgtacgacaactgggactggagctaggccgtccggtgcgcttcttgtatgaggaccagacaggcaggcctcaaccacccagccagccggtgttcaggggcctgtcattagctgatggtaaatggcatagagtggcagtggccgtgaagggacagtcagtgactttgatcgtggactgcaaaaaaagagtcacaagacccctgcccaggtccgcccgcccggttttggacacccacggtgttataatcttcggcgcgagaatcttagatgaggaggttttcgagggggatgtacaagaattggccattgtccctggtgttcaggctgcctatgagtcctgcgaacagaaagagctggaatgcgaaggcggccagcgagaaaggccgcaaaaccagcaacctcaccgtgcacaacggagtccccagcaacagccgtccagactgcacagaccccagaaccaagagccgcagagccaggacccgactccaggagaggaggaagaaatcttagaaagctcactcctgccccccctggaggaggagcagacggatcttcaggtgccaccaactgctgatcgctttcaggcagaggagtacggagagggggggacggacccccccgagggcccttacgattacacatatggatatggcgacgactatcgcgaggaaactgaactgggacccgctttgagcgcggagaccgcccactcaggcgcggcagcgcatggccccagaggccttaaaggagagaaaggggaaccagctgtactggaacccggcatgttagtggagggccccccagggcccgaggggccagccggacttattggacctcccggtatccaggggaatccaggtcctgtcggggaccccggggagaggggcccgcccggaagagctgggctgccagggtccgatggagcccctggaccccctgggacatctctgatgcttcccttcagatttggctcgggcggcggagataaaggaccggtcgttgcagcccaagaggcccaggcgcaggctatactccagcaggcacgcctcgcgctgagaggaccgcctggcccaatgggctacactggcagacctggcccacttggccagcctgggagccctggactcaagggtgaaagcggcgatctggggccccagggcccgcgcgggccgcagggattgaccggccccccaggcaaggcgggcaggcgaggtagagctggcgccgatggagccaggggaatgcctggagatcctggcgtaaagggtgatagggggttcgacggtcttccaggcctgcccggagagaagggccaccgaggcgacaccggagcccagggactccccggaccgccaggagaggatggcgagagaggtgacgacggcgaaattggcccaaggggactgcccggggaatctggccccagaggtctccttggaccaaagggaccgcctggaataccgggtcctccaggagtgaggggtatggacgggccgcagggaccaaaaggatctctgggccctcagggagagccaggcccccccggacagcagggcacacctgggacacagggcttaccaggaccacagggggcaatagggccgcacggtgagaagggcccccagggcaaacccggtctccctggcatgccggggtcagacgggccgccaggccatcctggaaaagagggccctccagggacaaagggcaaccagggaccctccggcccccaagggcccctgggatatccaggaccccgaggagttaagggggtcgacggtatcagaggactgaaagggcacaaaggcgagaagggggaggacggattccctggcttcaagggtgatattggggttaagggggaccggggggaagtcggcgtgcctggctcacgaggcgaagatgggccggaaggccctaagggcagaactggacccacaggagacccgggccccccaggactgatgggcgaaaagggcaagctcggggtgcccggcctgccaggttatccaggcaggcagggacctaaaggatctttaggctttcctggcttccccggggcatctggcgaaaaaggcgcccgaggcctttccggtaagagtgggccccggggagagagaggcccaaccggccctcgtggacagcgggggccaagaggtgctactgggaaatcaggggcaaagggcacctcaggtggtgatggcccccacggcccccctggggaaagaggcctcccagggccacagggccctaatgggttccctgggcccaaaggtcctctgggccctcccggaaaagacggacttccgggacaccccggtcagcgcggggaggtcggctttcaaggtaaaactgggccccctggccctcccggagtggtcggaccccagggagccgccggggaaactggtcccatgggtgagcgcgggcatcccggcccccctggtccgcccggagagcagggcctgccaggcaccgccggaaaagagggaactaagggggacccaggaccccctggtgcccctggaaaagatgggccggccggcctgagaggtttccccggtgagcggggcctgccgggcactgcaggaggcccagggctgaaaggaaatgagggcccctccggacctcctggccccgccgggtcccctggggagaggggagcagccgggtctggaggtcctattgggccccctggaagaccggggccacagggaccaccaggagccgccggagaaaagggagtgccgggagaaaagggacctattggaccaacaggaagagacggtgttcaggggcccgtcggcctgccaggtccggcggggcctccaggcgtggcaggggaggatggtgataagggtgaggtgggggaccctggacagaaagggacaaaaggcaacaagggggaacatgggccacccgggccccctggacctattggtcccgtgggtcagcctggcgccgctggagcagacggtgagcctggcgccaggggcccccagggacacttcggcgccaagggagatgagggaaccagaggattcaatggacctccgggacccatcggtctccagggattgcctggcccatctggtgagaaaggtgaaaccggagacgtgggccctatgggcccacctggcccccccggtccacgaggtcccgctggacccaatggggccgacggaccccaaggacctccaggcggtgtcggcaatctcggacctcctggtgaaaaaggagaaccaggtgagtccggatctcccggaattcagggcgaacctggagtgaagggccccaggggcgaacgcggggagaagggggagagcggtcagcctggggagcctgggccaccaggccccaagggacccactggcgatgatggccccaaagggaaccccgggccggtgggatttccaggggaccccgggccacctggagagggcggcccaagaggacaggacggggctaaaggggataggggggaagacggagagcctggccagcccggttcaccagggcccacgggtgagaacggtccgccagggcctctggggaaacgggggcctgctggctctcccgggagtgagggtaggcaggggggaaaaggcgcaaaaggcgaccctggtgccatcggggccccaggcaagacggggccagtaggacctgctggcccagccgggaagcccggccccgacggcctccggggattacccgggtcggttggacagcagggtagaccaggtgctaccgggcaagcaggaccgccaggacccgtcggaccacctggtctgccaggactgaggggtgacgccggcgccaaaggggaaaagggccatccgggtctaatcggactgatcggtcctcctggcgagcagggcgagaagggagacaggggcctgcccgggccgcaaggttctccgggacaaaagggagagatggggattcctggcgccagcggacccattggaccagggggtccaccaggactcccgggtccagccggcccaaaaggggcaaagggagctacaggtcccggaggacccaagggagaaaagggagttcagggcccaccaggtcatccaggacctcctggtgaggtgattcaaccactcccaatccagatgccaaagaagactcgaaggagcgttgacggttctcggctcatgcaagaggatgaagcaatcccaaccggcggcgcccctggctcgcctggcggccttgaggaaatatttggaagtctcgatagcttacgggaggagatcgagcaaatgcgccgtcccaccgggacgcaggattcccccgccaggacctgtcaggacctgaagctgtgtcaccccgagttaccagacggcgagtattgggtggaccctaaccaaggctgtgcccgcgacgcatttcgggtcttttgtaactttacagccggtggcgagacctgtgttacaccccgggatgacgttacacagttcagctatgtggatagtgaaggatctcctgtcggcgtggtgcagctcacttttcttcgattgctgtccgtgtcagcacaccaagacgtatcctacccctgctctggagctgctagagatggccccctgaggcttagaggggctaacgaggacgagctgtcccccgaaacgtccccctatgtgaaggagttcagagacgggtgtcagacccaacagggacgcacagtactcgaagtaagaacccccgtgctggaacagcttccagtgctggatgcttcattcagtgatttaggtgcccccccaagaagaggtggcgtccttctcggacccgtctgttttatgggttag

SEQ ID NO: 232578 - DNA, 5070 bp, Artificial Sequence
  derived and/or modified sequence
atggagcggtgcagccggtgccaccggctgctgctgctgctgcccctggtgctcggattgtctgctgcccccggatgggcaggcgcgccgccagtcgacgtgctgcgggccctgagatttccatcgctgcctgatggagtgcgacgcgcgaaaggaatttgtccagctgatgttgcctatcgtgtggccagaccagcacagctatctgcgccaactaggcaactgtttcccggcgggtttccaaaggacttcagcttgctcactgtcgttcggacaaggcctgggttgcaagcacccctgctgacgctgtactccgctcagggggtccggcaattgggcctcgagctcggccggccggtgcgctttctatacgaggatcagaccgggcgacctcagcctccatcgcagcccgtctttagggggctgagcctggcggacggcaaatggcaccgggtagccgtggccgtaaagggccagtctgtgaccctcatcgtggattgtaaaaaacgggtgactagaccgctgccccggagcgcgcggcctgtcctcgacacccacggcgttatcatctttggagccaggattttggacgaggaagttttcgagggagatgttcaggagctggccattgttcctggagtgcaggcagcttatgaaagctgtgaacagaaagagttagagtgcgagggcggtcaaagggaacggccccagaaccagcaaccacacagggcccaacgttctccccagcagcagccttctcgccttcatcgtccgcagaaccaggaaccccaatcacaggagcaaacagacctgcaagtaccacctacagccgatcgtttccaggccgaggagtatggcgaaggtggaacagatcccccagagggaccatacgactatacctacggatatggcgacgactaccgcgaagagaccgaactgggacctgcactctccgctgagaccgcacactccggggccgccgcccatgggccaagaggactaaaaggagaaaagggggagccagccgttctcgaacccgggatgctcgtggaaggacctcccggccctgagggtcccgccggcctcattggcccccctggaatccagggtaacccaggccctgtgggcgacccaggggagcgcgggccccctgggcgagccggactaccgggctctgacggagcgcccggaccacccggaacatccctgatgctccccttcagattcgggagcgggggcggcgataagggcccggtcgtggccgctcaagaagcccaggcccaggctattctgcagcaagctagattagctctgaggggccccccaggcccaatgggctacacaggtagacctggacctctcggacagccgggctcgcccggcctgaagggggagagcggggacttggggccccagggccccagaggaccccaggggctgaccggtcctccaggcaaggccggaagacgcggacgcgcaggagcggacggggccagggggatgcctggcgatcccggggttaagggagataggggttttgacgggttgcctggtctcccaggagagaaagggcaccggggggacactggggctcagggcctccccggacctcccggtgaggatggagaacgcggggatgacggagagattggtcctcgaggccttccgggagagagtggcccccgggggctcctcggccccaaaggcccccccggcatacccggtccacctggcgttagagggatggatggcccccaaggcccaaaaggttccttaggaccgcaaggcgagcccggaccgccaggtcagcagggcacccccggaacacaaggattacctggccctcagggggccattggacctcacggggagaagggccctcaaggaaaaccaggtctgcctgggatgcctggatctgatggaccgccagggcacccaggtaaggaaggccctccaggcaccaaaggtaaccaggggccatccggtccacaggggccacttggttatccgggccctaggggagtaaagggcgttgatggtatacggggcctgaagggtcataagggggagaagggcgaagacgggtttccgggcttcaaaggcgacatcggagtgaagggtgacaggggcgaagtgggtgtgccggggtcaagaggcgaagatgggccagagggacccaaggggcggaccggtcccacaggggaccctggaccgcctggactaatgggagaaaaaggaaagctcggggtacctggactcccaggatacccaggtaggcagggccccaaaggctctctcggctttccaggcttccccggtgcctccggcgaaaaaggcgcaagggggctgtcaggcaagagcgggcctagaggcgaacggggtcccaccggtcctcggggtcagagggggcctcgcggcgctaccgggaagagcggagcgaagggcacgagcggtggcgacgggccgcacggtccgccaggggaaagggggctaccaggccctcagggaccaaacggatttccaggaccgaaaggaccacccggtccccctgggaaagacgggctgcctggtcatcctggacagcggggagaagtagggttccagggcaagaccggcccaccaggaccccccggggtcgtcggccctcagggcgcggcaggagaaacgggccctatgggggagcgcgggcaccctggacccccaggacctcccggggaacagggcctcccgggcacagctggcaaggaggggacaaaaggagatccaggacccccaggcgctcccgggaaagacggacccgctggcctgcgaggattcccaggcgagcgaggtctgcccggaactgcgggcggtccagggctgaaaggcaatgaggggcccagcgggccccctggccctgccggctctcccggagagcgcggtgcagccggaagtggtggtcctatcggtcccccagggcgccccggcccccagggacccccgggagctgccggagagaagggggttcctggagaaaaggggcccattgggcccactgggcgagatggggtgcaggggccagtgggtttaccaggccccgctggtcctcctggcgtagccggcgaggacggagacaagggcgaggttggggatccagggcaaaaggggacaaaggggaacaaaggcgaacacgggccaccggggccccctggcccgatcggaccggtgggacagccgggcgcggccggcgcggacggcgaaccaggcgcgcgtggtccccagggacatttcggagctaagggtgatgaagggacgcgaggctttaatggtccccccggtccgatcggtttacagggccttcccgggccttctggggagaaaggcgagaccggcgatgtgggacccatgggccccccaggacctcccggcccgagaggacccgccggcccgaatggcgccgacgggcctcagggacctccgggcggagtggggaatctcggaccccctggggaaaagggtgagccaggggagtctgggtcccctggcatacagggggaacctggtgtcaagggcccacgcggagaaagaggagagaagggcgaaagcggccagcccggcgaaccaggtccgcctggccccaaaggcccgactggtgacgacggcccaaagggcaaccccggcccagttgggttcccaggtgaccccggcccgccgggggagggcggcccaaggggccaggacggtgcgaagggtgaccgcggcgaggacggtgaacccggccagccaggttctccaggacctactggcgaaaatggaccccccggtccgctgggtaagaggggcccagccggatcccctgggagcgaaggtaggcagggaggaaaaggtgccaaaggagatcctggtgccatcggggcccctgggaaaaccggccccgtcggacccgcgggacccgccggtaaacccgggcccgacggattaaggggcctgccaggttcggtcggacaacagggacgccctggagccactggccaggcaggtccccctggcccagtggggcctcccgggctcccaggtctcagaggtgacgccggcgcaaaaggtgagaaaggtcatcctgggctgattggcctgatcggtccacccggcgagcaaggagaaaagggggatcggggcctccccggccctcagggcagtcctgggcagaaaggcgagatgggaattccaggtgccagtgggcctatcggccctggcggtcctcccggactgcccgggcccgctgggcctaagggggcgaaaggcgcaaccgggcccggaggacctaagggagagaaaggagtacaagggcccccgggccacccgggccccccaggggaggtgattcaacccttgcctatccagatgccaaagaaaacaagacgtagcgtggatggcagccgtttgatgcaggaggacgaagccattccaacgggtggcgctccaggatcacccggaggcctggaagagatctttgggtctctcgactcactccgcgaggagatagaacaaatgcggcgcccaactggcactcaggacagccccgccagaacctgccaggatctgaaactctgtcacccagaactgccggatggtgagtattgggttgacccaaatcagggatgcgccagggacgcctttagagtattttgtaattttaccgccggtggcgaaacttgtgtgacaccacgcgatgatgtgactcagttttcttatgtggattccgaagggtctcctgtaggcgtggtccaactgacattcctgagattgctcagcgtgtcagctcaccaagacgtctcctatccttgctccggggcagctagggatggtccactgcgattacggggagcaaatgaggacgagttgtcccccgaaacctcaccttatgtgaaggaatttcgggacggatgccaaacacagcaagggaggaccgtgttggaggtccggactcccgtgctggagcagctgccggtgcttgacgcgagtttttcagacctcggagctccgccaagaagaggaggcgtacttctgggcccagtgtgtttcatggggtag

SEQ ID NO: 232579 - DNA, 5211 bp, Artificial Sequence
  derived and/or modified sequence
atggagcggtgcagccggtgccaccggctgctgctgctgctgcccttggtgttgggcctcagcgccgcccctgggtgggccggggctccaccagtagatgttctgagagcactgcggttcccatcgcttccggacggggtgaggcgggccaagggaatttgtcctgctgacgtagcctatcgggttgccagacctgctcaactgtctgcacctaccagacagctgttccccggaggcttccctaaggatttttcactgctcactgtcgttcggacaagacccgggttacaggctccactgctgacgttgtatagtgcacaaggcgtgagacagctgggcttagagctggggccacctgtgcggtttctgtatgaagatcagaccgggaggcctcaacccccatcccagcctgtctttagggggctgtctctagccgatggtaaatggcaccgggtggcagtcgccgtgaaggggcagagtgtgaccctcatcgttgattgtaaaaagcgagtgacccgtccacttccacgttccgcccgtccagtgctggatacacatggcgtaatcatctttggggcacggatccttgatgaagaggttttcgagggagacgtgcaagagctggccatagtaccgggggtccaagctgcctatgaatcctgtgagcagaaggagttggaatgtgaggggggacagagagagaggccccagaatcagcaaccacaccgggctcagcgctcccctcaacagcagccaagtagattacatagacctcagaatcaggaaccccagtctcagcctactgaatccctatactatgattataagcccccttactacgatgtgatgacaaccggaactacgcctgattaccaggaccccacacccggcgaagaggaagagatccttgagtcctccctgctgccacctctcgaggaggagcagacagatctccaggttccaccaaccgcagataggtttcaggccgaggagtacggcgagggtggcactgacccccctgaaggtccatatgattacacatacggttacggcgacgattatagggaggagacggagctgggtcctgccctctctgcagagaccgcacattcgggtgcagcagcccacgggccccggggacttaagggagagaagggtgagccagctgtcctggagcctggcatgctggttgaaggtccacccggacccgaaggccctgccggcctgatagggccacctgggattcaggggaatcccggacccgttggggaccctggagaaaggggcccacccggtagagccgggctgcccgggagcgatggggcccccggcccacccggaaccagtctgatgctgccgtttaggttcgggtctggcgggggagacaaagggcctgtggtggccgctcaggaggctcaagctcaggccatcttacagcaagcccgcctggctctgcgagggcccccaggacctatgggatatacgggacgtcctgggccactgggtcagcccggtagtcccgggctgaagggtgaaagtggggacctgggccctcaaggacctcgaggccctcaaggccttacggggcctcctgggaaagctgggcggcgtgggcgtgccggcgccgacggcgcaagggggatgcctggtgatcctggcgtgaaaggagacagagggttcgatggcttgccaggcttgccaggggagaaaggacacagaggtgatacaggtgcccagggactgccaggcccccctggagaggacggagagcgcggcgatgacggggaaatcgggcccaggggccttcctggagagtctggacccagagggctcctgggcccaaaagggcctccaggtatacccggtccaccgggcgtgcgcggcatggatggacctcagggtcccaaaggttccttagggcctcagggagagccgggacctccaggacagcagggaacacctggaactcaggggcttcccggccctcaaggggccattggcccgcacggagagaaggggccgcaaggaaaaccagggcttcctggcatgcccggaagtgatggtccacccggacaccctggcaaggaagggccaccaggtacaaaaggaaaccagggccctagtgggccacaaggaccattaggctatccgggtccccgtggtgtgaagggtgtggacgggattcgggggctcaaaggacataaaggtgaaaaaggtgaggatggctttccaggatttaagggcgatatcggcgtgaagggcgaccggggcgaggtcggtgtgccaggaagcagaggcgaagatgggcctgaggggcccaagggccgaactggtcctaccggcgacccaggcccacccggattgatgggcgaaaagggtaagcttggggttcctggtctaccaggttatcccggacgacagggcccaaagggaagtctgggctttcccggcttccccggcgcctctggtgagaagggagcacgaggactatccgggaaatcggggccaagaggggagcggggtcccaccggtccgcggggtcagcgcggaccgaggggagcaacaggtaagtcgggcgccaaaggcacaagtggcggagacggtcctcacggtccacccggagaacgagggctgccaggcccacagggtccgaacggatttcctggcccaaagggccctccaggcccgccagggaaagatggtctgcccggacaccccggccagaggggggaagtgggctttcagggcaagacgggaccgcccgggccgccaggagtggtgggccctcagggagctgctggagaaacggggcctatgggtgaaaggggccaccctggccccccagggccgcctggcgaacagggtttacccggcaccgctggtaaagaggggactaaaggggaccccggaccccccggcgcaccaggaaaggatgggcccgcgggattgaggggtttccccggcgagcggggactccctggcacggctggcggcccagggttgaagggcaacgaaggcccgtcgggcccccctggccccgccggctcacccggggagcgaggagctgccggcagtgggggccccatcggtccccccggcagaccaggtccccaggggccacccggggctgccggggagaagggagtgcccggcgagaagggacccattgggcctacaggccgcgacggggtgcaggggccggtgggcctccctggcccagcaggaccacccggggtagctggcgaagacggagataagggcgaggtcggcgaccccgggcaaaagggaacgaagggaaataagggggaacacggtcctcccggacctccagggcctattggcccagtgggtcagcctggtgcagcgggggctgatggtgagcctggcgccagaggacctcaaggccatttcggagctaagggtgacgagggcaccaggggattcaatggcccgcctggtcccatcgggttgcaggggcttcctgggccttcaggggaaaagggggagacaggggacgtgggccccatgggcccccccggcccgcccggacccaggggtcctgccggaccaaatggtgccgatggtcctcagggaccaccggggggcgtgggcaacttgggaccgccaggagaaaagggcgagccaggagagtcaggctcccctggaattcaaggcgagccaggagtcaagggtcctaggggtgagagaggggagaagggcgagagcggacagcctggcgaacccggacccccaggtccgaaaggccccacaggagacgatggtccaaagggaaatcccgggccggtcggctttcccggtgatcccggaccaccaggcgaggggggtccacgaggtcaggacggtgccaagggagaccggggcgaagacggcgaaccagggcagcctggtagccctggacccaccggcgaaaatggaccaccaggccccttggggaaaagaggaccagctggctctcccgggagcgaagggcgacagggtggcaagggtgctaagggagatccaggagccattggagctccaggaaaaacaggtccggtcggaccagctgggcctgctggcaaaccaggacctgacggactgcgtggactccctggatctgtcgggcagcagggtcgtccaggggccactggacaggccggcccacctggtcccgttgggccccctggccttcccggcctgagaggcgacgccggcgccaaaggagagaagggccatccgggcttgataggcctcattgggccgccaggagaacaaggcgagaaaggcgaccgtgggctccctggccctcaaggatccccaggccagaagggcgaaatgggaattccgggcgcatctggtcctattgggcccggcggacctccaggactcccaggtcctgcggggccaaaaggagccaagggcgctactggccctggtgggcccaaaggagagaaaggcgtgcaaggaccccccgggcaccctggaccaccaggtgaggtgatccaaccattaccaatccaaatgcccaagaaaacccgcaggtccgtggatggctcacggctgatgcaggaggacgaggcaattcccactggcggagctcccggttcccctggtggcctcgaagagatctttggctccctggattcccttagagaggaaatagaacagatgcggagacccacaggaactcaagacagcccagcaaggacttgccaagacctgaaattatgccacccagagttaccagatggcgagtactgggttgatcccaaccaaggctgcgctagagatgctttccgggtgttttgtaacttcacagctggtggtgagacatgcgtgacacctcgcgatgacgtcacacagtttagctatgtggattccgaggggagccctgttggagtggttcagctgaccttcctgcggctgctgagcgttagcgcgcaccaggatgtgtcttatccatgttccggcgctgcccgggacggtccactgaggttgaggggcgctaatgaagacgagctctccccagagaccagcccttatgtgaaggaatttcgcgatggttgccaaacccagcagggacgaacagtgcttgaggtaagaactcccgtactggagcagctaccggtgctggacgcctctttctctgacttaggcgcccctccccgccgcgggggcgtgctgctcgggccagtttgtttcatgggctag

SEQ ID NO: 232580 - DNA, 5148 bp, Artificial Sequence
  derived and/or modified sequence
atggagcggtgcagccggtgccaccggctgctgctgctgctgcccttggtcctggggctgagcgctgcccccgggtgggccggcgcaccacctgtggatgtgctccgtgcgctgaggttcccttcgctgcccgatggagtgaggcgcgctaaagggatctgccctgccgacgtggcctaccgagtcgctcgtcccgcccagctgagcgccccaactcgccagctcttccctgggggattccccaaggacttttcgctcttaactgttgttagaaccagaccgggactacaggcccccttgctaaccctgtattcggcacagggagttagacagctgggactggagcttggacgacccgtgcgtttcctttatgaggatcagactgggaggccacagcccccttcccagcctgtcttcaggggcctctcactggccgatggcaagtggcaccgggtcgccgtggctgtgaagggacagtcagtgaccctcatcgtggactgcaaaaagcgggtgacaagaccattgccaaggtcagctcgccctgtcctggatacccatggtgtgattattttcggcgcaagaatccttgacgaggaggtatttgagggggatgtgcaggagctggcaattgttcctggcgttcaggccgcatatgagtcatgcgaacaaaaagaactggaatgcgagggagggcaacgggaacggcctcagaatcagcagcctcatagggcacagcggtcccctcagcagcaaccctcccgtctgcatagaccccagaatcaggaacctcagtcccagccaacggagtctctgtactacgattatgaaccaccatattatgatgtaatgaccaccggaaccacccctgactatcaggaacagaccgacctacaagtcccacccaccgccgaccgattccaggccgaagagtatggggagggcggaacggaccccccggagggaccctacgactatacatacgggtatggcgacgattacagggaggagacagagctcggcccagccttgtctgccgaaaccgcccatagcggtgctgccgcacatgggcccaggggactcaagggcgaaaagggcgagcctgctgtgttggagcccgggatgcttgtggaaggcccccccggtcccgagggaccggcaggcttaatcggccctcccggcattcagggcaacccaggacccgtgggcgatcctggcgaacggggtccacccggtcgggctggcctgcctggctccgacggagctccaggccctcctggcacttcactcatgctccccttccgctttggtagcggcggaggtgacaaagggccagtggttgcggctcaggaggcacaggcacaggctatactgcaacaggcgaggttggcattacgcgggccacccggccccatgggttataccggtcggcctgggcctctgggacagcccgggtctcccggcctcaaaggagaatctggggatctgggaccacaagggcccagaggcccgcaaggactgacgggtccccctggtaaggcaggtaggcgtggacgggctggcgcggatggggctaggggcatgcccggcgatcccggcgtgaagggtgatcgcggtttcgatggcctgcccgggttaccaggcgagaaggggcatcgcggcgacaccggtgcccaggggctgcccgggccccctggcgaagacggagagcggggcgacgatggcgagatcggccctagaggcttacctggagaatcaggacctagaggcctcttaggccccaaagggccccccggcatacccggacctccaggtgtcaggggcatggatggcccgcaggggcctaagggcagcctagggcctcaaggagaacctggacctccaggtcagcagggtacgcccgggactcagggactgcccgggcctcagggggctatcgggcctcacggggagaaagggccacagggaaagccagggcttcccggaatgccaggcagtgatggtccccccggacatcctggcaaggaggggccgccgggaacaaaaggcaatcagggccctagtggtccccaggggccactgggctacccagggcccagaggggtgaaaggcgtggacggtatccgcggcctgaagggacacaagggagagaagggcgaagacggttttcctggtttcaagggagacatcggtgtgaagggcgataggggcgaggtaggcgttcccgggagccgcggagaggatggccccgaaggacctaagggacgcactggcccaacaggagaccccggaccacccggactcatgggcgagaaaggcaagctcggtgtgcctggccttcctggatatcctggccggcaagggccaaagggcagtttgggcttccctggtttcccaggagcttctggcgaaaaaggcgcacgggggttgtccggtaagagtggcccaaggggggagagaggccctaccggtccccgaggtcagcgaggccctaggggcgctactggaaaaagcggtgccaaaggcacttccggcggcgatgggcctcatggcccacccggtgaacggggtttaccaggaccacaagggccgaatgggtttccaggcccaaaggggcccccaggccccccaggcaaagacggcttgcccgggcatcctggccagcggggagaagtcggctttcaaggcaagacaggtccccctggccctccgggtgtggttggtccgcagggcgcggcaggcgagaccggacctatgggggagaggggacaccccggtccacccgggccaccgggggagcagggattacccggaactgcgggaaaggagggaaccaaaggggatccggggcctccgggtgcccccgggaaagacggccctgcgggccttcgtgggttccccggggaacgggggctgccaggaacagctggtggccctgggctgaaggggaacgagggaccatccggtccacctggtcccgccgggtctcctggagaaagaggtgccgccggatcgggtggacctattggccccccaggaagaccaggtccgcagggtcctccaggcgccgctggcgagaagggcgtgcccggtgaaaaaggccctattgggccaacgggccgcgacggggttcagggtcccgtgggtctgcctgggcccgccggcccaccaggcgtggcaggagaggatggtgacaagggtgaggtgggcgatcccggtcaaaaaggcacgaaaggtaacaaaggcgaacatggcccgcccggccctccaggccctattgggcctgttgggcagccaggagcagcaggcgccgatggtgaacctggagcacgaggtccccagggccacttcggcgctaagggggatgagggcacccgggggttcaatggcccgccaggcccaatcgggctacagggacttccgggacctagtggcgagaagggcgagactggggacgtgggcccaatgggcccccccggccccccgggacctaggggcccggccgggcccaacggcgcggatggcccccaggggcctcctggcggtgtgggcaacctggggcctcctggcgagaagggagagcctggggagtccggatctccaggcatccagggggagcccggcgtgaagggcccgcgcggagagcgtggcgaaaaaggcgagagcggacagccgggggagcctggcccccctggccctaagggccctactggtgacgatgggccaaagggtaaccccgggcccgtgggctttccgggcgatcctggcccccctggtgagggtggcccccgtggacaggatggagctaaaggagaccgcggcgaggatggggaacccggacaacccggaagtcctggccctacgggagaaaacggccccccgggacccctgggaaagcgcggaccagccgggtcaccaggtagtgaaggaaggcagggtggtaagggcgccaagggagaccctggagccattggagcccctggcaagacaggacccgtagggcctgcggggcctgcaggaaagccaggacccgatggccttcggggactacctgggtctgtcggccagcaggggaggccgggcgctactggacaagcaggcccaccgggcccggtcggaccacctggactcccaggcctccggggcgacgctggggcgaagggtgagaaagggcatcctggcctgatcggtctcatcggtcccccgggtgaacaaggggagaagggagacaggggcttgcctggtccacagggctcaccaggccagaaaggagaaatgggaattccaggcgcctctggccctatcggccctggtggacctccaggcttacctggacccgcaggacccaaaggagcgaagggcgccaccggacctggtggaccgaaaggtgagaagggcgtacaggggcctcccggacaccccggaccgcccggagaagtcattcagcccttgccaatccagatgccaaaaaagactaggagatccgtagacggatcccggcttatgcaagaagacgaggctattccaactggcggcgcgccaggatcacccggtgggcttgaggaaatctttggatccctcgacagtctgcgggaagagattgagcagatgagaagacccacgggcacacaggattccccggcgagaacatgtcaggatctgaagctatgtcaccctgaattacctgatggcgagtactgggtggacccaaatcagggatgtgcccgtgatgctttccgcgtcttctgcaactttacagctggaggcgaaacatgcgtgacccctcgcgatgacgtcacacaattttcatacgttgactcggaaggtagcccagtaggcgtcgtgcagctgacatttctccgtctgttgagcgtatctgctcaccaagatgtgtcctatccttgcagcggagccgcccgggacggtccactcagactccggggcgcaaatgaagatgagctgagtcccgagacgagcccatatgtaaaagaatttcgtgacggctgtcaaactcaacagggtcgaacagtcctggaggtgaggacacctgtcctggagcagctcccagtactcgatgcttctttcagcgatctcggagcccctccaaggaggggcggagtgctactcgggcctgtgtgcttcatgggctag

SEQ ID NO: 232581 - DNA, 5211 bp, Artificial Sequence
  derived and/or modified sequence
atggagcggtgcagccggtgccaccggctgctgctgctgctgcccctggtgctcggcctatctgcagcgcccggctgggctggcgccccacccgtggacgtgctgagagcattacggtttccttcacttcccgacggcgtgcggagagcaaagggcatttgtccggcagacgtggcctatcgggtggctcgccctgcccagcttagcgctccaacccggcagctatttcctggcggttttccaaaggacttttcgcttctcaccgtggttagaactaggccagggctgcaggcaccgctcctgacactgtactcggctcagggggtacggcaactgggcctggaactgggtcggcctgtccgcttcctgtacgaggaccaaaccggtcgacctcagccaccttcacagcctgtcttccgaggattgagcctcgcggacggaaaatggcatcgtgtcgctgttgccgtcaaaggccagtctgtgaccctcattgtggactgcaagaaaagggtaactcgacccctaccgcgtagcgcccggcccgtgcttgacacccacggtgtgatcatttttggggcaaggattttggatgaggaggtgttcgagggcgatgtccaggaactggctatcgttcctggagtgcaggccgcctacgagagttgcgaacaaaaggagctcgagtgcgaggggggacagcgcgagcgccctcagaatcaacagcctcatagggcgcagcgcagcccacagcagcagcccagccgtcttcaccgcccacagaaccaggagccccagtcacaaccaactgagtccctttactacgattatgagcccccatactatgatgtgatgaccactgggacgacccccgattatcaggatccaacacctggagaagaggaggaaattctggagagcagtctcctgccgcctctggaggaggaacagaccgatctacaagtgccgcctacggccgatcggttccaagctgaagaatatggcgaaggtggcaccgatcccccagaaggaccatatgattacacgtatggctatggggacgactatcgagaggaaaccgaactcggccctgccctttcagccgagacggcccattctggggccgccgcacacggtcccaggggtctcaagggggaaaagggtgaaccggcagtgctggaaccaggcatgctggtggagggaccgccaggacccgaaggtccagccggcttaatcggaccccctggcatacagggaaatccaggaccggttggagatcctggggagaggggcccccccggacgggcagggttaccggggtccgacggggcccccggtccgccaggcacatcccttatgctccctttccgtttcggttccgggggaggagataaaggccctgtggtggccgctcaggaggctcaagctcaggcaattctgcaacaggctaggctcgccttgcgaggtccacccggtcctatgggatatacaggcagaccaggccccctgggacagccagggagccccggacttaaaggtgaatctggagatctgggtcctcagggccctcggggcccccagggactgacgggcccacccggcaaggctggtagaagaggacgggccggagcagacggtgcccgggggatgcctggagaccctggcgtgaagggtgacaggggttttgacggactcccaggacttccaggggagaagggacacaggggcgataccggggcacagggccttccgggacctcccggagaggacggagagagaggcgatgatggcgagatcggccctcgaggccttcccggtgagagcggacctcggggcctcctcgggccaaagggcccaccaggaattcctggccctcctggagttagaggcatggacggtccccagggtcccaagggatctttgggaccccagggtgagccgggccccccaggacaacaaggaaccccaggcacccaaggattacctggcccacaaggggccatcggacctcacggtgagaaagggccccaagggaagcctggtttgcccgggatgccaggctcagacgggccccccgggcacccgggtaaggaagggcctcctggtaccaaaggcaaccaggggcccagcggtccccaggggcccttgggctatccgggtcccaggggggtcaagggggtcgacggaattcgcggcctaaaaggacataagggtgaaaaaggggaggacggctttcctggattcaaaggcgacatcggagttaaaggcgatagaggggaggtgggggttccagggtcccgaggcgaggacggcccggagggacccaagggccgaacggggcccacaggcgatcccggtcctccgggcctgatgggggagaagggaaagctaggcgtgcccggccttccaggctatcccggaaggcagggccccaaaggctctctgggcttcccagggttccccggggcatccggcgagaaaggcgcacggggcctcagcgggaaatccgggcctcgaggagagcgtggaccaaccgggccccggggccagcgagggcccaggggggccactgggaagtccggcgccaaggggacaagcggtggcgatggcccgcatgggccacccggtgagaggggcctaccgggcccccagggaccaaatggattccctggtcccaaaggcccacctggtccgccgggcaaggatgggctgccaggccacccgggtcaacgaggagaggtgggatttcaagggaagaccgggcctccagggcctcccggcgtggtgggtccccaaggagctgcaggcgaaactggccccatgggtgaaagggggcacccaggaccacccggaccccctggagaacagggactgcccgggaccgctgggaaggagggtactaagggcgaccccggtccacccggggcaccagggaaggacgggccagcaggcctccgaggctttccaggcgagcgggggcttccaggcaccgccggcgggcctggactcaagggtaacgaaggcccttccggcccccccggccctgccggatcccccggcgaaaggggggcagctggtagcggcggccctatcggaccacccggccgcccgggccctcagggaccccctggagccgcgggagagaaaggcgttcctggggagaagggccccatcgggcctacgggacgggacggcgtgcagggacccgtggggctcccaggcccggcaggcccccccggagtcgccggagaagacggggacaaaggtgaggtgggcgaccctggccagaaagggacgaaggggaataagggcgagcacggacccccgggcccgccagggcctatcgggccagttggtcaacccggggcggcgggggccgacggggaaccaggcgcccgaggtcctcaggggcacttcggagcgaaaggggacgaagggactcgaggcttcaacggcccccccggccctatcgggctgcaagggctccccggacccagcggggagaagggcgagactggggacgttgggccaatggggccccccggtcctccgggccctaggggccccgcaggcccaaatggcgctgatggtcctcaaggaccgccaggcggagtgggaaacctgggtccaccaggcgagaagggcgaacctggcgaatcaggtagccccggtatacaaggcgaaccaggcgtcaagggccctcgaggcgagcgcggtgagaaaggcgaaagcgggcaacctggggagcccggcccccccggcccgaagggccctacaggtgacgacggccccaaggggaaccctgggcctgtgggatttcctggcgaccctggcccccccggtgaaggaggtcctaggggacaggacggggcaaaaggggacagaggcgaggatggggaaccagggcagcctggaagccccgggcccacaggcgagaacggtcccccaggcccgcttggcaaacggggtccggccgggagcccagggtccgaaggtagacagggtgggaaaggcgcaaagggcgatccaggcgctattggagcccctggcaagaccggtcccgttggaccagcagggccggcaggcaaaccggggccagacgggcttcggggactccctggctctgtgggccagcagggcagacctggggccacaggtcaggcaggacctccaggcccagtcggacctccgggcctaccaggactccgcggagatgcaggggcgaagggagaaaaggggcatcccggtctgattggacttatcgggcctcccggagaacaaggtgagaagggagacaggggccttcctggcccccagggaagcccaggacagaagggggaaatgggcatcccaggcgcatccggaccgatcgggcctggtggtcctcccggactgcccggaccggcaggacccaaaggtgctaagggcgccacaggtcccggaggacctaagggagagaagggagtgcagggcccgccagggcaccctggtccgcccggtgaggtgatccagccactgccaattcagatgccaaagaaaactcggagaagtgttgatggaagtcgtctgatgcaggaggatgaggctattcccaccggtggagcccctggaagccctggaggactggaggaaatatttggctctctcgattcgctacgggaggagattgagcagatgcggagacccactggcactcaggactccccggcaagaacatgtcaggacctgaaactttgtcaccctgaattacctgacggggagtattgggtagaccctaaccaggggtgcgctcgggacgcttttagggtcttctgtaatttcaccgcagggggtgaaacctgcgtgaccccccgcgacgatgtgacacaattctcctacgtggacagtgaaggaagcccagtgggggtcgtgcagctaacatttctgcggctgctttcggtttctgcgcaccaggatgttagctacccttgcagcggcgcagctcgggatggcccattgcggttgcgaggggctaatgaggacgagctgagccccgagacttcgccatatgtgaaggaattccgagatgggtgtcagacacagcagggccgcactgtccttgaagtgcgcacacctgttctcgaacaactgccggtgttggacgcatccttttctgatcttggcgctccaccccggagaggcggagtactgctcggaccggtatgtttcatgggatag

SEQ ID NO: 232582 - DNA, 5070 bp, Artificial Sequence
  derived and/or modified sequence
atggagcggtgcagccggtgccaccggctgctgctgctgctgcccttggttttagggttaagtgcggctccggggtgggctggtgcaccacctgtggatgtcctccgggctctgagattcccaagcttgcctgacggggtgaggcgcgccaaagggatctgcccagctgatgtggcctaccgcgtggcgcggcccgcccaattatccgctccgaccaggcagctgttcccagggggctttcctaaggatttcagtctcctaacagtggtgaggactaggcccggactccaggcccccctgctaacactttattccgcccagggcgtgaggcagctggggttggaactaggcaggcccgtaaggttcctctacgaggatcagacaggaagacctcaacctcctagtcagcctgtgtttagaggtctgtcactcgccgacggcaaatggcatagggtcgccgtggcggtgaaaggacaatctgttacactgattgtggattgtaagaagcgggttaccagaccactccctcgaagtgccagacccgtgttagacactcatggagtgatcatatttggcgctcgaattctggacgaggaggtgttcgagggggacgttcaggagctcgccatcgtgccgggagttcaggctgcttatgaatcgtgtgagcagaaagagctggaatgcgagggaggacagagggagcgccctcaaaaccagcagccacacagggcccaacgctcaccgcagcaacaaccatccagacttcacaggcctcagaatcaggaacctcaaagccaggagcaaactgacctccaggttcccccgaccgccgacagattccaggccgaggaatatggcgagggtggcacagacccacccgagggaccatatgattacacctacggttatggtgacgactatcgggaagaaaccgagctcggacccgctttaagcgccgagaccgcccatagtggcgccgccgcccacggaccacgcggactcaaaggcgaaaaaggcgaacccgcggtgttggagccagggatgctggtcgagggacctcctggacccgaaggtcccgcagggttgattgggccgccggggatccaaggaaatcccggcccagtgggggatcctggcgagaggggcccacccgggcgcgccggtctccctgggagcgacggagccccaggcccccctgggacctctctcatgttgccctttcggttcggtagtggcgggggtgacaaaggccccgtcgttgctgcccaggaagcccaggctcaggcaattctgcagcaggccaggcttgcgctgagaggcccccctgggcccatgggctatactggtagacctgggcctttgggccaacctggttcacccgggttgaagggtgaatcaggagatttaggaccccaaggaccccgggggcctcaaggcctcaccggcccaccaggcaaagcagggaggaggggaagagctggtgctgacggagcacggggcatgccaggcgaccctggcgttaaaggggatagaggattcgacgggctgcccggactgccgggagagaaggggcacagaggagacacaggcgctcagggacttcccggtcctccaggggaggacggcgagaggggtgacgacggagagatcggtccgcgtgggttgccaggtgaatctggcccccggggcctgcttggtcctaagggccccccaggaattcccgggcctccaggagttaggggaatggatgggcctcagggtccaaaggggtctctcggcccgcagggcgaaccaggcccacctggtcaacaaggaacacctgggactcagggactaccaggaccccaaggggccattggtcctcacggtgagaagggccctcagggcaagcctggcctccctggtatgcctggtagcgatggcccgccagggcatcccggcaaggagggtcctcccggtactaaaggcaaccagggcccgtccggcccgcaagggccactcgggtatccaggcccaagaggggttaagggagtggacggcatacgtggcctgaagggccataaaggggagaaaggagaggacggcttcccgggcttcaagggggacatcggagtcaaaggcgatagaggcgaggtaggggtgcctggatcccggggggaggatggccctgaggggcctaaggggcggactggccctacaggtgacccgggaccgcccggtctcatgggagaaaaagggaaactgggagttccagggctcccaggctaccctggtaggcagggcccaaagggatcacttggcttccctggctttcccggggcttcaggtgagaagggggcacggggcctgtcaggcaaatccggcccacggggcgaacgggggcccactggaccacggggacaacgggggccccgtggggctacaggcaagtctggcgcaaaagggacatcagggggggacgggccacacggtcctccaggggaaaggggactgccaggtcctcaaggacccaatggcttccccggacccaaaggaccacccggcccgcccgggaaagacggcctgcccggccatccgggacagagaggggaagtgggattccagggcaagacgggcccccccgggcctcccggcgttgtgggacctcaaggcgctgctggggaaacaggcccaatgggtgaaagaggacacccaggtccccctgggcctccgggagaacaaggtctgcctggcaccgccggaaaggaggggaccaagggggaccctgggccccctggcgctcctgggaaggatggcccggcgggcctgcggggattccctggtgaaagggggctgcccgggactgcgggcggcccaggacttaaggggaatgaaggacctagcggaccacctggacccgctggatctccaggcgaaagaggggccgccggcagtggaggcccgatcgggcctcccggaagacccggtccacaggggcccccaggcgccgcgggtgagaagggcgttcctggggagaagggcccaataggtcccaccggacgggatggggtgcaaggacccgtgggtctgcctgggccagctgggcctccgggagtcgctggagaggacggggataagggagaggtgggtgacccgggccagaagggcaccaaaggcaataagggggagcatggccccccaggccccccaggacctatcggccccgtggggcaacccggtgctgccggagcagatggcgagcctggggcgagaggcccccagggtcatttcggcgctaagggggatgaggggacacgcgggttcaatggcccgcccggacctatcgggctccaagggcttcctggtccttcaggagaaaagggggagactggtgatgtgggacccatggggccccctggccctccaggtccacgcggacccgcgggcccaaacggtgcagacggtccacagggccctcccgggggcgtcggcaacctgggccctcctggcgagaagggcgaacccggggaatcgggctccccggggatacagggcgaaccgggcgtgaagggaccacggggcgagcgcggcgaaaagggcgaaagcgggcagccaggagaacccggacccccaggccccaaaggaccgacaggcgacgacggccctaaagggaaccccggcccagtgggctttccgggcgatcccgggccccccggagaaggaggcccccgcggccaggacggcgcaaagggtgacagaggagaagatggtgaacctggccagcccggaagtccaggtccgacaggagaaaacgggcctccaggccctttagggaagagagggccagctggtagccctggaagcgagggaaggcaagggggaaagggggccaagggcgacccaggtgccattggcgcacctggcaaaaccggccctgtggggccagctggccctgccggtaagcctggccctgatgggctacgagggctacctggaagcgttggccaacagggcaggcccggagccactggacaggccggacctcctggacctgtcgggcctccgggactgcccggactgcggggcgacgccggcgccaagggggaaaagggccatcccggtctgatcggcctgatcgggcctccgggggaacaaggcgagaaaggcgacaggggcttaccaggcccacaggggagccctgggcagaaaggcgagatgggcatacctggagcttcgggacccattggacctggagggccacccggcttgcccggccctgccggccctaagggggctaaaggagccactggtccagggggaccgaaaggggagaaaggcgttcagggaccacctggtcacccaggaccaccaggagaagtcattcaacctctgcctatccagatgcctaaaaagacccgtcgaagtgtcgacggttccagactgatgcaggaggacgaggcaatacccacaggcggtgcccctggtagccccggtggcttggaggaaatattcggctctcttgattctctgcgggaggaaattgagcagatgagaagacccaccgggacgcaggatagccccgctcggacatgtcaagatttaaagctttgtcacccagaattgccagatggagaatactgggtggaccccaatcagggttgcgccagagacgcttttagggtgttttgcaacttcaccgctggcggggaaacttgcgtcacccctcgcgacgatgtaactcaatttagttatgtggattcagaggggagcccagtgggagtggtgcagctcacctttctgcggctcctttccgttagtgcccaccaggatgtgtcatatccctgctcaggcgccgcgagggacggacctttaaggctgcgtggagccaacgaggatgaattgtctccggagacctccccttatgtaaaagaatttagggacgggtgccagacacaacagggtaggacagttctggaggtaagaacccctgtcctggagcagcttcccgtgctcgatgcctcattctccgatctgggggcacccccccggcgaggaggggtgttattaggaccggtgtgtttcatggggtag

SEQ ID NO: 232583 - DNA, 5133 bp, Artificial Sequence
  derived and/or modified sequence
atggagcggtgcagccggtgccaccggctgctgctgctgctgcccctggtgctggggctctccgcagcacctggttgggctggggctcccccggtcgatgtcttgcgtgcgctccggttccccagcctcccagatggggtgcgccgagccaagggaatctgtcctgcagacgtcgcttacagagtggcaaggcctgcccaactgtctgccccgacaagacagctgttccctggcggttttcccaaggacttcagcctgctcacagtggttagaacgcgtccaggcctgcaggcacccctcctcactttgtactctgcgcagggcgtccgccagctcggactcgagcttggtcgccccgtgagattcctgtatgaagatcaaactggccgtcctcaaccaccttcccaacccgttttccggggattgagtctggctgacggtaagtggcacagagtagccgtggccgtcaaaggccagagcgtgacattaattgttgactgcaagaagcgcgtaactcgacctttaccaagaagcgcacggcccgtactcgatacgcacggggtgataatattcggagcccggattctggatgaggaagtgtttgagggcgacgtccaggagttagcgatcgtgcctggcgtccaggccgcttatgaatcctgtgagcagaaggaactcgaatgcgaaggaggtcaacgagaaaggccccaaaaccaacagcctcaccgcgcacagcgctctccacagcagcagcctagtcgactgcaccgccctcagaatcaggagccccagtcccaagaccccacccccggcgaggaggaggagattttggagtcatctctgcttcccccccttgaggaggaacaaactgacctacaggtgcctccaacagccgaccgattccaggcggaagagtacggcgaggggggtactgatccccccgaggggccttatgattacacatatggctacggagacgattatagagaagagacagagcttggacccgccctgagcgcggagacagcccattccggcgcagccgctcatggcccccggggacttaagggcgagaaaggggagcccgctgtccttgagccgggtatgcttgtggagggccctcctggtccggaggggccagccggtctgatcggcccacccggtattcaggggaatccagggcctgtgggcgatccaggcgagcgcggccctcccggacgcgctgggctccccggatctgacggtgcacccggcccacccggaacaagcctcatgttaccgtttagattcggttccggcggcggcgataagggacccgtcgttgcagcgcaggaggcccaggcccaggccatcctccagcaggcacgactcgcccttagaggcccccccgggcccatgggctacaccgggcgcccaggacctctgggacagcccggcagccctggcctaaagggggaatctggagacctgggaccgcaaggccctcgggggccacagggattgacaggaccccccgggaaggccggtcgacggggacgcgctggcgctgatggagctcgcgggatgcctggcgaccccggcgtcaaaggagatagaggatttgacggcttgccagggcttccaggcgagaaggggcaccggggagacactggggctcaaggcctgccaggcccacccggtgaggacggagagagaggagacgacggcgaaattgggcctcgtggtctgcccggtgaatctgggcccaggggtctcctgggccctaaaggcccacccggaattccgggaccacctggcgttcgcggtatggacgggccccaggggccgaaaggaagtctgggaccacagggagagcctggacccccagggcaacaggggacacctggtacccaaggtttgcccggtccacaaggcgccatcggcccccacggtgagaaaggccctcagggcaagcccggactaccaggaatgcctggctccgatgggcccccaggccatccggggaaggaggggcctccggggactaaaggcaaccaggggccctcaggccctcaagggccactgggttaccccggacccaggggggttaagggcgtagatggaattcgaggtctgaaaggccataagggtgagaagggtgaggacgggtttcctggctttaagggcgacatcggtgtgaaaggcgacagaggggaggtgggtgttcctggctcccgaggagaagatggccccgaaggcccgaaggggaggactggccccacaggcgacccgggcccgcctggacttatgggcgagaaaggaaagctgggcgtacctggtctccctggctatcctggccggcagggacctaaaggctcactgggatttccgggttttcctggggctagtggtgagaagggtgcgagaggcctgagcggcaaaagcggaccaaggggtgagagaggaccaactggcccccgggggcagagggggccacggggtgcaaccgggaaaagcggcgccaagggaactagtggtggcgacgggccccacggtcctccgggcgaaaggggcctgccaggcccacagggtccgaacggttttccaggcccaaaaggcccgcctggccctccaggaaaagacggactaccaggtcaccctggacagcggggtgaggtcgggttccaggggaagacagggcctcccggtccccccggcgtggtgggccctcaaggcgctgccggagaaactggacccatgggcgagcgagggcaccctggtcctccagggccacccggagaacagggattgcctggcacagctggcaaagagggaaccaagggggatccaggcccaccaggagcccccggcaaggatggccccgccgggctgcgcggattccccggagagaggggtctgcccggtaccgcaggaggaccaggtctcaagggcaatgagggccctagcgggcctcccggccctgcaggctcacctggggagcggggcgctgcaggctcagggggacctatcggccctcctggaagaccaggaccacaggggcctcctggcgcggcaggcgaaaaaggtgtgcccggagaaaagggccccataggacccacggggagagacggagtgcagggtccagtgggcttgccgggaccagccggacctcccggggttgctggagaagacggggacaaaggtgaagttggcgacccaggacaaaaggggactaagggcaataaaggtgaacatggaccccccgggcctcctgggccaattggtccagttggccaaccaggggccgctggcgccgacggagagccaggggctagaggccctcagggccacttcggcgcgaaaggcgacgaaggtactagaggcttcaacggacctccagggcccattggcctgcaaggactgcccggacctagcggcgagaagggagaaaccggagacgtaggcccgatggggccacctggcccccccggtccccgggggccagcaggcccaaacggcgctgatggaccacagggcccccctggtggcgttggaaatcttggccctcctggcgagaaaggggagccaggcgaatccggatctcccgggatccaaggtgaaccaggggttaaaggaccgagaggggagagaggagagaagggagagtcgggccagcctggagagccaggaccccctgggcctaagggccccactggcgacgatggccctaagggaaatccaggccccgttggatttccaggtgatccagggcctcctggcgagggtgggcctagaggccaggacggggccaagggtgatagaggcgaggatggtgaacctggccagccaggaagtcctggacccacaggggagaacggaccacccgggccacttggaaagaggggacctgccggcagccccgggagcgaaggtagacaaggcggcaaaggagctaaaggcgatcccggagctattggcgctcctgggaagaccggcccagttggtccagccggcccagccggtaaacctggaccagacggactccgcggccttcctggaagcgtaggccaacagggtagaccaggcgccaccgggcaggctggcccccccggaccagtcggaccacccggacttcccggcctcaggggcgatgctggagctaagggggaaaaaggacaccccggtcttattgggctaattgggccccccggtgagcagggagaaaagggggatcgcggtctgcccgggcctcaaggctcccctggacagaagggggaaatgggtattccgggggcctccggcccgattggccctgggggccctcccggattgccaggccccgccggacccaagggggccaagggggccactggtcctggaggtcccaagggagagaaaggcgtgcagggtccacccggacatcccggacccccaggggaagtgatccagccattgcctattcagatgccaaaaaagaccaggcgttcagtagacgggtcacgtctgatgcaagaagacgaggccattccgactggtggagctccaggcagcccaggaggtctggaggaaatttttgggagcctcgactccctccgggaggagatagagcagatgaggcgtccaaccggcacccaggactcccccgctaggacctgccaggatctgaaactctgtcatcctgaactgccagatggcgagtattgggttgaccctaatcagggttgtgcacgggacgcattccgcgtgttctgtaatttcaccgccggcggcgaaacttgtgtcacaccgcgcgatgatgttacgcagttcagctacgtcgatagcgagggctccccggtaggtgttgtgcagctaacatttctccggcttctgtctgtcagcgctcaccaagacgtgtcatacccctgttcaggcgcagcgcgcgatggtcctttgcgcctcaggggcgcgaacgaggacgagctcagtccagagacttctccatatgtaaaagagtttagagatggatgccagacccagcagggccgaaccgtgctggaagttagaacacccgttctggagcagctgcctgttttggatgcaagcttttcagaccttggtgcacctccaagacgaggcggggttttgctgggtcccgtttgcttcatgggctag

SEQ ID NO: 232584 - DNA, 6284 bp, Artificial Sequence
  derived and/or modified sequence
cacacagaagcggcagccaccgaggagggagcagtgccgggagccccgacggcgccttgctgcatggagctgggccgctgacagctgtcgctgcccgcagcctctgacctccctgggaccccggcgtctgaggctcatagtctgctccctgtcttctgtcagcctcagggcatccagcgtctcaggccgacctgggtccctgggacccggcgtttcggcttctcagccatggagcggtgcagccgctgccatcgcctcctcctcctcctacctctggtgctggggctgagcgcggccccaggctgggcaggtgcaccccctgtggatgtgctccgggccctgaggttcccctccctccctgatggtgtccggagagcgaaaggcatctgtccagctgatgtggcctaccgagtggcacgacctgcccagctcagtgcacccactcgccagcttttcccaggaggatttcccaaagatttctctctgctgactgttgtccggacccgccctggtctccaagctcccctcctgactctctacagtgcccagggtgtccgacagctgggcctggagctgggccgacctgtccgcttcctgtatgaagaccagactgggcggcctcaacctccctctcagccagtcttccgaggcctcagcctagcagatggcaagtggcaccgtgtggctgtggctgtgaagggccagtctgtcaccctcattgttgactgcaagaagcgagtcacccggcctctcccccgaagtgctcgtccagtattggacacccatggagtgatcatctttggtgcccgtattctggatgaagaagtctttgagggtgatgtccaggagctggccattgtcccaggggtccaggcagcctatgaatcatgtgaacagaaggagctggaatgcgaggggggccagagggaaagaccccaaaaccaacagcctcacagagcccagagatctccacagcagcaaccatcaagacttcacaggccacaaaatcaggaaccccagagccaggagcagacagatctccaggtcccccccacagccgacaggttccaggcagaggaatatggggagggtggcacagacccccctgaagggccctacgattacacctatggctatggggatgattatcgtgaggagacagagcttggccctgccctctctgcggagacagcccactcaggagccgctgcccatggaccccgagggctgaagggagagaaaggagagcctgcagtgttggaacctggtatgctcgtggaggggccccctggcccagaaggccctgcgggattgattggtccccctggcatccaggggaacccaggcccagttggagaccctggagagaggggcccccctggccgagcagggctccctggatcagatggggctcctggtcctcctggcacatctctcatgctcccattccggtttggcagtggtgggggtgacaagggccctgtggtggcggcccaggaggctcaggcccaggcgatcctgcagcaggcgaggctggcgctccgtggaccccctggccccatgggatacacagggcgccctggacccttgggccaacctgggagccctggcctgaaaggagagtctggagacttaggacctcagggccccagaggacctcagggcctcacaggccctcctggcaaggctgggcgaaggggccgggcaggtgctgatggagcccgagggatgcctggagatcctggagtgaagggtgaccgaggttttgatggactcccagggctccctggagagaagggccataggggtgatactggtgcccagggccttcctggtccccctggtgaggatggagagaggggagatgacggggagattgggcctcgagggctgcctggagagtcgggacctcgaggtctccttggccccaaaggcccacctggtattcctggaccccctggcgtccgaggcatggatggtccccagggccccaaagggagcttgggaccccagggagagccaggacctcctggacaacagggcacccctgggacccagggtcttcccgggccccagggtgccatcggccctcatggagagaagggtcctcaagggaagccagggctccccggcatgcctggctcagacggacccccgggtcacccagggaaggaaggtccccctggaaccaaaggaaaccagggtccctctggacctcagggtcctctaggatacccaggacctcgaggggtcaagggtgtggacggaattcggggtctgaagggtcataagggtgagaagggtgaggatggctttcctgggttcaaaggtgacataggcgtgaaaggtgacaggggcgaagttggagtccctggttccaggggagaggatggtcctgaggggccaaagggacgcactggaccgactggagaccctgggcccccagggctcatgggcgagaagggcaagctgggtgttcctggtctgcctggctatcctggacgtcagggacccaaggggtccctaggatttcctggctttcctggtgccagtggagagaagggagcccggggcctgtcggggaagtcagggcctcggggagaacggggccccacgggtccacggggtcagcggggaccccgaggtgccactgggaagtctggagctaagggaacatctggtggtgatggcccccatgggccccctggagagaggggcctccctggacctcagggtcccaacgggtttcctggaccgaaaggacccctgggcccccctgggaaggacgggctgccgggacacccaggccaaagaggagaagtgggtttccaagggaagaccggcccccctggtcctccaggagtggtgggacctcagggagcagcaggagaaaccggccctatgggggagagaggtcacccaggccccccggggccccctggagagcagggactacctgggacagctggaaaagaaggaacaaagggtgaccctggtccccctggggccccagggaaggatggtcctgctggtctgaggggattcccaggagagagaggcctcccaggcactgctggtggacctggtttgaaggggaatgaaggtccgtctggcccccctggccctgcaggctcccctggggaacgaggtgcagcaggatcagggggacccattggtccgccagggcgcccaggcccgcagggtccccctggagcagcaggagagaaaggtgtcccaggtgagaagggccccattggcccaactggccgagatggagtgcagggtcctgtggggcttcctggtcctgctgggcctccaggtgtggctggagaggatggagacaagggtgaggtgggggaccccggacagaagggcaccaaagggaacaagggtgaacatggccctcctggaccccctggacccattggtcctgtggggcagcctggagcagcgggagcagatggggagcccggagctcggggaccccagggacactttggagccaaaggtgatgaaggaacaagaggattcaatgggcccccaggacccattggcctacagggtttgccaggcccctctggggagaagggagaaacaggagatgtgggtcctatgggaccacctggccccccaggacctcgaggtccagctggacccaatggcgctgatggcccacaaggtcccccaggaggtgttgggaacctgggtccccctggagagaagggggaaccaggagagtcaggatctccagggatccagggcgagccaggtgtcaagggtccacgcggggaacgtggagagaaaggagagtcggggcagccaggagagccagggccaccagggcctaaaggccccacaggcgatgatggccccaaagggaaccctggtcctgttggttttcctggtgaccctggcccccctggagaaggtggccctcggggccaggatggtgctaagggtgaccgaggcgaggatggtgagccaggacagcctggatcccctggtcccaccggggagaatggacccccagggccacttggaaagcgaggtcctgctggctcgcctggttccgaggggcgacaaggagggaagggagccaagggagatcctggcgctataggtgccccggggaagacaggcccggtgggtcctgcaggcccagcagggaaacctggccctgatggtctgagggggctcccaggctcagtgggtcagcaaggccgacctggagctacaggccaggctgggcccccaggtcctgtgggacccccagggctgcctggtctccggggcgatgctggagccaagggagagaagggccacccaggtctcattggactgattgggcccccgggtgagcagggagagaagggagatcggggacttcctgggcctcagggctcccctgggcagaagggtgagatgggtatcccaggagcatccggccccattggtcctggaggtccccccggcctccccggacctgctggccccaaaggagccaaaggagccacaggcccaggcggacccaagggagagaagggtgtgcagggccctccaggacacccgggtcccccaggcgaggtgatccagccactgcccattcagatgcccaagaagactcggcgctcggtggatggaagccgtctgatgcaggaagatgaggccataccgaccgggggagcccccggcagtcctggggggctggaggagatctttggctcactcgactccctgcgggaggagatcgagcagatgaggcggccaacagggacccaggacagccctgctcgcacctgccaggacctgaagctgtgccacccagagcttcccgatggagagtactgggtcgaccccaaccagggctgtgctcgggatgccttccgagttttctgcaacttcacagcagggggtgagacctgtgtgacgcctagggatgacgtcacgcagttctcttacgtggactcagagggctccccagtgggtgtggtccagctcaccttcctgcggctgctcagcgtctcagcccaccaggacgtctcctacccctgctctggagcagcccgtgacggtcccctgagactccgtggggccaatgaggatgagctgagcccggagactagcccctatgtcaaagaattcagagatggctgccagacacagcaaggccggacggtgctggaggtgcgaacgcctgtgctggagcagctgccagtgctggatgcctccttctcagacctgggagccccaccgaggcggggaggggtgctgctggggcctgtctgcttcatgggataggaccgtctctgtctgatcctgtccattcggaaccaggcccacctggaatcccacaacatcagctctgtgccacctcccaagagggctcctcactatctagggagccctgggccagggcgtggagagccctcagtcggggcaggccaggggaggggtgaagtggttgcctggacaccccacgggaggagtggcatctggggctcttggccctcccacctggagcctgttacccgttagagagctgagacccttatttaaaactcacctcccaatcaccccaaacaaatggaagagaagagaaaggacatggcgtattttgtatttaaaagtaattgtattaattatttaaagtgtggaaagcaaaataacaaaaaagagaaacgccaacaaaaatcagcagatgttgaagacaggggtctcgggggtgggctccggcacccacatcctggagtcaggactttcctcagtgactgtgtgtaggggggtttcagggctgaaccccacctccctcccaccttcctcccacctcacctgtcgcacccactgtgaaagttggaatatgtggtctccctggcctcagggctctgactctgccagggtggggctctctaacccacaggtgttggctgcctggcccatgtgcccactgtctcttccacttggtctgggtttggcaggcactgcctgctacttgagggccaggatgctcccccagggaagaaacggaatagtgtggggtgtgtgcagggctgcatcccgcagatggctggaatattaaaattcttctatattggctggtaaattgccatggccctgagccactgagtatgttcattgccacccctgtccctcccctgggcacccctcactttccctgatcctgcaattaaagggttaatgtgtggcatatggaagggactcccaggaccctgtgcccagcttccatgctgactgatggttaaataatgtgattgtctcctcccagg

SEQ ID NO: 232585 - DNA, 5148 bp, Artificial Sequence
  derived and/or modified sequence
atggagcggtgcagccggtgccaccggctgctgctgctgctgccccttgtgctcggtcttagtgccgctccaggatgggccggcgccccacccgtggatgttttgcgcgccctcaggttcccatctttgccggacggtgtccggagggccaaggggatctgccccgctgacgttgcctaccgcgtggctagaccggctcagctcagcgcccctaccagacaactgtttccaggggggtttcccaaggacttcagcctcctcactgttgtaaggacccgacccggacttcaggcacccttgttaactttgtactccgctcaaggtgtaagacagctgggactcgagctgggaagaccggtgcggtttttgtacgaagatcaaaccggccgaccccaaccccctagccaacccgtattccggggtttgagcctggctgacgggaaatggcaccgcgtggccgtcgcggtaaaggggcagagtgtaacactgattgttgactgtaagaagcgcgtgactcgcccgcttcctcgaagtgcccggcccgtacttgatacacacggagttattatttttggtgctaggatcctggacgaggaggtgtttgaaggcgatgtgcaagaactggctatcgttcccggggtgcaggctgcatacgagtcttgtgagcaaaaggaacttgagtgtgaaggcggtcaaagggagagaccgcagaaccaacagccacaccgggcacagcggagtcctcaacagcagccctcaagattgcacaggccccagaatcaggagcctcagagccagcctaccgaatctctttactatgactacaagccgccttattacgatgtcatgaccaccggcacaacccctgactatcaggagcagaccgacttacaggtcccgcccactgcggataggttccaagcggaggagtacggcgaggggggcacagatcctcccgagggtccctatgactacacttacggttatggagacgattacagggaagagacggagttaggcccggccctgtcagctgagaccgctcactcaggagccgccgcacatgggccccggggactgaagggagagaagggtgagccagcggtgctggagcctggcatgctcgtggaggggccccccgggccagaggggcccgcgggtttgattggcccacccggcattcaaggcaatccaggccctgttggggatccaggggaaaggggaccgccaggaagggctggacttcctggcagtgacggggctcctggccccccgggaacaagccttatgctgccattccggttcgggtccggcgggggagataaagggccagtggtggcagcacaggaagcacaggcccaggctatcctacagcaggccagactggctcttcgtggcccacccggtccaatggggtacacaggacggccaggacctctcggccagcccggctctcccggcctcaaaggagagtcaggagacctgggcccacagggcccaaggggcccccaggggctcacaggacctccaggaaaagctgggcggcgggggcgggcgggcgcagacggagccagaggcatgcccggcgatcccggcgtgaagggagacagaggcttcgatggtctccccggcctgccaggggagaagggccatagaggcgatacgggtgcacagggactgcccggacctcccggcgaggacggggagcgcggggacgacggggagattgggccccgcggacttccaggagaatctgggcccagaggccttctgggaccaaaaggcccaccaggcataccggggcctcctggtgtcagggggatggatggtccacagggccccaaggggtcactgggtccccagggggaacctgggccacccggacagcaaggcactcccggtacacagggtttgccaggcccccagggcgccatcgggccgcatggggagaaggggccacagggaaaacctggcctccctgggatgccaggaagcgacggtcctccaggccatcctggcaaggagggcccacccggaaccaagggcaatcaaggaccaagcgggccgcaaggccccctggggtatcccggaccccgcggagtgaagggcgtggatggcatcaggggcttgaagggtcacaaaggtgaaaagggtgaggatgggtttcccggatttaagggtgatatcggcgtgaaaggagatcgtggagaggtcggggtgcctgggtcccgcggtgaagatggtccagaagggccaaagggtagaactggccctactggagacccagggccaccagggctaatgggtgagaagggcaagctgggtgtgccaggtctccccggctatccgggccggcagggcccaaaggggtcattaggatttcctgggttccctggcgcctcaggagaaaaaggagctcgaggccttagtgggaagtctgggccccgtggcgagcggggccccaccggccctcgagggcagcgcggcccccgcggggctacagggaaatccggcgccaagggtacatcaggcggagacggtccgcacgggccacccggagagcgtggactccccgggccccaagggccaaacggttttcccggacctaagggcccgcccggacctcctggaaaagacggcttacctggccaccccgggcagaggggtgaagtgggcttccagggcaaaacaggtccccctggcccccccggcgtcgtaggaccccagggggccgctggggaaacagggcccatgggcgagcgcggccatcccgggcccccgggacctcctggtgagcaggggctgcctggcacggctggaaaagaaggtacaaagggagatcctgggccaccgggagcgcccgggaaagatggcccagcgggcttgcggggtttccctggggaacgagggctgccaggcacagccggggggcctggattgaagggcaacgaagggcccagcgggcccccaggccctgcgggctcccccggagagaggggagccgctggttccggcggccccattgggccacccggacgaccaggccctcaaggcccgccaggggcagctggggaaaaaggcgtgccgggggagaaaggcccaatcgggcctactggacgcgacggggtccagggtcctgtgggcctgcctggacccgctggcccacccggtgttgctggcgaggatggtgataagggagaagttggcgatcccggtcagaaaggcactaaagggaataagggcgagcatgggcctcctggccccccagggcctatcgggcccgtggggcagccaggcgccgccggcgccgacggagagccaggcgcaaggggcccccaaggccatttcggtgccaagggagacgaagggacgagggggttcaacgggccaccagggcccatcggtctacagggcttgccagggcctagtggtgagaaaggtgaaaccggggacgtcggaccaatggggccacccggtccacctggtcccagaggcccagcggggccaaatggggcagatggccctcaaggcccccccgggggagttggaaatctcgggcctcccggtgagaagggtgagcctggcgaatctggaagtcccgggatccaaggagagcccggcgtcaaaggacctcggggcgagcgcggcgaaaaaggcgagagcggccagcccggagagccgggcccccccggaccaaaaggtccaaccggcgatgacggccctaagggtaaccccgggcctgttggatttcccggcgaccccggcccacctggcgagggcgggcctaggggccaggatggcgccaaaggggatcggggagaggatggagaacccggacagccagggtcccccggtccaactggagaaaatggaccgcctggacccctgggtaagcgcggccctgcaggcagtccgggtagcgagggcagacaggggggtaagggggccaagggtgaccctggggccatcggagcacctggaaaaaccggtccggtggggcccgcaggacctgccggaaaacctggaccagatggcttacgcggcttgccgggaagtgtgggccagcagggcaggccaggcgcgaccggccaggcaggaccccccggacctgtggggccccctggattacctgggctccgaggagacgccggggctaagggagagaaagggcatccaggactgatcggattgatcggaccgcccggcgagcagggcgagaagggagaccggggcttacctgggcctcagggatctcccggacagaaaggagaaatgggaattccaggtgccagtggccctatcgggcccggtggccctcccggtttaccaggacccgcaggacctaagggcgcaaagggcgctactgggccaggagggcctaaaggagagaagggagtccagggaccgccagggcaccccggacccccaggtgaggtcattcagcccctgccaatccaaatgcctaagaagacccgtagatccgttgacggttctagactgatgcaagaagacgaggctattcccaccggtggggcccctggatcacctggaggtctggaggaaatttttggaagtctcgactcccttagggaggagatcgagcagatgaggcgacctacaggtactcaagactcccccgctcgcacctgccaggacctgaagttgtgtcaccccgagttacccgatggtgagtactgggtggatcccaatcaggggtgtgcacgggacgccttccgagtgttttgcaacttcaccgccggaggcgaaacctgcgttacccctagggatgacgtcactcagttctcctacgtggatagcgaagggtccccggtgggcgtggtacagttgacatttttgcggctactttccgtctccgcacaccaagacgtgtcgtatccttgcagtggagccgcaagagacggcccgttacgcctcagaggagctaatgaagatgaactgagtccagaaacatcaccctacgtgaaagaattccgagatggatgccaaacacagcagggacggactgtgctcgaagtgcggacccctgttctggaacagctacctgtgctggatgcctccttctcagatctgggcgcgcctccgcgccgggggggtgttcttcttgggcccgtgtgtttcatgggctag

SEQ ID NO: 232586 - DNA, 5148 bp, Artificial Sequence
  derived and/or modified sequence
atggagcggtgcagccggtgccaccggctgctgctgctgctgcccctcgtcctgggtctgtctgcagcccccggctgggcgggagctccacctgttgacgtattacgagcccttcgcttcccctccctccctgacggagtacggcgtgctaagggcatatgccctgctgatgttgcctaccgggtagcccggcccgcccagctgtctgccccaacacgtcagctgttcccaggcggatttcctaaggacttcagtctcctgacggtggttcgcacacgccctggcttgcaggctccgttgctaacactctattctgcccaaggagtacggcaactcggcctggagcttgggccccccgtgcggtttctatacgaagaccagacgggtcgaccgcagcctccatctcagccagtttttcggggcctgagtctcgccgatggcaagtggcacagggtggcggttgctgttaagggacagagcgtgaccctgattgtggattgcaagaagagagtgacacggccacttcctcggtccgcacgcccagtcctggatacccacggcgtgatcatcttcggggccagaattctcgacgaggaagtgttcgaaggggatgtgcaggagctagcgatcgtgccaggcgtgcaggccgcttacgaaagttgcgagcagaaagagttggagtgcgagggtggacagagagagcgcccccagaatcagcagccccaccgtgctcaaaggagtccccagcaacagccctctaggctgcaccggccccagaaccaggagccgcagagccagccgactgaaagtctgtactatgattacaagcccccctactatgacgtgatgactacaggaaccactcccgattaccaggagcagacagatctgcaggtgcctcccactgctgataggttccaggccgaagagtacggtgagggtggaaccgatccacctgaagggccctacgactacacatatggatacggcgacgattacagggaagaaaccgagcttggccctgccctgtctgcagagaccgcccactctggagcagccgcccacggaccccgcggactgaagggggagaagggcgaaccggctgtcctcgaacccggtatgctggtcgagggacctcccggcccagagggaccagctggattaataggacctcccgggatacagggaaacccagggccggtgggtgaccccggggagcgggggcccccaggccgtgcgggactgcctggcagtgacggcgcacctggcccccccggcacttcactcatgttaccattcagatttgggtccggcggcggcgataaaggtccagttgtggcggcccaggaggcccaggctcaggcaatattgcagcaggcccgcttagcactgagaggccctcctggacccatgggatatacagggaggcccggtccactgggacagccaggcagccctggactgaagggtgagtccggagacctcggcccccaggggcctcggggaccccagggtctgaccgggccgcccgggaaggccgggcgtcgaggtcgggctggcgccgacggcgctagggggatgcccggggatcctggagtcaagggggaccgtggattcgacggcctgcccggactgcccggagaaaaaggccatcggggcgacactggagcccaggggttacctggcccacccggtgaagatggggagcgcggagacgatggggagataggtccccggggcctcccaggggaatctggtccacgagggttgctcggcccaaagggccctcctggcattcccggaccacctggtgttaggggcatggatggtccccagggaccaaagggatctctgggaccccagggagaaccaggtcctccggggcagcagggtacacctggaactcagggtctgccaggtccgcagggggccattgggccccatggagagaaagggcctcagggcaagcctggtcttccaggaatgccagggagcgatggacctcctggccaccccggcaaagaggggcctccagggactaagggaaaccaggggccaagcgggcctcagggacccctaggttatcctggaccgcggggcgtgaagggcgtcgacggtattaggggccttaaaggccacaaaggcgagaagggcgaagatggattcccaggctttaagggggatataggcgtgaagggcgaccgaggcgaagtgggagtgcccggcagccggggtgaagacggcccggaagggcccaagggtagaacgggtccgacaggcgaccctggaccccccggcttgatgggagagaagggcaagttaggagtccccggtctgcccggatatcctggacggcagggtcctaaaggctcactcggattcccgggctttcctggcgcctcaggggagaagggggctagaggactgagcgggaaatccgggccccgcggcgagagggggccaacaggccctcgaggacagcgaggccccagaggcgccacgggcaaaagcggggctaagggcacatctggcggggacggccctcacggcccccccggcgaacgcggcctccccgggccgcaaggtcctaatggcttcccagggcctaaaggcccacctggtcccccaggcaaggatggattgccgggccaccccgggcaacggggagaggtcggatttcaagggaagaccgggcccccggggccacctggggttgtgggcccccagggcgccgctggcgagacaggccccatgggcgagcggggccatcctggaccaccaggtcctccaggagagcagggactgcccggcacagccggtaaggagggcacgaaaggtgaccccggaccacccggcgcccctggcaaggacggtcctgccggtctgcgtggctttcctggtgagcgagggttacccggcaccgcaggaggacctgggttgaagggtaacgaagggccctccgggccacctggcccagctggctccccaggggagcgtggagctgctggctcaggcggccctattggcccccctggcaggccgggcccccaggggccacctggcgccgctggcgaaaagggagtgcctggggagaaagggccaattggtcctacaggaagggatggcgtgcaggggccagtggggctgcctggacccgctggacctcccggcgtagccggcgaggatggggacaaaggagaagtgggcgaccctgggcagaagggcaccaagggcaacaaaggggagcatggaccgcctggtcctccagggcccatagggcccgttgggcaacccggagccgcaggagccgacggcgaacctggagccagaggcccccagggacactttggcgctaagggcgacgaaggcaccagaggatttaacggacctcccggccccatcgggctccagggtctgccaggaccatctggggagaaaggtgaaaccggcgacgtcggacctatgggcccacccggaccaccggggcctaggggccctgctggtccgaatggagcagacggcccacagggcccacccgggggggtgggaaacctggggcctccaggcgagaagggtgaaccaggggagtccggatcacccgggattcagggtgagccgggcgttaaaggcccccgaggcgaacggggagagaagggcgaatccgggcagcccggcgagcccggtccacctgggccaaagggaccaacaggcgatgacggcccgaaagggaatccgggccctgtagggtttccgggtgaccccggaccaccaggagagggtggccctaggggccaggatggcgcaaaaggagataggggagaagacggggaaccgggacagcccggtagtcctggacctactggggagaatggccctcccggtcctctgggaaaaaggggccccgccgggagccccggttcagaagggcggcagggcgggaaaggggcgaagggcgatccaggcgccatcggcgcccccgggaagaccggacctgttggccccgccggcccagccggtaagcccgggccagacgggctgcggggccttcccgggagcgtggggcagcagggtcgacctggagccacaggccaggcaggaccgcccggtcctgtgggtccacctggacttcctggactgcgcggggacgctggtgccaaaggtgaaaaagggcatccagggttgattgggctgatcggaccccccggtgaacagggcgagaaaggagaccggggccttccaggccctcaagggagccccgggcagaaaggcgaaatgggtattcctggagcaagtggacccatcgggccagggggaccaccgggactccccggccccgcaggtccgaagggagctaaaggagctaccgggccagggggtcctaagggagagaaaggggtgcagggaccccccggccaccccggacctcccggcgaggttatccagcccctgcccatccaaatgcctaagaagacacggcggtccgtcgacggctctcgattgatgcaagaggacgaagcgatccctacgggtggagcacccggatcccccgggggcctggaggagatttttggatcactcgacagcttaagagaagaaatcgaacagatgcgacgtccaactggcacacaagatagcccggcgaggacatgccaagacctcaaactctgtcaccctgaactgcccgacggagagtactgggtggatccgaaccaggggtgtgccagggatgcctttagggtcttctgcaactttaccgctggcggcgagacctgcgtcactcctcgggacgacgtcacccaattttcatacgtcgactctgaggggtcaccagtgggcgtggttcagctcacatttcttcggttgctcagcgtgtctgcccatcaggatgtcagctacccatgtagcggcgccgcccgggacggcccccttaggctgcgtggggcaaatgaagacgaattgagtccggagacatccccctacgtgaaagaattccgggacggttgccaaactcaacaggggcgaaccgttctggaagtgcgcaccccagtgctggagcagcttcctgtgctggacgctagtttctccgatttgggcgcaccccccagacgcggaggagttttattgggacctgtttgcttcatgggatag

SEQ ID NO: 232587 - DNA, 5148 bp, Artificial Sequence
  derived and/or modified sequence
atggagcggtgcagccggtgccaccggctgctgctgctgctgcccctcgttctgggcctgtcggcagccccagggtgggccggggcccctcccgtcgatgtgctgcgtgccctccggttccccagtctgccagatggggtccggcgcgcgaagggcatttgccccgccgacgtggcttacagggtggctcggcctgctcagctcagtgccccgacacgtcagctcttccctggcgggttcccaaaagatttctccctgctgacggtggttagaacccggcccggactgcaagctcccctgttaaccttgtattccgcccagggcgtgcgtcagctaggcctggagctcggtaggccggtgagatttctgtacgaggaccaaactgggcggccccaacctccaagtcagcctgtgttccgaggcttgagcctcgccgatggaaaatggcatagagttgccgtggccgtaaaagggcagtcggttacccttatagtggattgcaaaaagcgagtgactcgccccctcccccgctccgctcgccccgtgctggacacacacggcgtgatcatcttcggcgcaaggatactcgacgaagaggtcttcgaaggcgacgtgcaggaactagcgattgtgcctggcgtgcaggcagcttacgaatcttgcgagcagaaagaactcgagtgtgagggcggccagagagaaaggcctcagaatcaacagcctcacagggctcagcgtagcccccaacaacagccatcccgactgcaccgccctcagaatcaggaaccacaatctcagcccactgaatcgctgtactacgattataagcccccctactacgacgttatgactaccggcaccacaccggattatcaagagcagacagatctgcaggttccccccactgctgatcggttccaagccgaggagtatggagagggcgggaccgatccaccagaaggaccctacgattatacatatggatacggagatgactacagggaagagacggaacttggccctgccctgtctgccgagactgcccattccggagcagcagctcatggtcccagggggctgaagggcgagaagggggagcctgctgttttagagcctggaatgctggtggagggtccccccggcccggaaggcccagccggtcttatcggcccccctggcattcagggaaatccgggccccgtgggggatccaggcgaacgtggtcctcctggcagggcaggtttacctggatccgatggagcccccgggccacctggcaccagtctcatgttaccgtttcgtttcgggagcgggggtggagataagggacccgttgtcgccgcacaggaggcccaggcacaagcaattctacagcaggctcgtctcgcactcaggggtcccccgggccctatgggttatactgggaggcccggcccactgggtcagcctgggtctcccggtctgaaaggcgagagtggggatcttggcccacaggggccaagaggaccacagggtttaactggccctcccggtaaagccggaagacgcggacgcgcaggcgctgatggagccagggggatgcccggagaccccggagttaagggcgatcggggcttcgacggtctacccgggctccccggggaaaagggccataggggcgatactggcgcacagggcctgccggggccaccaggagaggatggggaacgaggcgatgatggggaaatcgggcccaggggcctgccaggtgagagtgggccccgggggcttctgggcccaaaggggcctccagggatccccggaccccccggcgttagagggatggatgggccacaaggtccaaaaggatcactgggaccccagggtgagcctggtccccctggccagcaggggacccctggcactcaggggctgcctggaccccagggagcgatcggcccacatggagaaaagggtcctcagggcaaacccgggctgccaggaatgcccggatcagacgggcccccaggtcacccgggcaaggagggcccccccgggacgaaagggaatcaaggccccagcgggccccagggccccctcggttaccctggtccgcggggtgtgaagggagtggacggaattagaggcctgaaggggcacaaaggcgagaaaggtgaggacggtttccctggcttcaagggcgatataggcgttaaaggcgatcggggggaggtcggggtccccgggtctaggggcgaagatggtccagaaggccctaagggaagaactggccccaccggagaccctgggccgcccggcctgatgggcgagaagggcaagctaggcgtccccgggctgcccggataccctgggcgacaggggccgaagggtagtctagggtttccggggttccctggcgctagtggagagaagggcgcccgggggcttagcgggaagtccgggcctagaggggagcggggaccgacagggccccgtggccagcggggcccgaggggtgccacaggcaaatccggtgcgaaaggaacatctgggggggatggaccccatgggccacctggagaacggggactccctgggcctcagggccccaacggctttcccgggccaaagggacccccaggaccgcctggcaaggatgggttgccaggccatccaggccaacgcggcgaggtgggtttccaaggtaagactggtccacctgggccccccggggttgtcggtcctcagggagcagccggagaaaccggacccatgggtgagcgaggccacccagggcctcccggtcctcccggagaacagggactgccaggcactgcaggaaaggaggggacaaaaggcgaccctggcccaccaggtgctccaggcaaagatggtccagcaggcctgagagggtttccgggggaacgaggtctcccaggcaccgccggaggacccggactgaagggcaacgaggggccaagcggaccgcccggacctgctggatcacccggggaaaggggtgctgcggggtccggcggacccattgggccaccgggccggccaggccctcaaggaccccctggggccgccggggagaagggtgtgcctggtgagaagggcccaatcggtcctactgggcgcgacggtgtacagggcccagtcggactgcccgggccagcgggaccacctggagtggcgggcgaggatggcgataagggagaagtcggtgatcccgggcagaagggaacaaagggaaacaaaggagagcacgggccgcccggtccccccgggccaatcggtccggtcggccagcctggggccgccggcgcggacggggagcctggggcccggggcccccaggggcacttcggggccaagggtgacgaggggacaagggggtttaatgggcctcctggacccattggcctgcagggtcttccaggccctagtggtgaaaaaggtgagaccggagatgtcgggccaatgggcccacctggtccacctggcccccgcggtcctgcaggtccaaatggggcagatggaccccaaggaccgccaggaggagtgggaaatctcgggccacccggagaaaaaggggagccgggagagagcggctcccctggtattcagggggaaccaggtgtgaaggggcctcggggtgaaagaggcgagaaaggggaatccgggcagcctggcgagccaggtccgcccggacccaagggacccactggagacgacggcccaaaggggaacccaggtcctgtgggattccctggggatccaggccccccaggagagggcgggccacgggggcaggatggggctaaaggagacaggggggaagacggagagccagggcagcctggctcgcctggacctacaggcgaaaatggtccacccgggccactgggcaagagagggcccgcaggtagtccggggtccgaaggtcgccaggggggcaagggggctaagggcgaccctggcgccatcggagctccaggtaaaactggaccagttggccctgctggaccagctggcaaacccgggccggatggcctgcgaggattgcctggaagtgtcggccagcaggggagaccgggggccaccggccaggctggtcctcccggacccgtgggcccacctggattgccagggcttcgtggtgatgccggcgcgaagggcgagaagggtcatccgggcctcattggtctcatagggccccctggagagcaaggggagaagggtgatcgcggacttcccgggccacagggttctcccggccaaaaaggtgagatgggtatccccggagcctcagggcctattggcccaggcggtcctccaggccttccagggccggctggacccaaaggggccaaaggggctaccggaccgggaggccctaagggtgagaagggcgttcaagggccccccggtcaccccggacccccaggcgaagtcatccagcctctacctatccagatgccgaagaaaaccaggcggagcgtggacgggagtaggcttatgcaggaggacgaagcaataccgactggcggagcacctggaagtccagggggcctggaagaaatttttggctctctggacagcctaagggaggagattgaacagatgaggcgacccacgggcactcaagactccccagcgagaacctgccaggatttaaagttgtgccatccagagctgcccgatggagagtactgggttgatccaaaccaggggtgtgcccgagatgcttttagagtattctgcaactttacggccggcggcgaaacctgcgtgaccccgagagatgacgttactcaatttagttatgtcgatagtgagggaagcccagtgggggtcgttcagctcacttttctccgcctgctttctgttagtgcacatcaggatgtgagctacccctgttccggggccgctagagacggaccgctgcggcttcgcggcgcgaatgaggacgagttgtctccggaaaccagtccttacgtcaaagagttcagggacggatgtcagacacagcagggcagaacggttttagaggtccgcacccccgttttggagcaacttcctgtgctggatgctagcttctcagacttgggggctccacctaggagggggggtgtgctccttggccctgtctgcttcatgggctag

SEQ ID NO: 232588 - DNA, 6425 bp, Artificial Sequence
  derived and/or modified sequence
cacacagaagcggcagccaccgaggagggagcagtgccgggagccccgacggcgccttgctgcatggagctgggccgctgacagctgtcgctgcccgcagcctctgacctccctgggaccccggcgtctgaggctcatagtctgctccctgtcttctgtcagcctcagggcatccagcgtctcaggccgacctgggtccctgggacccggcgtttcggcttctcagccatggagcggtgcagccgctgccatcgcctcctcctcctcctacctctggtgctggggctgagcgcggccccaggctgggcaggtgcaccccctgtggatgtgctccgggccctgaggttcccctccctccctgatggtgtccggagagcgaaaggcatctgtccagctgatgtggcctaccgagtggcacgacctgcccagctcagtgcacccactcgccagcttttcccaggaggatttcccaaagatttctctctgctgactgttgtccggacccgccctggtctccaagctcccctcctgactctctacagtgcccagggtgtccgacagctgggcctggagctgggccgacctgtccgcttcctgtatgaagaccagactgggcggcctcaacctccctctcagccagtcttccgaggcctcagcctagcagatggcaagtggcaccgtgtggctgtggctgtgaagggccagtctgtcaccctcattgttgactgcaagaagcgagtcacccggcctctcccccgaagtgctcgtccagtattggacacccatggagtgatcatctttggtgcccgtattctggatgaagaagtctttgagggtgatgtccaggagctggccattgtcccaggggtccaggcagcctatgaatcatgtgaacagaaggagctggaatgcgaggggggccagagggaaagaccccaaaaccaacagcctcacagagcccagagatctccacagcagcaaccatcaagacttcacaggccacaaaatcaggaaccccagagccagcccactgagtctctctactatgactacgagcccccctattatgatgtgatgactacggggacaacccctgattatcaggaccccaccccaggtgaagaggaagaaatcctggagtcgagcctcttgccaccccttgaggaggagcagacagatctccaggtcccccccacagccgacaggttccaggcagaggaatatggggagggtggcacagacccccctgaagggccctacgattacacctatggctatggggatgattatcgtgaggagacagagcttggccctgccctctctgcggagacagcccactcaggagccgctgcccatggaccccgagggctgaagggagagaaaggagagcctgcagtgttggaacctggtatgctcgtggaggggccccctggcccagaaggccctgcgggattgattggtccccctggcatccaggggaacccaggcccagttggagaccctggagagaggggcccccctggccgagcagggctccctggatcagatggggctcctggtcctcctggcacatctctcatgctcccattccggtttggcagtggtgggggtgacaagggccctgtggtggcggcccaggaggctcaggcccaggcgatcctgcagcaggcgaggctggcgctccgtggaccccctggccccatgggatacacagggcgccctggacccttgggccaacctgggagccctggcctgaaaggagagtctggagacttaggacctcagggccccagaggacctcagggcctcacaggccctcctggcaaggctgggcgaaggggccgggcaggtgctgatggagcccgagggatgcctggagatcctggagtgaagggtgaccgaggttttgatggactcccagggctccctggagagaagggccataggggtgatactggtgcccagggccttcctggtccccctggtgaggatggagagaggggagatgacggggagattgggcctcgagggctgcctggagagtcgggacctcgaggtctccttggccccaaaggcccacctggtattcctggaccccctggcgtccgaggcatggatggtccccagggccccaaagggagcttgggaccccagggagagccaggacctcctggacaacagggcacccctgggacccagggtcttcccgggccccagggtgccatcggccctcatggagagaagggtcctcaagggaagccagggctccccggcatgcctggctcagacggacccccgggtcacccagggaaggaaggtccccctggaaccaaaggaaaccagggtccctctggacctcagggtcctctaggatacccaggacctcgaggggtcaagggtgtggacggaattcggggtctgaagggtcataagggtgagaagggtgaggatggctttcctgggttcaaaggtgacataggcgtgaaaggtgacaggggcgaagttggagtccctggttccaggggagaggatggtcctgaggggccaaagggacgcactggaccgactggagaccctgggcccccagggctcatgggcgagaagggcaagctgggtgttcctggtctgcctggctatcctggacgtcagggacccaaggggtccctaggatttcctggctttcctggtgccagtggagagaagggagcccggggcctgtcggggaagtcagggcctcggggagaacggggccccacgggtccacggggtcagcggggaccccgaggtgccactgggaagtctggagctaagggaacatctggtggtgatggcccccatgggccccctggagagaggggcctccctggacctcagggtcccaacgggtttcctggaccgaaaggacccctgggcccccctgggaaggacgggctgccgggacacccaggccaaagaggagaagtgggtttccaagggaagaccggcccccctggtcctccaggagtggtgggacctcagggagcagcaggagaaaccggccctatgggggagagaggtcacccaggccccccggggccccctggagagcagggactacctgggacagctggaaaagaaggaacaaagggtgaccctggtccccctggggccccagggaaggatggtcctgctggtctgaggggattcccaggagagagaggcctcccaggcactgctggtggacctggtttgaaggggaatgaaggtccgtctggcccccctggccctgcaggctcccctggggaacgaggtgcagcaggatcagggggacccattggtccgccagggcgcccaggcccgcagggtccccctggagcagcaggagagaaaggtgtcccaggtgagaagggccccattggcccaactggccgagatggagtgcagggtcctgtggggcttcctggtcctgctgggcctccaggtgtggctggagaggatggagacaagggtgaggtgggggaccccggacagaagggcaccaaagggaacaagggtgaacatggccctcctggaccccctggacccattggtcctgtggggcagcctggagcagcgggagcagatggggagcccggagctcggggaccccagggacactttggagccaaaggtgatgaaggaacaagaggattcaatgggcccccaggacccattggcctacagggtttgccaggcccctctggggagaagggagaaacaggagatgtgggtcctatgggaccacctggccccccaggacctcgaggtccagctggacccaatggcgctgatggcccacaaggtcccccaggaggtgttgggaacctgggtccccctggagagaagggggaaccaggagagtcaggatctccagggatccagggcgagccaggtgtcaagggtccacgcggggaacgtggagagaaaggagagtcggggcagccaggagagccagggccaccagggcctaaaggccccacaggcgatgatggccccaaagggaaccctggtcctgttggttttcctggtgaccctggcccccctggagaaggtggccctcggggccaggatggtgctaagggtgaccgaggcgaggatggtgagccaggacagcctggatcccctggtcccaccggggagaatggacccccagggccacttggaaagcgaggtcctgctggctcgcctggttccgaggggcgacaaggagggaagggagccaagggagatcctggcgctataggtgccccggggaagacaggcccggtgggtcctgcaggcccagcagggaaacctggccctgatggtctgagggggctcccaggctcagtgggtcagcaaggccgacctggagctacaggccaggctgggcccccaggtcctgtgggacccccagggctgcctggtctccggggcgatgctggagccaagggagagaagggccacccaggtctcattggactgattgggcccccgggtgagcagggagagaagggagatcggggacttcctgggcctcagggctcccctgggcagaagggtgagatgggtatcccaggagcatccggccccattggtcctggaggtccccccggcctccccggacctgctggccccaaaggagccaaaggagccacaggcccaggcggacccaagggagagaagggtgtgcagggccctccaggacacccgggtcccccaggcgaggtgatccagccactgcccattcagatgcccaagaagactcggcgctcggtggatggaagccgtctgatgcaggaagatgaggccataccgaccgggggagcccccggcagtcctggggggctggaggagatctttggctcactcgactccctgcgggaggagatcgagcagatgaggcggccaacagggacccaggacagccctgctcgcacctgccaggacctgaagctgtgccacccagagcttcccgatggagagtactgggtcgaccccaaccagggctgtgctcgggatgccttccgagttttctgcaacttcacagcagggggtgagacctgtgtgacgcctagggatgacgtcacgcagttctcttacgtggactcagagggctccccagtgggtgtggtccagctcaccttcctgcggctgctcagcgtctcagcccaccaggacgtctcctacccctgctctggagcagcccgtgacggtcccctgagactccgtggggccaatgaggatgagctgagcccggagactagcccctatgtcaaagaattcagagatggctgccagacacagcaaggccggacggtgctggaggtgcgaacgcctgtgctggagcagctgccagtgctggatgcctccttctcagacctgggagccccaccgaggcggggaggggtgctgctggggcctgtctgcttcatgggataggaccgtctctgtctgatcctgtccattcggaaccaggcccacctggaatcccacaacatcagctctgtgccacctcccaagagggctcctcactatctagggagccctgggccagggcgtggagagccctcagtcggggcaggccaggggaggggtgaagtggttgcctggacaccccacgggaggagtggcatctggggctcttggccctcccacctggagcctgttacccgttagagagctgagacccttatttaaaactcacctcccaatcaccccaaacaaatggaagagaagagaaaggacatggcgtattttgtatttaaaagtaattgtattaattatttaaagtgtggaaagcaaaataacaaaaaagagaaacgccaacaaaaatcagcagatgttgaagacaggggtctcgggggtgggctccggcacccacatcctggagtcaggactttcctcagtgactgtgtgtaggggggtttcagggctgaaccccacctccctcccaccttcctcccacctcacctgtcgcacccactgtgaaagttggaatatgtggtctccctggcctcagggctctgactctgccagggtggggctctctaacccacaggtgttggctgcctggcccatgtgcccactgtctcttccacttggtctgggtttggcaggcactgcctgctacttgagggccaggatgctcccccagggaagaaacggaatagtgtggggtgtgtgcagggctgcatcccgcagatggctggaatattaaaattcttctatattggctggtaaattgccatggccctgagccactgagtatgttcattgccacccctgtccctcccctgggcacccctcactttccctgatcctgcaattaaagggttaatgtgtggcatatggaagggactcccaggaccctgtgcccagcttccatgctgactgatggttaaataatgtgattgtctcctcccagg

SEQ ID NO: 232589 - DNA, 6425 bp, Artificial Sequence
  derived and/or modified sequence
cacacagaagcggcagccaccgaggagggagcagtgccgggagccccgacggcgccttgctgcatggagctgggccgctgacagctgtcgctgcccgcagcctctgacctccctgggaccccggcgtctgaggctcatagtctgctccctgtcttctgtcagcctcagggcatccagcgtctcaggccgacctgggtccctgggacccggcgtttcggcttctcagccatggagcggtgcagccgctgccatcgcctcctcctcctcctacctctggtgctggggctgagcgcggccccaggctgggcaggtgcaccccctgtggatgtgctccgggccctgaggttcccctccctccctgatggtgtccggagagcgaaaggcatctgtccagctgatgtggcctaccgagtggcacgacctgcccagctcagtgcacccactcgccagcttttcccaggaggatttcccaaagatttctctctgctgactgttgtccggacccgccctggtctccaagctcccctcctgactctctacagtgcccagggtgtccgacagctgggcctggagctgggccgacctgtccgcttcctgtatgaagaccagactgggcggcctcaacctccctctcagccagtcttccgaggcctcagcctagcagatggcaagtggcaccgtgtggctgtggctgtgaagggccagtctgtcaccctcattgttgactgcaagaagcgagtcacccggcctctcccccgaagtgctcgtccagtattggacacccatggagtgatcatctttggtgcccgtattctggatgaagaagtctttgagggtgatgtccaggagctggccattgtcccaggggtccaggcagcctatgaatcatgtgaacagaaggagctggaatgcgaggggggccagagggaaagaccccaaaaccaacagcctcacagagcccagagatctccacagcagcaaccatcaagacttcacaggccacaaaatcaggaaccccagagccagcccactgagtctctctactatgactacaagcccccctattatgatgtgatgactacggggacaacccctgattatcaggaccccaccccaggtgaagaggaagaaatcctggagtcgagcctcttgccaccccttgaggaggagcagacagatctccaggtcccccccacagccgacaggttccaggcagaggaatatggggagggtggcacagacccccctgaagggccctacgattacacctatggctatggggatgattatcgtgaggagacagagcttggccctgccctctctgcggagacagcccactcaggagccgctgcccatggaccccgagggctgaagggagagaaaggagagcctgcagtgttggaacctggtatgctcgtggaggggccccctggcccagaaggccctgcgggattgattggtccccctggcatccaggggaacccaggcccagttggagaccctggagagaggggcccccctggccgagcagggctccctggatcagatggggctcctggtcctcctggcacatctctcatgctcccattccggtttggcagtggtgggggtgacaagggccctgtggtggcggcccaggaggctcaggcccaggcgatcctgcagcaggcgaggctggcgctccgtggaccccctggccccatgggatacacagggcgccctggacccttgggccaacctgggagccctggcctgaaaggagagtctggagacttaggacctcagggccccagaggacctcagggcctcacaggccctcctggcaaggctgggcgaaggggccgggcaggtgctgatggagcccgagggatgcctggagatcctggagtgaagggtgaccgaggttttgatggactcccagggctccctggagagaagggccataggggtgatactggtgcccagggccttcctggtccccctggtgaggatggagagaggggagatgacggggagattgggcctcgagggctgcctggagagtcgggacctcgaggtctccttggccccaaaggcccacctggtattcctggaccccctggcgtccgaggcatggatggtccccagggccccaaagggagcttgggaccccagggagagccaggacctcctggacaacagggcacccctgggacccagggtcttcccgggccccagggtgccatcggccctcatggagagaagggtcctcaagggaagccagggctccccggcatgcctggctcagacggacccccgggtcacccagggaaggaaggtccccctggaaccaaaggaaaccagggtccctctggacctcagggacctctaggatacccaggacctcgaggggtcaagggtgtggacggaattcggggtctgaagggtcataagggtgagaagggtgaggatggctttcctgggttcaaaggtgacataggcgtgaaaggtgacaggggcgaagttggagtccctggttccaggggagaggatggtcctgaggggccaaagggacgcactggaccgactggagaccctgggcccccagggctcatgggcgagaagggcaagctgggtgttcctggtctgcctggctatcctggacgtcagggacccaaggggtccctaggatttcctggctttcctggtgccagtggagagaagggagcccggggcctgtcggggaagtcagggcctcggggagaacggggccccacgggtccacggggtcagcggggaccccgaggtgccactgggaagtctggagctaagggaacatctggtggtgatggcccccatgggccccctggagagaggggcctccctggacctcagggtcccaacgggtttcctggaccgaaaggacccccgggcccccctgggaaggacgggctgccgggacacccaggccaaagaggagaagtgggtttccaagggaagaccggcccccctggtcctccaggagtggtgggacctcagggagcagcaggagaaaccggccctatgggggagagaggtcacccaggccccccggggccccctggagagcagggactacctgggacagctggaaaagaaggaacaaagggtgaccctggtccccctggggccccagggaaggatggtcctgctggtctgaggggattcccaggagagagaggcctcccaggcactgctggtggacctggtttgaaggggaatgaaggtccgtctggcccccctggccctgcaggctcccctggggaacgaggtgcagcaggatcagggggacccattggtccgccagggcgcccaggcccgcagggtccccctggagcagcaggagagaaaggtgtcccaggtgagaagggccccattggcccaactggccgagatggagtgcagggtcctgtggggcttcctggtcctgctgggcctccaggtgtggctggagaggatggagacaagggtgaggtgggggaccccggacagaagggcaccaaagggaacaagggtgaacatggccctcctggaccccctggacccattggtcctgtggggcagcctggagcagcgggagcagatggggagcctggagctcggggaccccagggacactttggagccaaaggtgatgaaggaacaagaggattcaatgggcccccaggacccattggcctacagggtttgccaggcccctctggggagaagggagaaacaggagatgtgggtcctatgggaccacctggccccccaggacctcgaggtccagctggacccaatggcgctgatggcccacaaggtcccccaggaggtgttgggaacctgggtccccctggagagaagggggaaccaggagagtcaggatctccagggatccagggcgagccaggtgtcaagggtccacgcggggaacgtggagagaaaggagagtcggggcagccaggagagccagggccaccagggcctaaaggccccacaggcgatgatggccccaaagggaaccctggtcctgttggttttcctggtgaccctggcccccctggagaaggtggccctcggggccaggatggtgctaagggtgaccgaggcgaggatggtgagccaggacagcctggatcccctggtcccaccggggagaatggacccccagggccacttggaaagcgaggtcctgctggctcgcctggttccgaggggcgacaaggagggaagggagccaagggagatcctggcgctataggtgccccggggaagacaggcccggtgggtcctgcaggcccagcagggaaacctggccctgatggtctgagggggctcccaggctcagtgggtcagcaaggccgacctggagctacaggccaggctgggcccccaggtcctgtgggacccccagggctgcctggtctccggggcgatgctggagccaagggagagaagggccacccaggtctcattggactgattgggcccccgggtgagcagggagagaagggagatcggggacttcctgggcctcagggctcccctgggcagaagggtgagatgggtatcccaggagcatccggccccattggtcctggaggtccccccggcctccccggacctgctggccccaaaggagccaaaggagccacaggcccaggcggacccaagggagagaagggtgtgcagggccctccaggacacccgggtcccccaggcgaggtgatccagccactgcccattcagatgcccaagaagactcggcgctcggtggatggaagccgtctgatgcaggaagatgaggccataccgaccgggggagcccccggcagtcctggggggctggaggagatctttggctcactcgactccctgcgggaggagatcgagcagatgaggcggccaacagggacccaggacagccctgctcgcacctgccaggacctgaagctgtgccacccagagcttcccgatggagagtactgggtcgaccccaaccagggctgtgctcgggatgccttccgagttttctgcaacttcacagcagggggtgagacctgtgtgacgcctagggatgacgtcacgcagttctcttacgtggactcagagggctccccagtgggtgtggtccagctcaccttcctgcggctgctcagcgtctcagcccaccaggacgtctcctacccctgctctggagcagcccgtgacggtcccctgagactccgtggggccaatgaggatgagctgagcccggagactagcccctatgtcaaagaattcagagatggctgccagacacagcaaggccggacggtgctggaggtgcgaacgcctgtgctggagcagctgccagtgctggatgcctccttctcagacctgggagccccaccgaggcggggaggggtgctgctggggcctgtctgcttcatgggataggaccgtctctgtctgatcctgtccattcggaaccaggcccacctggaatcccacaacatcagctctgtgccacctcccaagagggctcctcactatctagggagccctgggccagggcgtggagagccctcagtcggggcaggccaggggaggggtgaagtggttgcctggacaccccacgggaggagtggcatctggggctcttggccctcccacctggagcctgttacccgttagagagctgagacccttatttaaaactcacctcccaatcaccccaaacaaatggaagagaagagaaaggacatggcgtattttgtatttaaaagtaattgtattaattatttaaagtgtggaaagcaaaataacaaaaaagagaaacgccaacaaaaatcagcagatgttgaagacaggggtctcgggggtgggctccggcacccacatcctggagtcaggactttcctcagtgactgtgtgtaggggggtttcagggctgaaccccacctccctcccaccttcctcccacctcacctgtcgcacccactgtgaaagttggaatatgtggtctccctggcctcagggctctgactctgccagggtggggctctctaacccacaggtgttggctgcctggcccatgtgcccactgtctcttccacttggtctgggtttggcaggcactgcctgctacttgagggccaggatgctcccccagggaagaaacggaatagtgtggggtgtgtgcagggctgcatcccgcagatggctggaatattaaaattcttctatattggctggtaaattgccatggccctgagccactgagtatgttcattgccacccctgtccctcccctgggcacccctcactttccctgatcctgcaattaaagggttaatgtgtggcatatggaagggactcccaggaccctgtgcccagcttccatgctgactgatggttaaataatgtgattgtctcctcccagg

SEQ ID NO: 232590 - DNA, 6425 bp, Artificial Sequence
  derived and/or modified sequence
cacacagaagcggcagccaccgaggagggagcagtgccgggagccccgacggcgccttgctgcatggagctgggccgctgacagctgtcgctgcccgcagcctctgacctccctgggaccccggcgtctgaggctcatagtctgctccctgtcttctgtcagcctcagggcatccagcgtctcaggccgacctgggtccctgggacccggcgtttcggcttctcagccatggagcggtgcagccgctgccatcgcctcctcctcctcctacctctggtgctggggctgagcgcggccccaggctgggcaggtgcaccccctgtggatgtgctccgggccctgaggttcccctccctccctgatggtgtccggagagcgaaaggcatctgtccagctgatgtggcctaccgagtggcacgacctgcccagctcagtgcacccactcgccagcttttcccaggaggatttcccaaagatttctctctgctgactgttgtccggacccgccctggtctccaagctcccctcctgactctctacagtgcccagggtgtccgacagctgggcctggagctgggccgacctgtccgcttcctgtatgaagaccagactgggcggcctcaacctccctctcagccagtcttccgaggcctcagcctagcagatggcaagtggcaccgtgtggctgtggctgtgaagggccagtctgtcaccctcattgttgactgcaagaagcgagtcacccggcctctcccccgaagtgctcgtccagtattggacacccatggagtgatcatctttggtgcccgtattctggatgaagaagtctttgagggtgatgtccaggagctggccattgtcccaggggtccaggcagcctatgaatcatgtgaacagaaggagctggaatgcgaggggggccagagggaaagaccccaaaaccaacagcctcacagagcccagagatctccacagcagcaaccatcaagacttcacaggccacaaaatcaggaaccccagagccagcccactgagtctctctactatgactacaagcccccctattatgatgtgatgactacggggacaacccctgattatcaggaccccaccccaggtgaagaggaagaaatcctggagtcgagcctcttgccaccccttgaggaggagcagacagatctccaggtcccccccacagccgacaggttccaggcagaggaatatggggagggtggcacagacccccctgaagggccctacgattacacctatggctatggggatgattatcgtgaggagacagagcttggccctgccctctctgcggagacagcccactcaggagccgctgcccatggaccccgagggctgaagggagagaaaggagagcctgcagtgttggaacctggtatgctcgtggaggggccccctggcccagaaggccctgcgggattgattggtccccctggcatccaggggaacccaggcccagttggagaccctggagagaggggcccccctggccgagcagggctccctggatcagatggggctcctggtcctcctggcacatctctcatgctcccattccggtttggcagtggtgggggtgacaagggccctgtggtggcggcccaggaggctcaggcccaggcgatcctgcagcaggcgaggctggcgctccgtggaccccctggccccatgggatacacagggcgccctggacccttgggccaacctgggagccctggcctgaaaggagagtctggagacttaggacctcagggccccagaggacctcagggcctcacaggccctcctggcaaggctgggcgaaggggccgggcaggtgctgatggagcccgagggatgcctggagatcctggagtgaagggtgaccgaggttttgatggactcccagggctccctggagagaagggccataggggtgatactggtgcccagggccttcctggtccccctggtgaggatggagagaggggagatgacggggagattgggcctcgagggctgcctggagagtcgggacctcgaggtctccttggccccaaaggcccacctggtattcctggaccccctggcgtccgaggcatggatggtccccagggccccaaagggagcttgggaccccagggagagccaggacctcctggacaacagggcacccctgggacccagggtcttcccgggccccagggtgccatcggccctcatggagagaagggtcctcaagggaagccagggctccccggcatgcctggctcagacggacccccgggtcacccagggaaggaaggtccccctggaaccaaaggaaaccagggtccctctggacctcagggacctctaggatacccaggacctcgaggggtcaagggtgtggacggaattcggggtctgaagggtcataagggtgagaagggtgaggatggctttcctgggttcaaaggtgacataggcgtgaaaggtgacaggggcgaagttggagtccctggttccaggggagaggatggtcctgaggggccaaagggacgcactggaccgactggagaccctgggcccccagggctcatgggcgagaagggcaagctgggtgttcctggtctgcctggctatcctggacgtcagggacccaaggggtccctaggatttcctggctttcctggtgccagtggagagaagggagcccggggcctgtcggggaagtcagggcctcggggagaacggggccccacgggtccacggggtcagcggggaccccgaggtgccactgggaagtctggagctaagggaacatctggtggtgatggcccccatgggccccctggagagaggggcctccctggacctcagggtcccaacgggtttcctggaccgaaaggacccccgggcccccctgggaaggacgggctgccgggacacccaggccaaagaggagaagtgggtttccaagggaagaccggcccccctggtcctccaggagtggtgggacctcagggagcagcaggagaaaccggccctatgggggagagaggtcacccaggccccccggggccccctggagagcagggactacctgggacagctggaaaagaaggaacaaagggtgaccctggtccccctggggccccagggaaggatggtcctgctggtctgaggggattcccaggagagagaggcctcccaggcactgctggtggacctggtttgaaggggaatgaaggtccgtctggcccccctggccctgcaggctcccctggggaacgaggtgcagcaggatcagggggacccattggtccgccagggcgcccaggcccgcagggtccccctggagcagcaggagagaaaggtgtcccaggtgagaagggccccattggcccaactggccgagatggagtgcagggtcctgtggggcttcctggtcctgctgggcctccaggtgtggctggagaggatggagacaagggtgaggtgggggaccccggacagaagggcaccaaagggaacaagggtgaacatggccctcctggaccccctggacccattggtcctgtggggcagcctggagcagcgggagcagatggggagcccggagctcggggaccccagggacactttggagccaaaggtgatgaaggaacaagaggattcaatgggcccccaggacccattggcctacagggtttgccaggcccctctggggagaagggagaaacaggagatgtgggtcctatgggaccacctggccccccaggacctcgaggtccagctggacccaatggcgctgatggcccacaaggtcccccaggaggtgttgggaacctgggtccccctggagagaagggggaaccaggagagtcaggatctccagggatccagggcgagccaggtgtcaagggtccacgcggggaacgtggagagaaaggagagtcggggcagccaggagagccagggccaccagggcctaaaggccccacaggcgatgatggccccaaagggaaccctggtcctgttggttttcctggtgaccctggcccccctggagaaggtggccctcggggccaggatggtgctaagggtgaccgaggcgaggatggtgagccaggacagcctggatcccctggtcccaccggggagaatggacccccagggccacttggaaagcgaggtcctgctggctcgcctggttccgaggggcgacaaggagggaagggagccaagggagatcctggcgctataggtgccccggggaagacaggcccggtgggtcctgcaggcccagcagggaaacctggccctgatggtctgagggggctcccaggctcagtgggtcagcaaggccgacctggagctacaggccaggctgggcccccaggtcctgtgggacccccagggctgcctggtctccggggcgatgctggagccaagggagagaagggccacccaggtctcattggactgattgggcccccgggtgagcagggagagaagggagatcggggacttcctgggcctcagggctcccctgggcagaagggtgagatgggtatcccaggagcatccggccccattggtcctggaggtccccccggcctccccggacctgctggccccaaaggagccaaaggagccacaggcccaggcggacccaagggagagaagggtgtgcagggccctccaggacacccgggtcccccaggcgaggtgatccagccactgcccattcagatgcccaagaagactcggcgctcggtggatggaagccgtctgatgcaggaagatgaggccataccgaccgggggagcccccggcagtcctggggggctggaggagatctttggctcactcgactccctgcgggaggagatcgagcagatgaggcggccaacagggacccaggacagccctgctcgcacctgccaggacctgaagctgtgccacccagagcttcccgatggagagtactgggtcgaccccaaccagggctgtgctcgggatgccttccgagttttctgcaacttcacagcagggggtgagacctgtgtgacgcctagggatgacgtcacgcagttctcttacgtggactcagagggctccccagtgggtgtggtccagctcaccttcctgcggctgctcagcgtctcagcccaccaggacgtctcctacccctgctctggagcagcccgtgacggtcccctgagactccgtggggccaatgaggatgagctgagcccggagactagcccctatgtcaaagaattcagagatggctgccagacacagcaaggccggacggtgctggaggtgcgaacgcctgtgctggagcagctgccagtgctggatgcctccttctcagacctgggagccccaccgaggcggggaggggtgctgctggggcctgtctgcttcatgggataggaccgtctctgtctgatcctgtccattcggaaccaggcccacctggaatcccacaacatcagctctgtgccacctcccaagagggctcctcactatctagggagccctgggccagggcgtggagagccctcagtcggggcaggccaggggaggggtgaagtggttgcctggacaccccacgggaggagtggcatctggggctcttggccctcccacctggagcctgttacccgttagagagctgagacccttatttaaaactcacctcccaatcaccccaaacaaatggaagagaagagaaaggacatggcgtattttgtatttaaaagtaattgtattaattatttaaagtgtggaaagcaaaataacaaaaaagagaaacgccaacaaaaatcagcagatgttgaagacaggggtctcgggggtgggctccggcacccacatcctggagtcaggactttcctcagtgactgtgtgtaggggggtttcagggctgaaccccacctccctcccaccttcctcccacctcacctgtcgcacccactgtgaaagttggaatatgtggtctccctggcctcagggctctgactctgccagggtggggctctctaacccacaggtgttggctgcctggcccatgtgcccactgtctcttccacttggtctgggtttggcaggcactgcctgctacttgagggccaggatgctcccccagggaagaaacggaatagtgtggggtgtgtgcagggctgcatcccgcagatggctggaatattaaaattcttctatattggctggtaaattgccatggccctgagccactgagtatgttcattgccacccctgtccctcccctgggcacccctcactttccctgatcctgcaattaaagggttaatgtgtggcatatggaagggactcccaggaccctgtgcccagcttccatgctgactgatggttaaataatgtgattgtctcctcccagg

SEQ ID NO: 232591 - DNA, 6284 bp, Artificial Sequence
  derived and/or modified sequence
cacacagaagcggcagccaccgaggagggagcagtgccgggagccccgacggcgccttgctgcatggagctgggccgctgacagctgtcgctgcccgcagcctctgacctccctgggaccccggcgtctgaggctcatagtctgctccctgtcttctgtcagcctcagggcatccagcgtctcaggccgacctgggtccctgggacccggcgtttcggcttctcagccatggagcggtgcagccgctgccatcgcctcctcctcctcctacctctggtgctggggctgagcgcggccccaggctgggcaggtgcaccccctgtggatgtgctccgggccctgaggttcccctccctccctgatggtgtccggagagcgaaaggcatctgtccagctgatgtggcctaccgagtggcacgacctgcccagctcagtgcacccactcgccagcttttcccaggaggatttcccaaagatttctctctgctgactgttgtccggacccgccctggtctccaagctcccctcctgactctctacagtgcccagggtgtccgacagctgggcctggagctgggccgacctgtccgcttcctgtatgaagaccagactgggcggcctcaacctccctctcagccagtcttccgaggcctcagcctagcagatggcaagtggcaccgtgtggctgtggctgtgaagggccagtctgtcaccctcattgttgactgcaagaagcgagtcacccggcctctcccccgaagtgctcgtccagtattggacacccatggagtgatcatctttggtgcccgtattctggatgaagaagtctttgagggtgatgtccaggagctggccattgtcccaggggtccaggcagcctatgaatcatgtgaacagaaggagctggaatgcgaggggggccagagggaaagaccccaaaaccaacagcctcacagagcccagagatctccacagcagcaaccatcaagacttcacaggccacaaaatcaggaaccccagagccaggagcagacagatctccaggtcccccccacagccgacaggttccaggcagaggaatatggggagggtggcacagacccccctgaagggccctacgattacacctatggctatggggatgattatcgtgaggagacagagcttggccctgccctctctgcggagacagcccactcaggagccgctgcccatggaccccgagggctgaagggagagaaaggagagcctgcagtgttggaacctggtatgctcgtggaggggccccctggcccagaaggccctgcgggattgattggtccccctggcatccaggggaacccaggcccagttggagaccctggagagaggggcccccctggccgagcagggctccctggatcagatggggctcctggtcctcctggcacatctctcatgctcccattccggtttggcagtggtgggggtgacaagggccctgtggtggcggcccaggaggctcaggcccaggcgatcctgcagcaggcgaggctggcgctccgtggaccccctggccccatgggatacacagggcgccctggacccttgggccaacctgggagccctggcctgaaaggagagtctggagacttaggacctcagggccccagaggacctcagggcctcacaggccctcctggcaaggctgggcgaaggggccgggcaggtgctgatggagcccgagggatgcctggagatcctggagtgaagggtgaccgaggttttgatggactcccagggctccctggagagaagggccataggggtgatactggtgcccagggccttcctggtccccctggtgaggatggagagaggggagatgacggggagattgggcctcgagggctgcctggagagtcgggacctcgaggtctccttggccccaaaggcccacctggtattcctggaccccctggcgtccgaggcatggatggtccccagggccccaaagggagcttgggaccccagggagagccaggacctcctggacaacagggcacccctgggacccagggtcttcccgggccccagggtgccatcggccctcatggagagaagggtcctcaagggaagccagggctccccggcatgcctggctcagacggacccccgggtcacccagggaaggaaggtccccctggaaccaaaggaaaccagggtccctctggacctcagggacctctaggatacccaggacctcgaggggtcaagggtgtggacggaattcggggtctgaagggtcataagggtgagaagggtgaggatggctttcctgggttcaaaggtgacataggcgtgaaaggtgacaggggcgaagttggagtccctggttccaggggagaggatggtcctgaggggccaaagggacgcactggaccgactggagaccctgggcccccagggctcatgggcgagaagggcaagctgggtgttcctggtctgcctggctatcctggacgtcagggacccaaggggtccctaggatttcctggctttcctggtgccagtggagagaagggagcccggggcctgtcggggaagtcagggcctcggggagaacggggccccacgggtccacggggtcagcggggaccccgaggtgccactgggaagtctggagctaagggaacatctggtggtgatggcccccatgggccccctggagagaggggcctccctggacctcagggtcccaacgggtttcctggaccgaaaggacccccgggcccccctgggaaggacgggctgccgggacacccaggccaaagaggagaagtgggtttccaagggaagaccggcccccctggtcctccaggagtggtgggacctcagggagcagcaggagaaaccggccctatgggggagagaggtcacccaggccccccggggccccctggagagcagggactacctgggacagctggaaaagaaggaacaaagggtgaccctggtccccctggggccccagggaaggatggtcctgctggtctgaggggattcccaggagagagaggcctcccaggcactgctggtggacctggtttgaaggggaatgaaggtccgtctggcccccctggccctgcaggctcccctggggaacgaggtgcagcaggatcagggggacccattggtccgccagggcgcccaggcccgcagggtccccctggagcagcaggagagaaaggtgtcccaggtgagaagggccccattggcccaactggccgagatggagtgcagggtcctgtggggcttcctggtcctgctgggcctccaggtgtggctggagaggatggagacaagggtgaggtgggggaccccggacagaagggcaccaaagggaacaagggtgaacatggccctcctggaccccctggacccattggtcctgtggggcagcctggagcagcgggagcagatggggagcctggagctcggggaccccagggacactttggagccaaaggtgatgaaggaacaagaggattcaatgggcccccaggacccattggcctacagggtttgccaggcccctctggggagaagggagaaacaggagatgtgggtcctatgggaccacctggccccccaggacctcgaggtccagctggacccaatggcgctgatggcccacaaggtcccccaggaggtgttgggaacctgggtccccctggagagaagggggaaccaggagagtcaggatctccagggatccagggcgagccaggtgtcaagggtccacgcggggaacgtggagagaaaggagagtcggggcagccaggagagccagggccaccagggcctaaaggccccacaggcgatgatggccccaaagggaaccctggtcctgttggttttcctggtgaccctggcccccctggagaaggtggccctcggggccaggatggtgctaagggtgaccgaggcgaggatggtgagccaggacagcctggatcccctggtcccaccggggagaatggacccccagggccacttggaaagcgaggtcctgctggctcgcctggttccgaggggcgacaaggagggaagggagccaagggagatcctggcgctataggtgccccggggaagacaggcccggtgggtcctgcaggcccagcagggaaacctggccctgatggtctgagggggctcccaggctcagtgggtcagcaaggccgacctggagctacaggccaggctgggcccccaggtcctgtgggacccccagggctgcctggtctccggggcgatgctggagccaagggagagaagggccacccaggtctcattggactgattgggcccccgggtgagcagggagagaagggagatcggggacttcctgggcctcagggctcccctgggcagaagggtgagatgggtatcccaggagcatccggccccattggtcctggaggtccccccggcctccccggacctgctggccccaaaggagccaaaggagccacaggcccaggcggacccaagggagagaagggtgtgcagggccctccaggacacccgggtcccccaggcgaggtgatccagccactgcccattcagatgcccaagaagactcggcgctcggtggatggaagccgtctgatgcaggaagatgaggccataccgaccgggggagcccccggcagtcctggggggctggaggagatctttggctcactcgactccctgcgggaggagatcgagcagatgaggcggccaacagggacccaggacagccctgctcgcacctgccaggacctgaagctgtgccacccagagcttcccgatggagagtactgggtcgaccccaaccagggctgtgctcgggatgccttccgagttttctgcaacttcacagcagggggtgagacctgtgtgacgcctagggatgacgtcacgcagttctcttacgtggactcagagggctccccagtgggtgtggtccagctcaccttcctgcggctgctcagcgtctcagcccaccaggacgtctcctacccctgctctggagcagcccgtgacggtcccctgagactccgtggggccaatgaggatgagctgagcccggagactagcccctatgtcaaagaattcagagatggctgccagacacagcaaggccggacggtgctggaggtgcgaacgcctgtgctggagcagctgccagtgctggatgcctccttctcagacctgggagccccaccgaggcggggaggggtgctgctggggcctgtctgcttcatgggataggaccgtctctgtctgatcctgtccattcggaaccaggcccacctggaatcccacaacatcagctctgtgccacctcccaagagggctcctcactatctagggagccctgggccagggcgtggagagccctcagtcggggcaggccaggggaggggtgaagtggttgcctggacaccccacgggaggagtggcatctggggctcttggccctcccacctggagcctgttacccgttagagagctgagacccttatttaaaactcacctcccaatcaccccaaacaaatggaagagaagagaaaggacatggcgtattttgtatttaaaagtaattgtattaattatttaaagtgtggaaagcaaaataacaaaaaagagaaacgccaacaaaaatcagcagatgttgaagacaggggtctcgggggtgggctccggcacccacatcctggagtcaggactttcctcagtgactgtgtgtaggggggtttcagggctgaaccccacctccctcccaccttcctcccacctcacctgtcgcacccactgtgaaagttggaatatgtggtctccctggcctcagggctctgactctgccagggtggggctctctaacccacaggtgttggctgcctggcccatgtgcccactgtctcttccacttggtctgggtttggcaggcactgcctgctacttgagggccaggatgctcccccagggaagaaacggaatagtgtggggtgtgtgcagggctgcatcccgcagatggctggaatattaaaattcttctatattggctggtaaattgccatggccctgagccactgagtatgttcattgccacccctgtccctcccctgggcacccctcactttccctgatcctgcaattaaagggttaatgtgtggcatatggaagggactcccaggaccctgtgcccagcttccatgctgactgatggttaaataatgtgattgtctcctcccagg

SEQ ID NO: 232592 - DNA, 6347 bp, Artificial Sequence
  derived and/or modified sequence
cacacagaagcggcagccaccgaggagggagcagtgccgggagccccgacggcgccttgctgcatggagctgggccgctgacagctgtcgctgcccgcagcctctgacctccctgggaccccggcgtctgaggctcatagtctgctccctgtcttctgtcagcctcagggcatccagcgtctcaggccgacctgggtccctgggacccggcgtttcggcttctcagccatggagcggtgcagccgctgccatcgcctcctcctcctcctacctctggtgctggggctgagcgcggccccaggctgggcaggtgcaccccctgtggatgtgctccgggccctgaggttcccctccctccctgatggtgtccggagagcgaaaggcatctgtccagctgatgtggcctaccgagtggcacgacctgcccagctcagtgcacccactcgccagcttttcccaggaggatttcccaaagatttctctctgctgactgttgtccggacccgccctggtctccaagctcccctcctgactctctacagtgcccagggtgtccgacagctgggcctggagctgggccgacctgtccgcttcctgtatgaagaccagactgggcggcctcaacctccctctcagccagtcttccgaggcctcagcctagcagatggcaagtggcaccgtgtggctgtggctgtgaagggccagtctgtcaccctcattgttgactgcaagaagcgagtcacccggcctctcccccgaagtgctcgtccagtattggacacccatggagtgatcatctttggtgcccgtattctggatgaagaagtctttgagggtgatgtccaggagctggccattgtcccaggggtccaggcagcctatgaatcatgtgaacagaaggagctggaatgcgaggggggccagagggaaagaccccaaaaccaacagcctcacagagcccagagatctccacagcagcaaccatcaagacttcacaggccacaaaatcaggaaccccagagccaggaccccaccccaggtgaagaggaagaaatcctggagtcgagcctcttgccaccccttgaggaggagcagacagatctccaggtcccccccacagccgacaggttccaggcagaggaatatggggagggtggcacagacccccctgaagggccctacgattacacctatggctatggggatgattatcgtgaggagacagagcttggccctgccctctctgcggagacagcccactcaggagccgctgcccatggaccccgagggctgaagggagagaaaggagagcctgcagtgttggaacctggtatgctcgtggaggggccccctggcccagaaggccctgcgggattgattggtccccctggcatccaggggaacccaggcccagttggagaccctggagagaggggcccccctggccgagcagggctccctggatcagatggggctcctggtcctcctggcacatctctcatgctcccattccggtttggcagtggtgggggtgacaagggccctgtggtggcggcccaggaggctcaggcccaggcgatcctgcagcaggcgaggctggcgctccgtggaccccctggccccatgggatacacagggcgccctggacccttgggccaacctgggagccctggcctgaaaggagagtctggagacttaggacctcagggccccagaggacctcagggcctcacaggccctcctggcaaggctgggcgaaggggccgggcaggtgctgatggagcccgagggatgcctggagatcctggagtgaagggtgaccgaggttttgatggactcccagggctccctggagagaagggccataggggtgatactggtgcccagggccttcctggtccccctggtgaggatggagagaggggagatgacggggagattgggcctcgagggctgcctggagagtcgggacctcgaggtctccttggccccaaaggcccacctggtattcctggaccccctggcgtccgaggcatggatggtccccagggccccaaagggagcttgggaccccagggagagccaggacctcctggacaacagggcacccctgggacccagggtcttcccgggccccagggtgccatcggccctcatggagagaagggtcctcaagggaagccagggctccccggcatgcctggctcagacggacccccgggtcacccagggaaggaaggtccccctggaaccaaaggaaaccagggtccctctggacctcagggtcctctaggatacccaggacctcgaggggtcaagggtgtggacggaattcggggtctgaagggtcataagggtgagaagggtgaggatggctttcctgggttcaaaggtgacataggcgtgaaaggtgacaggggcgaagttggagtccctggttccaggggagaggatggtcctgaggggccaaagggacgcactggaccgactggagaccctgggcccccagggctcatgggcgagaagggcaagctgggtgttcctggtctgcctggctatcctggacgtcagggacccaaggggtccctaggatttcctggctttcctggtgccagtggagagaagggagcccggggcctgtcggggaagtcagggcctcggggagaacggggccccacgggtccacggggtcagcggggaccccgaggtgccactgggaagtctggagctaagggaacatctggtggtgatggcccccatgggccccctggagagaggggcctccctggacctcagggtcccaacgggtttcctggaccgaaaggacccctgggcccccctgggaaggacgggctgccgggacacccaggccaaagaggagaagtgggtttccaagggaagaccggcccccctggtcctccaggagtggtgggacctcagggagcagcaggagaaaccggccctatgggggagagaggtcacccaggccccccggggccccctggagagcagggactacctgggacagctggaaaagaaggaacaaagggtgaccctggtccccctggggccccagggaaggatggtcctgctggtctgaggggattcccaggagagagaggcctcccaggcactgctggtggacctggtttgaaggggaatgaaggtccgtctggcccccctggccctgcaggctcccctggggaacgaggtgcagcaggatcagggggacccattggtccgccagggcgcccaggcccgcagggtccccctggagcagcaggagagaaaggtgtcccaggtgagaagggccccattggcccaactggccgagatggagtgcagggtcctgtggggcttcctggtcctgctgggcctccaggtgtggctggagaggatggagacaagggtgaggtgggggaccccggacagaagggcaccaaagggaacaagggtgaacatggccctcctggaccccctggacccattggtcctgtggggcagcctggagcagcgggagcagatggggagcccggagctcggggaccccagggacactttggagccaaaggtgatgaaggaacaagaggattcaatgggcccccaggacccattggcctacagggtttgccaggcccctctggggagaagggagaaacaggagatgtgggtcctatgggaccacctggccccccaggacctcgaggtccagctggacccaatggcgctgatggcccacaaggtcccccaggaggtgttgggaacctgggtccccctggagagaagggggaaccaggagagtcaggatctccagggatccagggcgagccaggtgtcaagggtccacgcggggaacgtggagagaaaggagagtcggggcagccaggagagccagggccaccagggcctaaaggccccacaggcgatgatggccccaaagggaaccctggtcctgttggttttcctggtgaccctggcccccctggagaaggtggccctcggggccaggatggtgctaagggtgaccgaggcgaggatggtgagccaggacagcctggatcccctggtcccaccggggagaatggacccccagggccacttggaaagcgaggtcctgctggctcgcctggttccgaggggcgacaaggagggaagggagccaagggagatcctggcgctataggtgccccggggaagacaggcccggtgggtcctgcaggcccagcagggaaacctggccctgatggtctgagggggctcccaggctcagtgggtcagcaaggccgacctggagctacaggccaggctgggcccccaggtcctgtgggacccccagggctgcctggtctccggggcgatgctggagccaagggagagaagggccacccaggtctcattggactgattgggcccccgggtgagcagggagagaagggagatcggggacttcctgggcctcagggctcccctgggcagaagggtgagatgggtatcccaggagcatccggccccattggtcctggaggtccccccggcctccccggacctgctggccccaaaggagccaaaggagccacaggcccaggcggacccaagggagagaagggtgtgcagggccctccaggacacccgggtcccccaggcgaggtgatccagccactgcccattcagatgcccaagaagactcggcgctcggtggatggaagccgtctgatgcaggaagatgaggccataccgaccgggggagcccccggcagtcctggggggctggaggagatctttggctcactcgactccctgcgggaggagatcgagcagatgaggcggccaacagggacccaggacagccctgctcgcacctgccaggacctgaagctgtgccacccagagcttcccgatggagagtactgggtcgaccccaaccagggctgtgctcgggatgccttccgagttttctgcaacttcacagcagggggtgagacctgtgtgacgcctagggatgacgtcacgcagttctcttacgtggactcagagggctccccagtgggtgtggtccagctcaccttcctgcggctgctcagcgtctcagcccaccaggacgtctcctacccctgctctggagcagcccgtgacggtcccctgagactccgtggggccaatgaggatgagctgagcccggagactagcccctatgtcaaagaattcagagatggctgccagacacagcaaggccggacggtgctggaggtgcgaacgcctgtgctggagcagctgccagtgctggatgcctccttctcagacctgggagccccaccgaggcggggaggggtgctgctggggcctgtctgcttcatgggataggaccgtctctgtctgatcctgtccattcggaaccaggcccacctggaatcccacaacatcagctctgtgccacctcccaagagggctcctcactatctagggagccctgggccagggcgtggagagccctcagtcggggcaggccaggggaggggtgaagtggttgcctggacaccccacgggaggagtggcatctggggctcttggccctcccacctggagcctgttacccgttagagagctgagacccttatttaaaactcacctcccaatcaccccaaacaaatggaagagaagagaaaggacatggcgtattttgtatttaaaagtaattgtattaattatttaaagtgtggaaagcaaaataacaaaaaagagaaacgccaacaaaaatcagcagatgttgaagacaggggtctcgggggtgggctccggcacccacatcctggagtcaggactttcctcagtgactgtgtgtaggggggtttcagggctgaaccccacctccctcccaccttcctcccacctcacctgtcgcacccactgtgaaagttggaatatgtggtctccctggcctcagggctctgactctgccagggtggggctctctaacccacaggtgttggctgcctggcccatgtgcccactgtctcttccacttggtctgggtttggcaggcactgcctgctacttgagggccaggatgctcccccagggaagaaacggaatagtgtggggtgtgtgcagggctgcatcccgcagatggctggaatattaaaattcttctatattggctggtaaattgccatggccctgagccactgagtatgttcattgccacccctgtccctcccctgggcacccctcactttccctgatcctgcaattaaagggttaatgtgtggcatatggaagggactcccaggaccctgtgcccagcttccatgctgactgatggttaaataatgtgattgtctcctcccagg

SEQ ID NO: 232593 - DNA, 6284 bp, Artificial Sequence
  derived and/or modified sequence
cacacagaagcggcagccaccgaggagggagcagtgccgggagccccgacggcgccttgctgcatggagctgggccgctgacagctgtcgctgcccgcagcctctgacctccctgggaccccggcgtctgaggctcatagtctgctccctgtcttctgtcagcctcagggcatccagcgtctcaggccgacctgggtccctgggacccggcgtttcggcttctcagccatggagcggtgcagccgctgccatcgcctcctcctcctcctacctctggtgctggggctgagcgcggccccaggctgggcaggtgcaccccctgtggatgtgctccgggccctgaggttcccctccctccctgatggtgtccggagagcgaaaggcatctgtccagctgatgtggcctaccgagtggcacgacctgcccagctcagtgcacccactcgccagcttttcccaggaggatttcccaaagatttctctctgctgactgttgtccggacccgccctggtctccaagctcccctcctgactctctacagtgcccagggtgtccgacagctgggcctggagctgggccgacctgtccgcttcctgtatgaagaccagactgggcggcctcaacctccctctcagccagtcttccgaggcctcagcctagcagatggcaagtggcaccgtgtggctgtggctgtgaagggccagtctgtcaccctcattgttgactgcaagaagcgagtcacccggcctctcccccgaagtgctcgtccagtattggacacccatggagtgatcatctttggtgcccgtattctggatgaagaagtctttgagggtgatgtccaggagctggccattgtcccaggggtccaggcagcctatgaatcatgtgaacagaaggagctggaatgcgaggggggccagagggaaagaccccaaaaccaacagcctcacagagcccagagatctccacagcagcaaccatcaagacttcacaggccacaaaatcaggaaccccagagccaggagcagacagatctccaggtcccccccacagccgacaggttccaggcagaggaatatggggagggtggcacagacccccctgaagggccctacgattacacctatggctatggggatgattatcgtgaggagacagagcttggccctgccctctctgcggagacagcccactcaggagccgctgcccatggaccccgagggctgaagggagagaaaggagagcctgcagtgttggaacctggtatgctcgtggaggggccccctggcccagaaggccctgcgggattgattggtccccctggcatccaggggaacccaggcccagttggagaccctggagagaggggcccccctggccgagcagggctccctggatcagatggggctcctggtcctcctggcacatctctcatgctcccattccggtttggcagtggtgggggtgacaagggccctgtggtggcggcccaggaggctcaggcccaggcgatcctgcagcaggcgaggctggcgctccgtggaccccctggccccatgggatacacagggcgccctggacccttgggccaacctgggagccctggcctgaaaggagagtctggagacttaggacctcagggccccagaggacctcagggcctcacaggccctcctggcaaggctgggcgaaggggccgggcaggtgctgatggagcccgagggatgcctggagatcctggagtgaagggtgaccgaggttttgatggactcccagggctccctggagagaagggccataggggtgatactggtgcccagggccttcctggtccccctggtgaggatggagagaggggagatgacggggagattgggcctcgagggctgcctggagagtcgggacctcgaggtctccttggccccaaaggcccacctggtattcctggaccccctggcgtccgaggcatggatggtccccagggccccaaagggagcttgggaccccagggagagccaggacctcctggacaacagggcacccctgggacccagggtcttcccgggccccagggtgccatcggccctcatggagagaagggtcctcaagggaagccagggctccccggcatgcctggctcagacggacccccgggtcacccagggaaggaaggtccccctggaaccaaaggaaaccagggtccctctggacctcagggacctctaggatacccaggacctcgaggggtcaagggtgtggacggaattcggggtctgaagggtcataagggtgagaagggtgaggatggctttcctgggttcaaaggtgacataggcgtgaaaggtgacaggggcgaagttggagtccctggttccaggggagaggatggtcctgaggggccaaagggacgcactggaccgactggagaccctgggcccccagggctcatgggcgagaagggcaagctgggtgttcctggtctgcctggctatcctggacgtcagggacccaaggggtccctaggatttcctggctttcctggtgccagtggagagaagggagcccggggcctgtcggggaagtcagggcctcggggagaacggggccccacgggtccacggggtcagcggggaccccgaggtgccactgggaagtctggagctaagggaacatctggtggtgatggcccccatgggccccctggagagaggggcctccctggacctcagggtcccaacgggtttcctggaccgaaaggacccccgggcccccctgggaaggacgggctgccgggacacccaggccaaagaggagaagtgggtttccaagggaagaccggcccccctggtcctccaggagtggtgggacctcagggagcagcaggagaaaccggccctatgggggagagaggtcacccaggccccccggggccccctggagagcagggactacctgggacagctggaaaagaaggaacaaagggtgaccctggtccccctggggccccagggaaggatggtcctgctggtctgaggggattcccaggagagagaggcctcccaggcactgctggtggacctggtttgaaggggaatgaaggtccgtctggcccccctggccctgcaggctcccctggggaacgaggtgcagcaggatcagggggacccattggtccgccagggcgcccaggcccgcagggtccccctggagcagcaggagagaaaggtgtcccaggtgagaagggccccattggcccaactggccgagatggagtgcagggtcctgtggggcttcctggtcctgctgggcctccaggtgtggctggagaggatggagacaagggtgaggtgggggaccccggacagaagggcaccaaagggaacaagggtgaacatggccctcctggaccccctggacccattggtcctgtggggcagcctggagcagcgggagcagatggggagcccggagctcggggaccccagggacactttggagccaaaggtgatgaaggaacaagaggattcaatgggcccccaggacccattggcctacagggtttgccaggcccctctggggagaagggagaaacaggagatgtgggtcctatgggaccacctggccccccaggacctcgaggtccagctggacccaatggcgctgatggcccacaaggtcccccaggaggtgttgggaacctgggtccccctggagagaagggggaaccaggagagtcaggatctccagggatccagggcgagccaggtgtcaagggtccacgcggggaacgtggagagaaaggagagtcggggcagccaggagagccagggccaccagggcctaaaggccccacaggcgatgatggccccaaagggaaccctggtcctgttggttttcctggtgaccctggcccccctggagaaggtggccctcggggccaggatggtgctaagggtgaccgaggcgaggatggtgagccaggacagcctggatcccctggtcccaccggggagaatggacccccagggccacttggaaagcgaggtcctgctggctcgcctggttccgaggggcgacaaggagggaagggagccaagggagatcctggcgctataggtgccccggggaagacaggcccggtgggtcctgcaggcccagcagggaaacctggccctgatggtctgagggggctcccaggctcagtgggtcagcaaggccgacctggagctacaggccaggctgggcccccaggtcctgtgggacccccagggctgcctggtctccggggcgatgctggagccaagggagagaagggccacccaggtctcattggactgattgggcccccgggtgagcagggagagaagggagatcggggacttcctgggcctcagggctcccctgggcagaagggtgagatgggtatcccaggagcatccggccccattggtcctggaggtccccccggcctccccggacctgctggccccaaaggagccaaaggagccacaggcccaggcggacccaagggagagaagggtgtgcagggccctccaggacacccgggtcccccaggcgaggtgatccagccactgcccattcagatgcccaagaagactcggcgctcggtggatggaagccgtctgatgcaggaagatgaggccataccgaccgggggagcccccggcagtcctggggggctggaggagatctttggctcactcgactccctgcgggaggagatcgagcagatgaggcggccaacagggacccaggacagccctgctcgcacctgccaggacctgaagctgtgccacccagagcttcccgatggagagtactgggtcgaccccaaccagggctgtgctcgggatgccttccgagttttctgcaacttcacagcagggggtgagacctgtgtgacgcctagggatgacgtcacgcagttctcttacgtggactcagagggctccccagtgggtgtggtccagctcaccttcctgcggctgctcagcgtctcagcccaccaggacgtctcctacccctgctctggagcagcccgtgacggtcccctgagactccgtggggccaatgaggatgagctgagcccggagactagcccctatgtcaaagaattcagagatggctgccagacacagcaaggccggacggtgctggaggtgcgaacgcctgtgctggagcagctgccagtgctggatgcctccttctcagacctgggagccccaccgaggcggggaggggtgctgctggggcctgtctgcttcatgggataggaccgtctctgtctgatcctgtccattcggaaccaggcccacctggaatcccacaacatcagctctgtgccacctcccaagagggctcctcactatctagggagccctgggccagggcgtggagagccctcagtcggggcaggccaggggaggggtgaagtggttgcctggacaccccacgggaggagtggcatctggggctcttggccctcccacctggagcctgttacccgttagagagctgagacccttatttaaaactcacctcccaatcaccccaaacaaatggaagagaagagaaaggacatggcgtattttgtatttaaaagtaattgtattaattatttaaagtgtggaaagcaaaataacaaaaaagagaaacgccaacaaaaatcagcagatgttgaagacaggggtctcgggggtgggctccggcacccacatcctggagtcaggactttcctcagtgactgtgtgtaggggggtttcagggctgaaccccacctccctcccaccttcctcccacctcacctgtcgcacccactgtgaaagttggaatatgtggtctccctggcctcagggctctgactctgccagggtggggctctctaacccacaggtgttggctgcctggcccatgtgcccactgtctcttccacttggtctgggtttggcaggcactgcctgctacttgagggccaggatgctcccccagggaagaaacggaatagtgtggggtgtgtgcagggctgcatcccgcagatggctggaatattaaaattcttctatattggctggtaaattgccatggccctgagccactgagtatgttcattgccacccctgtccctcccctgggcacccctcactttccctgatcctgcaattaaagggttaatgtgtggcatatggaagggactcccaggaccctgtgcccagcttccatgctgactgatggttaaataatgtgattgtctcctcccagg

SEQ ID NO: 232594 - DNA, 6425 bp, Artificial Sequence
  derived and/or modified sequence
cacacagaagcggcagccaccgaggagggagcagtgccgggagccccgacggcgccttgctgcatggagctgggccgctgacagctgtcgctgcccgcagcctctgacctccctgggaccccggcgtctgaggctcatagtctgctccctgtcttctgtcagcctcagggcatccagcgtctcaggccgacctgggtccctgggacccggcgtttcggcttctcagccatggagcggtgcagccgctgccatcgcctcctcctcctcctacctctggtgctggggctgagcgcggccccaggctgggcaggtgcaccccctgtggatgtgctccgggccctgaggttcccctccctccctgatggtgtccggagagcgaaaggcatctgtccagctgatgtggcctaccgagtggcacgacctgcccagctcagtgcacccactcgccagcttttcccaggaggatttcccaaagatttctctctgctgactgttgtccggacccgccctggtctccaagctcccctcctgactctctacagtgcccagggtgtccgacagctgggcctggagctgggcccacctgtccgcttcctgtatgaagaccagactgggcggcctcaacctccctctcagccagtcttccgaggcctcagcctagcagatggcaagtggcaccgtgtggctgtggctgtgaagggccagtctgtcaccctcattgttgactgcaagaagcgagtcacccggcctctcccccgaagtgctcgtccagtattggacacccatggagtgatcatctttggtgcccgtattctggatgaagaagtctttgagggtgatgtccaggagctggccattgtcccaggggtccaggcagcctatgaatcatgtgaacagaaggagctggaatgcgaggggggccagagggaaagaccccaaaaccaacagcctcacagagcccagagatctccacagcagcaaccatcaagacttcacaggccacaaaatcaggaaccccagagccagcccactgagtctctctactatgactacaagcccccctattatgatgtgatgactacggggacaacccctgattatcaggaccccaccccaggtgaagaggaagaaatcctggagtcgagcctcttgccaccccttgaggaggagcagacagatctccaggtcccccccacagccgacaggttccaggcagaggaatatggggagggtggcacagacccccctgaagggccctacgattacacctatggctatggggatgattatcgtgaggagacagagcttggccctgccctctctgcggagacagcccactcaggagccgctgcccatggaccccgagggctgaagggagagaaaggagagcctgcagtgttggaacctggtatgctcgtggaggggccccctggcccagaaggccctgcgggattgattggtccccctggcatccaggggaacccaggcccagttggagaccctggagagaggggcccccctggccgagcagggctccctggatcagatggggctcctggtcctcctggcacatctctcatgctcccattccggtttggcagtggtgggggtgacaagggccctgtggtggcggcccaggaggctcaggcccaggcgatcctgcagcaggcgaggctggcgctccgtggaccccctggccccatgggatacacagggcgccctggacccttgggccaacctgggagccctggcctgaaaggagagtctggagacttaggacctcagggccccagaggacctcagggcctcacaggccctcctggcaaggctgggcgaaggggccgggcaggtgctgatggagcccgagggatgcctggagatcctggagtgaagggtgaccgaggttttgatggactcccagggctccctggagagaagggccataggggtgatactggtgcccagggccttcctggtccccctggtgaggatggagagaggggagatgacggggagattgggcctcgagggctgcctggagagtcgggacctcgaggtctccttggccccaaaggcccacctggtattcctggaccccctggcgtccgaggcatggatggtccccagggccccaaagggagcttgggaccccagggagagccaggacctcctggacaacagggcacccctgggacccagggtcttcccgggccccagggtgccatcggccctcatggagagaagggtcctcaagggaagccagggctccccggcatgcctggctcagacggacccccgggtcacccagggaaggaaggtccccctggaaccaaaggaaaccagggtccctctggacctcagggacctctaggatacccaggacctcgaggggtcaagggtgtggacggaattcggggtctgaagggtcataagggtgagaagggtgaggatggctttcctgggttcaaaggtgacataggcgtgaaaggtgacaggggcgaagttggagtccctggttccaggggagaggatggtcctgaggggccaaagggacgcactggaccgactggagaccctgggcccccagggctcatgggcgagaagggcaagctgggtgttcctggtctgcctggctatcctggacgtcagggacccaaggggtccctaggatttcctggctttcctggtgccagtggagagaagggagcccggggcctgtcggggaagtcagggcctcggggagaacggggccccacgggtccacggggtcagcggggaccccgaggtgccactgggaagtctggagctaagggaacatctggtggtgatggcccccatgggccccctggagagaggggcctccctggacctcagggtcccaacgggtttcctggaccgaaaggacccccgggcccccctgggaaggacgggctgccgggacacccaggccaaagaggagaagtgggtttccaagggaagaccggcccccctggtcctccaggagtggtgggacctcagggagcagcaggagaaaccggccctatgggggagagaggtcacccaggccccccggggccccctggagagcagggactacctgggacagctggaaaagaaggaacaaagggtgaccctggtccccctggggccccagggaaggatggtcctgctggtctgaggggattcccaggagagagaggcctcccaggcactgctggtggacctggtttgaaggggaatgaaggtccgtctggcccccctggccctgcaggctcccctggggaacgaggtgcagcaggatcagggggacccattggtccgccagggcgcccaggcccgcagggtccccctggagcagcaggagagaaaggtgtcccaggtgagaagggccccattggcccaactggccgagatggagtgcagggtcctgtggggcttcctggtcctgctgggcctccaggtgtggctggagaggatggagacaagggtgaggtgggggaccccggacagaagggcaccaaagggaacaagggtgaacatggccctcctggaccccctggacccattggtcctgtggggcagcctggagcagcgggagcagatggggagcctggagctcggggaccccagggacactttggagccaaaggtgatgaaggaacaagaggattcaatgggcccccaggacccattggcctacagggtttgccaggcccctctggggagaagggagaaacaggagatgtgggtcctatgggaccacctggccccccaggacctcgaggtccagctggacccaatggcgctgatggcccacaaggtcccccaggaggtgttgggaacctgggtccccctggagagaagggggaaccaggagagtcaggatctccagggatccagggcgagccaggtgtcaagggtccacgcggggaacgtggagagaaaggagagtcggggcagccaggagagccagggccaccagggcctaaaggccccacaggcgatgatggccccaaagggaaccctggtcctgttggttttcctggtgaccctggcccccctggagaaggtggccctcggggccaggatggtgctaagggtgaccgaggcgaggatggtgagccaggacagcctggatcccctggtcccaccggggagaatggacccccagggccacttggaaagcgaggtcctgctggctcgcctggttccgaggggcgacaaggagggaagggagccaagggagatcctggcgctataggtgccccggggaagacaggcccggtgggtcctgcaggcccagcagggaaacctggccctgatggtctgagggggctcccaggctcagtgggtcagcaaggccgacctggagctacaggccaggctgggcccccaggtcctgtgggacccccagggctgcctggtctccggggcgatgctggagccaagggagagaagggccacccaggtctcattggactgattgggcccccgggtgagcagggagagaagggagatcggggacttcctgggcctcagggctcccctgggcagaagggtgagatgggtatcccaggagcatccggccccattggtcctggaggtccccccggcctccccggacctgctggccccaaaggagccaaaggagccacaggcccaggcggacccaagggagagaagggtgtgcagggccctccaggacacccgggtcccccaggcgaggtgatccagccactgcccattcagatgcccaagaagactcggcgctcggtggatggaagccgtctgatgcaggaagatgaggccataccgaccgggggagcccccggcagtcctggggggctggaggagatctttggctcactcgactccctgcgggaggagatcgagcagatgaggcggccaacagggacccaggacagccctgctcgcacctgccaggacctgaagctgtgccacccagagcttcccgatggagagtactgggtcgaccccaaccagggctgtgctcgggatgccttccgagttttctgcaacttcacagcagggggtgagacctgtgtgacgcctagggatgacgtcacgcagttctcttacgtggactcagagggctccccagtgggtgtggtccagctcaccttcctgcggctgctcagcgtctcagcccaccaggacgtctcctacccctgctctggagcagcccgtgacggtcccctgagactccgtggggccaatgaggatgagctgagcccggagactagcccctatgtcaaagaattcagagatggctgccagacacagcaaggccggacggtgctggaggtgcgaacgcctgtgctggagcagctgccagtgctggatgcctccttctcagacctgggagccccaccgaggcggggaggggtgctgctggggcctgtctgcttcatgggataggaccgtctctgtctgatcctgtccattcggaaccaggcccacctggaatcccacaacatcagctctgtgccacctcccaagagggctcctcactatctagggagccctgggccagggcgtggagagccctcagtcggggcaggccaggggaggggtgaagtggttgcctggacaccccacgggaggagtggcatctggggctcttggccctcccacctggagcctgttacccgttagagagctgagacccttatttaaaactcacctcccaatcaccccaaacaaatggaagagaagagaaaggacatggcgtattttgtatttaaaagtaattgtattaattatttaaagtgtggaaagcaaaataacaaaaaagagaaacgccaacaaaaatcagcagatgttgaagacaggggtctcgggggtgggctccggcacccacatcctggagtcaggactttcctcagtgactgtgtgtaggggggtttcagggctgaaccccacctccctcccaccttcctcccacctcacctgtcgcacccactgtgaaagttggaatatgtggtctccctggcctcagggctctgactctgccagggtggggctctctaacccacaggtgttggctgcctggcccatgtgcccactgtctcttccacttggtctgggtttggcaggcactgcctgctacttgagggccaggatgctcccccagggaagaaacggaatagtgtggggtgtgtgcagggctgcatcccgcagatggctggaatattaaaattcttctatattggctggtaaattgccatggccctgagccactgagtatgttcattgccacccctgtccctcccctgggcacccctcactttccctgatcctgcaattaaagggttaatgtgtggcatatggaagggactcccaggaccctgtgcccagcttccatgctgactgatggttaaataatgtgattgtctcctcccagg

SEQ ID NO: 232595 - DNA, 6362 bp, Artificial Sequence
  derived and/or modified sequence
cacacagaagcggcagccaccgaggagggagcagtgccgggagccccgacggcgccttgctgcatggagctgggccgctgacagctgtcgctgcccgcagcctctgacctccctgggaccccggcgtctgaggctcatagtctgctccctgtcttctgtcagcctcagggcatccagcgtctcaggccgacctgggtccctgggacccggcgtttcggcttctcagccatggagcggtgcagccgctgccatcgcctcctcctcctcctacctctggtgctggggctgagcgcggccccaggctgggcaggtgcaccccctgtggatgtgctccgggccctgaggttcccctccctccctgatggtgtccggagagcgaaaggcatctgtccagctgatgtggcctaccgagtggcacgacctgcccagctcagtgcacccactcgccagcttttcccaggaggatttcccaaagatttctctctgctgactgttgtccggacccgccctggtctccaagctcccctcctgactctctacagtgcccagggtgtccgacagctgggcctggagctgggccgacctgtccgcttcctgtatgaagaccagactgggcggcctcaacctccctctcagccagtcttccgaggcctcagcctagcagatggcaagtggcaccgtgtggctgtggctgtgaagggccagtctgtcaccctcattgttgactgcaagaagcgagtcacccggcctctcccccgaagtgctcgtccagtattggacacccatggagtgatcatctttggtgcccgtattctggatgaagaagtctttgagggtgatgtccaggagctggccattgtcccaggggtccaggcagcctatgaatcatgtgaacagaaggagctggaatgcgaggggggccagagggaaagaccccaaaaccaacagcctcacagagcccagagatctccacagcagcaaccatcaagacttcacaggccacaaaatcaggaaccccagagccagcccactgagtctctctactatgactacaagcccccctattatgatgtgatgactacggggacaacccctgattatcaggagcagacagatctccaggtcccccccacagccgacaggttccaggcagaggaatatggggagggtggcacagacccccctgaagggccctacgattacacctatggctatggggatgattatcgtgaggagacagagcttggccctgccctctctgcggagacagcccactcaggagccgctgcccatggaccccgagggctgaagggagagaaaggagagcctgcagtgttggaacctggtatgctcgtggaggggccccctggcccagaaggccctgcgggattgattggtccccctggcatccaggggaacccaggcccagttggagaccctggagagaggggcccccctggccgagcagggctccctggatcagatggggctcctggtcctcctggcacatctctcatgctcccattccggtttggcagtggtgggggtgacaagggccctgtggtggcggcccaggaggctcaggcccaggcgatcctgcagcaggcgaggctggcgctccgtggaccccctggccccatgggatacacagggcgccctggacccttgggccaacctgggagccctggcctgaaaggagagtctggagacttaggacctcagggccccagaggacctcagggcctcacaggccctcctggcaaggctgggcgaaggggccgggcaggtgctgatggagcccgagggatgcctggagatcctggagtgaagggtgaccgaggttttgatggactcccagggctccctggagagaagggccataggggtgatactggtgcccagggccttcctggtccccctggtgaggatggagagaggggagatgacggggagattgggcctcgagggctgcctggagagtcgggacctcgaggtctccttggccccaaaggcccacctggtattcctggaccccctggcgtccgaggcatggatggtccccagggccccaaagggagcttgggaccccagggagagccaggacctcctggacaacagggcacccctgggacccagggtcttcccgggccccagggtgccatcggccctcatggagagaagggtcctcaagggaagccagggctccccggcatgcctggctcagacggacccccgggtcacccagggaaggaaggtccccctggaaccaaaggaaaccagggtccctctggacctcagggacctctaggatacccaggacctcgaggggtcaagggtgtggacggaattcggggtctgaagggtcataagggtgagaagggtgaggatggctttcctgggttcaaaggtgacataggcgtgaaaggtgacaggggcgaagttggagtccctggttccaggggagaggatggtcctgaggggccaaagggacgcactggaccgactggagaccctgggcccccagggctcatgggcgagaagggcaagctgggtgttcctggtctgcctggctatcctggacgtcagggacccaaggggtccctaggatttcctggctttcctggtgccagtggagagaagggagcccggggcctgtcggggaagtcagggcctcggggagaacggggccccacgggtccacggggtcagcggggaccccgaggtgccactgggaagtctggagctaagggaacatctggtggtgatggcccccatgggccccctggagagaggggcctccctggacctcagggtcccaacgggtttcctggaccgaaaggacccccgggcccccctgggaaggacgggctgccgggacacccaggccaaagaggagaagtgggtttccaagggaagaccggcccccctggtcctccaggagtggtgggacctcagggagcagcaggagaaaccggccctatgggggagagaggtcacccaggccccccggggccccctggagagcagggactacctgggacagctggaaaagaaggaacaaagggtgaccctggtccccctggggccccagggaaggatggtcctgctggtctgaggggattcccaggagagagaggcctcccaggcactgctggtggacctggtttgaaggggaatgaaggtccgtctggcccccctggccctgcaggctcccctggggaacgaggtgcagcaggatcagggggacccattggtccgccagggcgcccaggcccgcagggtccccctggagcagcaggagagaaaggtgtcccaggtgagaagggccccattggcccaactggccgagatggagtgcagggtcctgtggggcttcctggtcctgctgggcctccaggtgtggctggagaggatggagacaagggtgaggtgggggaccccggacagaagggcaccaaagggaacaagggtgaacatggccctcctggaccccctggacccattggtcctgtggggcagcctggagcagcgggagcagatggggagcccggagctcggggaccccagggacactttggagccaaaggtgatgaaggaacaagaggattcaatgggcccccaggacccattggcctacagggtttgccaggcccctctggggagaagggagaaacaggagatgtgggtcctatgggaccacctggccccccaggacctcgaggtccagctggacccaatggcgctgatggcccacaaggtcccccaggaggtgttgggaacctgggtccccctggagagaagggggaaccaggagagtcaggatctccagggatccagggcgagccaggtgtcaagggtccacgcggggaacgtggagagaaaggagagtcggggcagccaggagagccagggccaccagggcctaaaggccccacaggcgatgatggccccaaagggaaccctggtcctgttggttttcctggtgaccctggcccccctggagaaggtggccctcggggccaggatggtgctaagggtgaccgaggcgaggatggtgagccaggacagcctggatcccctggtcccaccggggagaatggacccccagggccacttggaaagcgaggtcctgctggctcgcctggttccgaggggcgacaaggagggaagggagccaagggagatcctggcgctataggtgccccggggaagacaggcccggtgggtcctgcaggcccagcagggaaacctggccctgatggtctgagggggctcccaggctcagtgggtcagcaaggccgacctggagctacaggccaggctgggcccccaggtcctgtgggacccccagggctgcctggtctccggggcgatgctggagccaagggagagaagggccacccaggtctcattggactgattgggcccccgggtgagcagggagagaagggagatcggggacttcctgggcctcagggctcccctgggcagaagggtgagatgggtatcccaggagcatccggccccattggtcctggaggtccccccggcctccccggacctgctggccccaaaggagccaaaggagccacaggcccaggcggacccaagggagagaagggtgtgcagggccctccaggacacccgggtcccccaggcgaggtgatccagccactgcccattcagatgcccaagaagactcggcgctcggtggatggaagccgtctgatgcaggaagatgaggccataccgaccgggggagcccccggcagtcctggggggctggaggagatctttggctcactcgactccctgcgggaggagatcgagcagatgaggcggccaacagggacccaggacagccctgctcgcacctgccaggacctgaagctgtgccacccagagcttcccgatggagagtactgggtcgaccccaaccagggctgtgctcgggatgccttccgagttttctgcaacttcacagcagggggtgagacctgtgtgacgcctagggatgacgtcacgcagttctcttacgtggactcagagggctccccagtgggtgtggtccagctcaccttcctgcggctgctcagcgtctcagcccaccaggacgtctcctacccctgctctggagcagcccgtgacggtcccctgagactccgtggggccaatgaggatgagctgagcccggagactagcccctatgtcaaagaattcagagatggctgccagacacagcaaggccggacggtgctggaggtgcgaacgcctgtgctggagcagctgccagtgctggatgcctccttctcagacctgggagccccaccgaggcggggaggggtgctgctggggcctgtctgcttcatgggataggaccgtctctgtctgatcctgtccattcggaaccaggcccacctggaatcccacaacatcagctctgtgccacctcccaagagggctcctcactatctagggagccctgggccagggcgtggagagccctcagtcggggcaggccaggggaggggtgaagtggttgcctggacaccccacgggaggagtggcatctggggctcttggccctcccacctggagcctgttacccgttagagagctgagacccttatttaaaactcacctcccaatcaccccaaacaaatggaagagaagagaaaggacatggcgtattttgtatttaaaagtaattgtattaattatttaaagtgtggaaagcaaaataacaaaaaagagaaacgccaacaaaaatcagcagatgttgaagacaggggtctcgggggtgggctccggcacccacatcctggagtcaggactttcctcagtgactgtgtgtaggggggtttcagggctgaaccccacctccctcccaccttcctcccacctcacctgtcgcacccactgtgaaagttggaatatgtggtctccctggcctcagggctctgactctgccagggtggggctctctaacccacaggtgttggctgcctggcccatgtgcccactgtctcttccacttggtctgggtttggcaggcactgcctgctacttgagggccaggatgctcccccagggaagaaacggaatagtgtggggtgtgtgcagggctgcatcccgcagatggctggaatattaaaattcttctatattggctggtaaattgccatggccctgagccactgagtatgttcattgccacccctgtccctcccctgggcacccctcactttccctgatcctgcaattaaagggttaatgtgtggcatatggaagggactcccaggaccctgtgcccagcttccatgctgactgatggttaaataatgtgattgtctcctcccagg

SEQ ID NO: 232596 - DNA, 6362 bp, Artificial Sequence
  derived and/or modified sequence
cacacagaagcggcagccaccgaggagggagcagtgccgggagccccgacggcgccttgctgcatggagctgggccgctgacagctgtcgctgcccgcagcctctgacctccctgggaccccggcgtctgaggctcatagtctgctccctgtcttctgtcagcctcagggcatccagcgtctcaggccgacctgggtccctgggacccggcgtttcggcttctcagccatggagcggtgcagccgctgccatcgcctcctcctcctcctacctctggtgctggggctgagcgcggccccaggctgggcaggtgcaccccctgtggatgtgctccgggccctgaggttcccctccctccctgatggtgtccggagagcgaaaggcatctgtccagctgatgtggcctaccgagtggcacgacctgcccagctcagtgcacccactcgccagcttttcccaggaggatttcccaaagatttctctctgctgactgttgtccggacccgccctggtctccaagctcccctcctgactctctacagtgcccagggtgtccgacagctgggcctggagctgggcccacctgtccgcttcctgtatgaagaccagactgggcggcctcaacctccctctcagccagtcttccgaggcctcagcctagcagatggcaagtggcaccgtgtggctgtggctgtgaagggccagtctgtcaccctcattgttgactgcaagaagcgagtcacccggcctctcccccgaagtgctcgtccagtattggacacccatggagtgatcatctttggtgcccgtattctggatgaagaagtctttgagggtgatgtccaggagctggccattgtcccaggggtccaggcagcctatgaatcatgtgaacagaaggagctggaatgcgaggggggccagagggaaagaccccaaaaccaacagcctcacagagcccagagatctccacagcagcaaccatcaagacttcacaggccacaaaatcaggaaccccagagccagcccactgagtctctctactatgactacaagcccccctattatgatgtgatgactacggggacaacccctgattatcaggagcagacagatctccaggtcccccccacagccgacaggttccaggcagaggaatatggggagggtggcacagacccccctgaagggccctacgattacacctatggctatggggatgattatcgtgaggagacagagcttggccctgccctctctgcggagacagcccactcaggagccgctgcccatggaccccgagggctgaagggagagaaaggagagcctgcagtgttggaacctggtatgctcgtggaggggccccctggcccagaaggccctgcgggattgattggtccccctggcatccaggggaacccaggcccagttggagaccctggagagaggggcccccctggccgagcagggctccctggatcagatggggctcctggtcctcctggcacatctctcatgctcccattccggtttggcagtggtgggggtgacaagggccctgtggtggcggcccaggaggctcaggcccaggcgatcctgcagcaggcgaggctggcgctccgtggaccccctggccccatgggatacacagggcgccctggacccttgggccaacctgggagccctggcctgaaaggagagtctggagacttaggacctcagggccccagaggacctcagggcctcacaggccctcctggcaaggctgggcgaaggggccgggcaggtgctgatggagcccgagggatgcctggagatcctggagtgaagggtgaccgaggttttgatggactcccagggctccctggagagaagggccataggggtgatactggtgcccagggccttcctggtccccctggtgaggatggagagaggggagatgacggggagattgggcctcgagggctgcctggagagtcgggacctcgaggtctccttggccccaaaggcccacctggtattcctggaccccctggcgtccgaggcatggatggtccccagggccccaaagggagcttgggaccccagggagagccaggacctcctggacaacagggcacccctgggacccagggtcttcccgggccccagggtgccatcggccctcatggagagaagggtcctcaagggaagccagggctccccggcatgcctggctcagacggacccccgggtcacccagggaaggaaggtccccctggaaccaaaggaaaccagggtccctctggacctcagggacctctaggatacccaggacctcgaggggtcaagggtgtggacggaattcggggtctgaagggtcataagggtgagaagggtgaggatggctttcctgggttcaaaggtgacataggcgtgaaaggtgacaggggcgaagttggagtccctggttccaggggagaggatggtcctgaggggccaaagggacgcactggaccgactggagaccctgggcccccagggctcatgggcgagaagggcaagctgggtgttcctggtctgcctggctatcctggacgtcagggacccaaggggtccctaggatttcctggctttcctggtgccagtggagagaagggagcccggggcctgtcggggaagtcagggcctcggggagaacggggccccacgggtccacggggtcagcggggaccccgaggtgccactgggaagtctggagctaagggaacatctggtggtgatggcccccatgggccccctggagagaggggcctccctggacctcagggtcccaacgggtttcctggaccgaaaggacccccgggcccccctgggaaggacgggctgccgggacacccaggccaaagaggagaagtgggtttccaagggaagaccggcccccctggtcctccaggagtggtgggacctcagggagcagcaggagaaaccggccctatgggggagagaggtcacccaggccccccggggccccctggagagcagggactacctgggacagctggaaaagaaggaacaaagggtgaccctggtccccctggggccccagggaaggatggtcctgctggtctgaggggattcccaggagagagaggcctcccaggcactgctggtggacctggtttgaaggggaatgaaggtccgtctggcccccctggccctgcaggctcccctggggaacgaggtgcagcaggatcagggggacccattggtccgccagggcgcccaggcccgcagggtccccctggagcagcaggagagaaaggtgtcccaggtgagaagggccccattggcccaactggccgagatggagtgcagggtcctgtggggcttcctggtcctgctgggcctccaggtgtggctggagaggatggagacaagggtgaggtgggggaccccggacagaagggcaccaaagggaacaagggtgaacatggccctcctggaccccctggacccattggtcctgtggggcagcctggagcagcgggagcagatggggagcctggagctcggggaccccagggacactttggagccaaaggtgatgaaggaacaagaggattcaatgggcccccaggacccattggcctacagggtttgccaggcccctctggggagaagggagaaacaggagatgtgggtcctatgggaccacctggccccccaggacctcgaggtccagctggacccaatggcgctgatggcccacaaggtcccccaggaggtgttgggaacctgggtccccctggagagaagggggaaccaggagagtcaggatctccagggatccagggcgagccaggtgtcaagggtccacgcggggaacgtggagagaaaggagagtcggggcagccaggagagccagggccaccagggcctaaaggccccacaggcgatgatggccccaaagggaaccctggtcctgttggttttcctggtgaccctggcccccctggagaaggtggccctcggggccaggatggtgctaagggtgaccgaggcgaggatggtgagccaggacagcctggatcccctggtcccaccggggagaatggacccccagggccacttggaaagcgaggtcctgctggctcgcctggttccgaggggcgacaaggagggaagggagccaagggagatcctggcgctataggtgccccggggaagacaggcccggtgggtcctgcaggcccagcagggaaacctggccctgatggtctgagggggctcccaggctcagtgggtcagcaaggccgacctggagctacaggccaggctgggcccccaggtcctgtgggacccccagggctgcctggtctccggggcgatgctggagccaagggagagaagggccacccaggtctcattggactgattgggcccccgggtgagcagggagagaagggagatcggggacttcctgggcctcagggctcccctgggcagaagggtgagatgggtatcccaggagcatccggccccattggtcctggaggtccccccggcctccccggacctgctggccccaaaggagccaaaggagccacaggcccaggcggacccaagggagagaagggtgtgcagggccctccaggacacccgggtcccccaggcgaggtgatccagccactgcccattcagatgcccaagaagactcggcgctcggtggatggaagccgtctgatgcaggaagatgaggccataccgaccgggggagcccccggcagtcctggggggctggaggagatctttggctcactcgactccctgcgggaggagatcgagcagatgaggcggccaacagggacccaggacagccctgctcgcacctgccaggacctgaagctgtgccacccagagcttcccgatggagagtactgggtcgaccccaaccagggctgtgctcgggatgccttccgagttttctgcaacttcacagcagggggtgagacctgtgtgacgcctagggatgacgtcacgcagttctcttacgtggactcagagggctccccagtgggtgtggtccagctcaccttcctgcggctgctcagcgtctcagcccaccaggacgtctcctacccctgctctggagcagcccgtgacggtcccctgagactccgtggggccaatgaggatgagctgagcccggagactagcccctatgtcaaagaattcagagatggctgccagacacagcaaggccggacggtgctggaggtgcgaacgcctgtgctggagcagctgccagtgctggatgcctccttctcagacctgggagccccaccgaggcggggaggggtgctgctggggcctgtctgcttcatgggataggaccgtctctgtctgatcctgtccattcggaaccaggcccacctggaatcccacaacatcagctctgtgccacctcccaagagggctcctcactatctagggagccctgggccagggcgtggagagccctcagtcggggcaggccaggggaggggtgaagtggttgcctggacaccccacgggaggagtggcatctggggctcttggccctcccacctggagcctgttacccgttagagagctgagacccttatttaaaactcacctcccaatcaccccaaacaaatggaagagaagagaaaggacatggcgtattttgtatttaaaagtaattgtattaattatttaaagtgtggaaagcaaaataacaaaaaagagaaacgccaacaaaaatcagcagatgttgaagacaggggtctcgggggtgggctccggcacccacatcctggagtcaggactttcctcagtgactgtgtgtaggggggtttcagggctgaaccccacctccctcccaccttcctcccacctcacctgtcgcacccactgtgaaagttggaatatgtggtctccctggcctcagggctctgactctgccagggtggggctctctaacccacaggtgttggctgcctggcccatgtgcccactgtctcttccacttggtctgggtttggcaggcactgcctgctacttgagggccaggatgctcccccagggaagaaacggaatagtgtggggtgtgtgcagggctgcatcccgcagatggctggaatattaaaattcttctatattggctggtaaattgccatggccctgagccactgagtatgttcattgccacccctgtccctcccctgggcacccctcactttccctgatcctgcaattaaagggttaatgtgtggcatatggaagggactcccaggaccctgtgcccagcttccatgctgactgatggttaaataatgtgattgtctcctcccagg

SEQ ID NO: 232597 - DNA, 6362 bp, Artificial Sequence
  derived and/or modified sequence
cacacagaagcggcagccaccgaggagggagcagtgccgggagccccgacggcgccttgctgcatggagctgggccgctgacagctgtcgctgcccgcagcctctgacctccctgggaccccggcgtctgaggctcatagtctgctccctgtcttctgtcagcctcagggcatccagcgtctcaggccgacctgggtccctgggacccggcgtttcggcttctcagccatggagcggtgcagccgctgccatcgcctcctcctcctcctacctctggtgctggggctgagcgcggccccaggctgggcaggtgcaccccctgtggatgtgctccgggccctgaggttcccctccctccctgatggtgtccggagagcgaaaggcatctgtccagctgatgtggcctaccgagtggcacgacctgcccagctcagtgcacccactcgccagcttttcccaggaggatttcccaaagatttctctctgctgactgttgtccggacccgccctggtctccaagctcccctcctgactctctacagtgcccagggtgtccgacagctgggcctggagctgggccgacctgtccgcttcctgtatgaagaccagactgggcggcctcaacctccctctcagccagtcttccgaggcctcagcctagcagatggcaagtggcaccgtgtggctgtggctgtgaagggccagtctgtcaccctcattgttgactgcaagaagcgagtcacccggcctctcccccgaagtgctcgtccagtattggacacccatggagtgatcatctttggtgcccgtattctggatgaagaagtctttgagggtgatgtccaggagctggccattgtcccaggggtccaggcagcctatgaatcatgtgaacagaaggagctggaatgcgaggggggccagagggaaagaccccaaaaccaacagcctcacagagcccagagatctccacagcagcaaccatcaagacttcacaggccacaaaatcaggaaccccagagccagcccactgagtctctctactatgactacaagcccccctattatgatgtgatgactacggggacaacccctgattatcaggagcagacagatctccaggtcccccccacagccgacaggttccaggcagaggaatatggggagggtggcacagacccccctgaagggccctacgattacacctatggctatggggatgattatcgtgaggagacagagcttggccctgccctctctgcggagacagcccactcaggagccgctgcccatggaccccgagggctgaagggagagaaaggagagcctgcagtgttggaacctggtatgctcgtggaggggccccctggcccagaaggccctgcgggattgattggtccccctggcatccaggggaacccaggcccagttggagaccctggagagaggggcccccctggccgagcagggctccctggatcagatggggctcctggtcctcctggcacatctctcatgctcccattccggtttggcagtggtgggggtgacaagggccctgtggtggcggcccaggaggctcaggcccaggcgatcctgcagcaggcgaggctggcgctccgtggaccccctggccccatgggatacacagggcgccctggacccttgggccaacctgggagccctggcctgaaaggagagtctggagacttaggacctcagggccccagaggacctcagggcctcacaggccctcctggcaaggctgggcgaaggggccgggcaggtgctgatggagcccgagggatgcctggagatcctggagtgaagggtgaccgaggttttgatggactcccagggctccctggagagaagggccataggggtgatactggtgcccagggccttcctggtccccctggtgaggatggagagaggggagatgacggggagattgggcctcgagggctgcctggagagtcgggacctcgaggtctccttggccccaaaggcccacctggtattcctggaccccctggcgtccgaggcatggatggtccccagggccccaaagggagcttgggaccccagggagagccaggacctcctggacaacagggcacccctgggacccagggtcttcccgggccccagggtgccatcggccctcatggagagaagggtcctcaagggaagccagggctccccggcatgcctggctcagacggacccccgggtcacccagggaaggaaggtccccctggaaccaaaggaaaccagggtccctctggacctcagggacctctaggatacccaggacctcgaggggtcaagggtgtggacggaattcggggtctgaagggtcataagggtgagaagggtgaggatggctttcctgggttcaaaggtgacataggcgtgaaaggtgacaggggcgaagttggagtccctggttccaggggagaggatggtcctgaggggccaaagggacgcactggaccgactggagaccctgggcccccagggctcatgggcgagaagggcaagctgggtgttcctggtctgcctggctatcctggacgtcagggacccaaggggtccctaggatttcctggctttcctggtgccagtggagagaagggagcccggggcctgtcggggaagtcagggcctcggggagaacggggccccacgggtccacggggtcagcggggaccccgaggtgccactgggaagtctggagctaagggaacatctggtggtgatggcccccatgggccccctggagagaggggcctccctggacctcagggtcccaacgggtttcctggaccgaaaggacccccgggcccccctgggaaggacgggctgccgggacacccaggccaaagaggagaagtgggtttccaagggaagaccggcccccctggtcctccaggagtggtgggacctcagggagcagcaggagaaaccggccctatgggggagagaggtcacccaggccccccggggccccctggagagcagggactacctgggacagctggaaaagaaggaacaaagggtgaccctggtccccctggggccccagggaaggatggtcctgctggtctgaggggattcccaggagagagaggcctcccaggcactgctggtggacctggtttgaaggggaatgaaggtccgtctggcccccctggccctgcaggctcccctggggaacgaggtgcagcaggatcagggggacccattggtccgccagggcgcccaggcccgcagggtccccctggagcagcaggagagaaaggtgtcccaggtgagaagggccccattggcccaactggccgagatggagtgcagggtcctgtggggcttcctggtcctgctgggcctccaggtgtggctggagaggatggagacaagggtgaggtgggggaccccggacagaagggcaccaaagggaacaagggtgaacatggccctcctggaccccctggacccattggtcctgtggggcagcctggagcagcgggagcagatggggagcctggagctcggggaccccagggacactttggagccaaaggtgatgaaggaacaagaggattcaatgggcccccaggacccattggcctacagggtttgccaggcccctctggggagaagggagaaacaggagatgtgggtcctatgggaccacctggccccccaggacctcgaggtccagctggacccaatggcgctgatggcccacaaggtcccccaggaggtgttgggaacctgggtccccctggagagaagggggaaccaggagagtcaggatctccagggatccagggcgagccaggtgtcaagggtccacgcggggaacgtggagagaaaggagagtcggggcagccaggagagccagggccaccagggcctaaaggccccacaggcgatgatggccccaaagggaaccctggtcctgttggttttcctggtgaccctggcccccctggagaaggtggccctcggggccaggatggtgctaagggtgaccgaggcgaggatggtgagccaggacagcctggatcccctggtcccaccggggagaatggacccccagggccacttggaaagcgaggtcctgctggctcgcctggttccgaggggcgacaaggagggaagggagccaagggagatcctggcgctataggtgccccggggaagacaggcccggtgggtcctgcaggcccagcagggaaacctggccctgatggtctgagggggctcccaggctcagtgggtcagcaaggccgacctggagctacaggccaggctgggcccccaggtcctgtgggacccccagggctgcctggtctccggggcgatgctggagccaagggagagaagggccacccaggtctcattggactgattgggcccccgggtgagcagggagagaagggagatcggggacttcctgggcctcagggctcccctgggcagaagggtgagatgggtatcccaggagcatccggccccattggtcctggaggtccccccggcctccccggacctgctggccccaaaggagccaaaggagccacaggcccaggcggacccaagggagagaagggtgtgcagggccctccaggacacccgggtcccccaggcgaggtgatccagccactgcccattcagatgcccaagaagactcggcgctcggtggatggaagccgtctgatgcaggaagatgaggccataccgaccgggggagcccccggcagtcctggggggctggaggagatctttggctcactcgactccctgcgggaggagatcgagcagatgaggcggccaacagggacccaggacagccctgctcgcacctgccaggacctgaagctgtgccacccagagcttcccgatggagagtactgggtcgaccccaaccagggctgtgctcgggatgccttccgagttttctgcaacttcacagcagggggtgagacctgtgtgacgcctagggatgacgtcacgcagttctcttacgtggactcagagggctccccagtgggtgtggtccagctcaccttcctgcggctgctcagcgtctcagcccaccaggacgtctcctacccctgctctggagcagcccgtgacggtcccctgagactccgtggggccaatgaggatgagctgagcccggagactagcccctatgtcaaagaattcagagatggctgccagacacagcaaggccggacggtgctggaggtgcgaacgcctgtgctggagcagctgccagtgctggatgcctccttctcagacctgggagccccaccgaggcggggaggggtgctgctggggcctgtctgcttcatgggataggaccgtctctgtctgatcctgtccattcggaaccaggcccacctggaatcccacaacatcagctctgtgccacctcccaagagggctcctcactatctagggagccctgggccagggcgtggagagccctcagtcggggcaggccaggggaggggtgaagtggttgcctggacaccccacgggaggagtggcatctggggctcttggccctcccacctggagcctgttacccgttagagagctgagacccttatttaaaactcacctcccaatcaccccaaacaaatggaagagaagagaaaggacatggcgtattttgtatttaaaagtaattgtattaattatttaaagtgtggaaagcaaaataacaaaaaagagaaacgccaacaaaaatcagcagatgttgaagacaggggtctcgggggtgggctccggcacccacatcctggagtcaggactttcctcagtgactgtgtgtaggggggtttcagggctgaaccccacctccctcccaccttcctcccacctcacctgtcgcacccactgtgaaagttggaatatgtggtctccctggcctcagggctctgactctgccagggtggggctctctaacccacaggtgttggctgcctggcccatgtgcccactgtctcttccacttggtctgggtttggcaggcactgcctgctacttgagggccaggatgctcccccagggaagaaacggaatagtgtggggtgtgtgcagggctgcatcccgcagatggctggaatattaaaattcttctatattggctggtaaattgccatggccctgagccactgagtatgttcattgccacccctgtccctcccctgggcacccctcactttccctgatcctgcaattaaagggttaatgtgtggcatatggaagggactcccaggaccctgtgcccagcttccatgctgactgatggttaaataatgtgattgtctcctcccagg

SEQ ID NO: 232598 - DNA, 5211 bp, Artificial Sequence
  derived and/or modified sequence
atggaaagatgttcacgatgtcatcgcttgctgctgctccttcctcttgtgctgggcctgtcggccgcacctggctgggctggtgctcccccagtggacgtacttagggcattacggttccccagtctgcccgacggcgtgagacgagcgaaggggatttgccccgctgacgtagcataccgagtggccagaccggctcagctgagcgcgcctacacgtcagctgttccccggaggtttccctaaggacttctccttgctgacggtagttaggacaagacccggtttgcaggctccgttgctgaccctctatagcgctcagggtgtcagacagcttggtctagagctggggaggccagtgaggttcctgtatgaggaccagaccggccgaccacaacccccaagtcagccagtgtttcggggattgtccctggcagatgggaaatggcatcgagtggccgttgccgtgaaggggcagagcgtgactctgattgtcgactgcaaaaaaagagtgacgagacccctgccaagatccgcccgtcctgtcctcgatacccacggagtcatcatcttcggggctagaatccttgacgaggaggtgttcgagggcgacgttcaggagctggccattgtgcctggagtgcaggctgcttacgagagctgtgaacagaaagaactggagtgcgagggcggtcagagagagcggcctcagaatcaacagccccaccgggctcagcggtctccccagcaacaaccgagcagactgcatcgaccacagaatcaggagccacagtctcagcctacggagtcactgtactacgattacgagcccccttattatgatgtcatgacaactggaactacacccgactaccaagaccctactcctggtgaggaggaagaaatcctagaatcctccctactgccacctctcgaagaagagcagaccgacctccaggtaccaccaactgccgacaggtttcaggccgaagaatacggcgaaggaggcaccgacccgccagaaggcccatatgactatacatatggctacggtgacgattacagagaggaaaccgaactgggcccagccctgagcgctgaaactgcacatagcggcgctgcagcccacggccctagaggcctcaaaggagaaaagggggagccggcagttctcgaacccggaatgctggtagagggcccaccaggacccgagggccctgcaggcctgatcggccctcctggcatacagggaaaccccggtccagttggtgatcctggagagcgcggacctccgggaagagcgggtctgcccggttctgacggtgcccctggtcccccagggacctctctaatgctgcctttcagattcgggagtggcggtggcgacaaagggcctgttgtggccgcacaggaggcccaggcacaagccattctccaacaggcccgactggcgctgagaggcccacccggacccatgggatatactggcagaccgggaccactgggccaacctgggtcacccggtctgaagggtgaatccggcgacttgggccctcaggggcctcgcggtccccaaggcctgaccggacctcccggtaaagccggtaggcggggtcgagccggtgctgacggggctagagggatgccaggagaccctggggtgaagggtgaccgcggttttgatggcctccctggccttcccggagaaaaaggacacaggggcgacaccggcgcacaaggcctcccaggtcctccgggagaagacggggaacggggagatgacggtgaaatcggccctcggggtttaccaggagagtctggcccacggggtctgctcggtccaaaggggcctcccggtatcccgggaccgcctggcgtcaggggcatggacggaccccaaggccctaagggctccctgggtcctcaaggggaacctggccctcccggacaacaagggacacccggtacccagggcctgcctggccctcaaggtgcaatcggtccacacggcgagaaagggccacaagggaagcccggtctgcccggaatgccgggtagcgacgggcctccaggccatcctgggaaggaagggccacctggcaccaaggggaaccagggacccagcggaccccagggacctctgggctatccgggtcccagaggagtcaaaggggtcgacggaatcaggggactcaagggacacaaaggggaaaaaggcgaagacggcttccccggattcaaaggagatataggagtgaagggagataggggagaagtgggagttcctgggtcacgcggagaggatggccctgaggggcctaagggtagaactggtcccactggagatcccggtccacccggattgatgggagagaagggaaaactgggagtccccggattaccgggataccctgggcgacaagggccaaagggcagtctagggtttcccggattccctggtgcttctggcgagaagggcgcacgaggcctgagcggcaagtccggacctcggggagaaaggggcccaaccggacccaggggacagcgtggaccgcgaggtgccactggaaagagtggtgcaaagggcacctccggaggcgatggtccccatgggcctccgggagagcggggactgcccggtcctcaaggaccaaatgggtttccaggcccaaaggggcctcccggaccgccaggaaaagacggtttaccaggtcaccccggacagaggggcgaggttgggtttcaagggaaaacagggccacctggacctcctggcgtggtcggcccacaaggtgcggcaggcgaaactggtccaatgggagagaggggccatccaggtccaccaggaccacctggagaacagggattgccaggtaccgcgggtaaggaggggacaaaaggggatcccggacctcctggcgcacccggtaaggacggcccagccggattacggggatttcctggggagagaggcctgccaggtacggctggagggcctggtctgaagggcaatgagggcccatctggtcccccaggccctgccggttccccaggtgagcgaggggctgcaggtagcgggggtcccatcggaccacctggcaggcctggccctcagggccctcccggtgccgctggagagaagggtgtccccggtgagaaaggtccaatcggtccgaccggcagagacggagtgcaggggcctgtggggcttcccggtccggctgggcctcccggtgtcgctggtgaagatggggataagggggaagtgggagacccaggccaaaagggtaccaaagggaacaagggcgaacacggccctcctggaccccctggccctataggccctgtgggccagccgggagccgcaggggctgacggcgagccaggcgctcgcggacctcaaggccatttcggagcgaaaggagatgagggtactcgaggtttcaatggcccacccggtcctatcggtcttcagggtttgcctggaccttctggagaaaagggggagaccggagacgtgggccctatggggccaccgggaccgcctgggccacgtggacccgctggaccgaacggtgccgatggcccacagggtcctcctggcggagttggtaacctcggcccacctggagagaaaggggagccaggcgaaagtgggagcccgggaatccagggcgaaccgggagtcaagggtcctagaggggagcgcggagagaaaggcgaatcaggacaacccggagaacccggaccacccggacctaagggccctactggtgacgacggacccaaggggaaccccggtcctgttggttttccaggcgatccgggaccgccaggggagggcggaccacggggtcaggatggagccaagggagacagaggcgaggacggggaacccggtcagcccggatcacctggcccaaccggcgaaaatggccctcccggtcccctcggcaaacgcggaccagccggatctcccggaagcgaaggacggcagggagggaagggggctaagggggaccccggtgccattggggcacccggtaagacagggcctgtgggtcctgcaggacccgctggtaagccgggtccagacgggttacgcggtctcccagggtccgtaggacaacagggcagacccggtgcgaccggccaggcaggaccccctggcccagtgggccctcctggcctccctggtctgaggggtgatgccggagcaaaaggcgaaaagggccatccgggacttataggcctgattgggccacctggagagcaaggagagaagggcgatcggggtctgccgggtccccaaggatcacccggacagaaaggggagatggggattcccggagcgtccggtcctattgggccaggcggacccccaggtctgccaggacccgcagggcctaagggggctaagggagccactggaccaggtgggcctaagggggagaaaggagtccagggaccacccggacatcctggaccaccaggggaggtgatccagccattacctattcagatgcctaaaaagacacgacggtccgttgatggttctagactcatgcaggaggacgaggctataccgacagggggagccccaggcagtcccggaggactcgaagaaatctttggctccctcgactctctgagggaggagatagagcagatgaggcggccaacaggcacccaggacagtcccgctcgaacttgtcaagacctgaaactctgccacccggaactgcccgacggcgagtattgggtggacccaaaccagggttgtgctcgcgatgcttttcgtgtcttctgcaactttaccgctggcggagaaacttgtgtgactcctagagatgatgtgacccagttttcttacgtagactcggagggatctcctgtgggggtcgtccagttgaccttcttacgcttgctgtcagtgtcagcccatcaggacgtgagttatccttgctccggcgcagcccgtgatggtccccttcgactgcgcggagccaatgaagacgagctttcccccgaaactagtccctatgtgaaagaattcagggacggttgtcagacacaacagggccgaacagtacttgaggtgcgaacccccgtgctggagcagctacccgtgttagacgcatcatttagcgatcttggcgctccaccccgtaggggaggcgtgctgcttgggcctgtgtgcttcatgggctag

SEQ ID NO: 232599 - DNA, 5148 bp, Artificial Sequence
  derived and/or modified sequence
atggaacgctgctctcgatgtcaccgactgcttcttctactccctttagttctgggattatcagctgcaccagggtgggctggtgcaccgcctgttgatgtgttgagggcacttcggtttccttctctgcctgacggtgtgcgccgagctaaagggatttgcccagcagacgtggcttatagggtcgcacgacctgcccagttgagcgctccaacccgccaactgttccccggtggctttcccaaagatttcagcctactaacagtcgttagaacccgtcctggacttcaagctcccctactgacactctattctgctcagggggtccgacaactgggactcgaattagggagacctgttcgcttcttgtacgaggatcagacgggccgaccgcagccaccgagtcagcccgtctttaggggccttagcctcgccgatggaaaatggcatcgcgtggctgttgcggtcaaaggccagagtgtcaccctgatagtggactgcaagaaacgtgtgacccgtcctctcccccgttctgcgagacccgtcctcgatacacatggtgtgatcatttttggcgcaaggattctggacgaggaggtgttcgaaggagatgtgcaggaactcgcaatcgttccaggtgtccaggcagcctacgaatcttgcgaacagaaggaactggaatgtgaaggcggacaacgagaacggccacagaaccagcagccccaccgagcacagcggtctcctcaacagcagccctcaaggcttcaccgccctcagaaccaagagccccagtcgcagccgacagaatcactttattacgactatgagccgccttactacgacgtcatgactacaggaacaacccctgattatcaggagcagacagatcttcaggtacctcctactgccgaccgcttccaggcagaggagtatggcgaaggcggaaccgatccacctgagggtccctatgactacacatacggatatggggacgactacagagaggaaaccgagctgggacccgctctgtctgcagagacagctcattctggagctgctgcccacggccctcggggattaaaaggagagaaaggtgaaccagctgtgctggagcccggtatgttagttgagggcccaccaggtccagagggacccgctggcttgatcggccctccgggaatccaggggaaccccggaccggtcggggacccaggagagcggggaccacccggaagagctggactcccagggtccgacggagccccaggtccacctgggactagccttatgctgccttttcgcttcggctccggcggaggtgacaagggcccagtggttgccgctcaggaggcacaagcacaggccatcctgcagcaggcgcgtctggcattgagagggcctccaggccctatggggtacaccggacgtccagggccactagggcaaccagggagcccgggactgaaaggcgagagcggggatctggggcctcagggccctcggggtccccaaggccttaccggtcctcccggaaaggcgggaagaagaggcagagctggagccgacggcgcaagaggaatgcctggtgacccaggcgtaaagggtgaccgcggattcgatggactccctggccttcccggagagaaagggcaccgaggtgacacaggagcccaaggcctgcctggccctccaggagaagacggtgaacgcggagacgacggggagattggtcccagaggcctgccgggagagagtgggcctcgtggccttctggggcctaaggggcctccgggtatacctgggccaccaggggtgagagggatggacggcccacagggacccaaaggaagtctcggtccacagggagaacccggtccccctggtcaacaaggtacccctggtactcagggtctcccaggtccacagggggctatcggccctcatggtgaaaagggccctcaaggcaaaccgggtttacccggaatgcctgggtccgacggtcccccaggccatcccggaaaagaagggcctcctggcaccaagggcaaccaaggtccgagcggtccacaaggtccattaggatatcctggtcccagaggcgtcaagggggttgacggaatcagggggctgaaaggtcataaaggggagaaaggagaagacggatttccgggattcaagggagacattggggttaaaggtgaccgaggggaagttggggtgcctggcagtaggggtgaggatggacccgagggccctaaggggagaacaggacccactggcgaccctgggccacctggcttgatgggagagaagggaaagctcggcgttcccggattgcccggatatcctggcagacagggcccaaaaggatcactcggttttcccggtttccccggtgccagcggagagaaaggcgcaaggggactttccggcaaaagtggtccacgcggagaacggggacccaccggtcccagaggtcagagaggaccaaggggcgctactggaaagtcaggagctaagggaacctctggcggtgatggccctcatggtccgccaggcgaacgagggcttccgggaccacagggcccaaacgggtttccgggaccaaagggtcccccaggccctcctggaaaagatggcctgcctggacacccagggcaaagaggcgaggtcggctttcaaggaaagacagggcctccgggtccccctggcgtagtcgggccacagggggcagctggcgagaccggacccatgggagagcggggtcatccaggacctcccggaccccctggagagcagggattgcccggtacagccggaaaggaagggactaaaggcgatcctggccctccaggcgctcctggtaaagacggcccagctggactgcgcggattcccaggggaaaggggactcccaggcaccgccggtgggcctggacttaagggcaacgaagggcctagtggtccgcctgggcctgcagggtctcctggagagcgaggcgctgcaggttcaggcggaccgattggtccacctgggagacctgggcctcagggtcccccaggagcagctggcgagaaaggcgttcccggagaaaagggccctattgggcctaccgggcgagacggtgtacaaggaccagtgggtttgccaggcccagcaggacctccgggagtggccggagaggacggtgataaaggggaggtcggagatccgggtcaaaaggggacaaagggtaataagggcgagcacggccctcctggcccaccgggtccgataggacctgtgggccagccaggtgcggctggtgcagatggagagcccggagcgagaggcccacagggacacttcggagccaagggggatgagggcacaagaggatttaatggaccacccggaccgattggtctgcagggactgcccggaccaagtggtgaaaagggggaaaccggcgacgtaggaccaatgggcccaccgggaccccctgggccacggggaccagcaggtccaaacggggctgacggccctcaggggccaccaggtggagtggggaatctggggcctccaggtgagaagggcgaacctggtgagagcgggtccccgggtattcagggcgagcccggagttaaagggcctcgcggagagcgcggagagaaaggcgagagcgggcaacctggagagccgggtcctccgggacccaaaggcccaacaggtgatgacggtccgaaaggaaatcctggtcccgtcggcttcccgggagatccgggacccccaggagaggggggtccccgtggacaagacggcgctaaaggagatagaggagaggacggagaacctggtcaacccggtagccctgggccaacaggcgagaacggaccacccggaccccttgggaaacgagggcctgcaggttctccaggcagcgaaggccgacaaggcggaaagggggcaaagggcgaccccggtgctattggcgctcctggtaaaaccggtcctgtagggccagccggtccagcaggcaagcccggacccgatggtctgcggggactccccggtagtgttggccaacaaggacgccctggggcaaccggccaggctggtccacctggaccagtgggaccgcctggcttgcccggtctgcggggtgacgctggggcaaagggagaaaaaggccatcctgggctcattgggctcatcggaccacctggtgagcagggagagaaaggggatagaggactaccaggcccacaggggtcgccgggacagaagggcgaaatggggatccccggagcttccggcccaatcggacccggtggaccacccggactgccaggcccagccggtcctaaaggagccaagggcgcaaccggtcctggcggaccaaaaggtgagaagggggtccagggccctcccggacatccgggtcctccaggggaggtgatacagcctctccctatacagatgcccaagaagacacgacgatccgttgatggatcccgtttgatgcaggaagacgaagcaattcccaccgggggtgcacccggatcaccgggaggtctcgaagaaatcttcggcagcctagacagtctgagggaagaaattgagcagatgagacgaccaactggaacgcaagattcacctgccagaacctgccaggatctgaaactgtgtcaccctgagctgcccgatggtgagtactgggtcgatccaaatcagggatgtgcaagggatgcatttcgggtcttctgtaacttcacagcgggaggggagacctgcgtcacccctcgggatgacgtgacgcagttttcctacgtcgattcagagggttcacccgtgggagtcgtacaattgacgtttctgagattactctcagtgtccgcccatcaggatgtttcatacccatgcagcggagcggctcgtgacggccctttgcgcctgcggggagctaacgaagacgagctgagccctgagactagtccatacgtcaaagagttccgagacggttgccagacacaacagggtaggactgtgctcgaggtgagaacacctgtcttggaacagctgcctgtccttgatgctagcttctcagacctcggggcacccccacgcaggggcggtgtactgttaggccctgtttgttttatgggatar

SEQ ID NO: 232600 - DNA, 5069 bp, Artificial Sequence
  derived and/or modified sequence
atggagaggtgcagccgttgccatcgcctccttttgctcctccccttggtactggggctgtctgccgctcccggatgggccggtgctcccccagtggacgtcctgcgcgcattgcgtttcccctctcttcccgacggggtgaggagagccaagggtatctgtcctgccgacgtcgcatatcgcgtggccagacccgctcagctgtccgctcccacaaggcagctgtttcctggaggattccccaaggatttttctttgttaacagttgtccgaacccgccctgggcttcaggccccacttctaacattgtactccgcccagggcgtcagacaattggggctggagctgggacggcctgtgagattcttgtacgaagaccagacaggtaggccccaaccacctagtcagcctgtgttcagagggctctccctcgctgacggcaagtggcatagggtcgcagtcgccgtgaaaggacagtcagttactctgatagtcgattgcaaaaaacgcgtcacaagacctttacccagaagtgccaggccggttctggatacacacggtgtgattattttcggtgccagaatactggacgaagaagtattcgagggagatgtgcaggagctcgcaatagtgcccggagtccaggccgcatacgagtcgtgtgaacaaaaagaactggaatgtgagggaggtcagagagagcgcccacagaaccagcagccacaccgcgctcaaaggtccccacagcagcagccgagccgcttacacagaccccagaaccaggagccccagtctcaggagcagactgacttgcaggtccctccgacagcggacagattccaagccgaggagtatggggaaggaggaactgatcctcccgaaggtccatacgactatacctacgggtatggcgacgactaccgagaggaaaccgagctcgggcctgctctttctgcagagactgctcacagtggggcagcagcgcatgggcctagagggctgaagggagaaaaaggtgagccagccgtcttggagcctggcatgcttgtcgagggtcccccagggcctgaaggtcctgccggtttgatcgggcctccaggcatacagggtaatcccggacctgtgggggaccctggtgagcgtggtccccctgggcgtgccggactgccaggatccgacggggctcctggcccaccaggcacctcattgatgttacccttccgcttcggaagcggcggtggtgataaaggaccggtggtggcggctcaggaggctcaggctcaggccatccttcagcaagcccgtctggccttaaggggtcccccaggccctatggggtatactggtagaccaggacctttgggccaacctggctcacccggactgaagggcgagtcaggagacctcggcccacagggtccgagagggcctcagggcctgacgggacctcctggaaaagctgggaggcggggacgagccggagctgatggagcgaggggtatgccaggagatcccggagtgaagggcgataggggttttgatgggctgcccggactccccggagaaaaggggcacagaggcgatactggcgctcaggggttacccggacctcctggagaggatggagaaagaggtgatgatggtgaaataggccctcgcggtctgcccggagagagcggtcctaggggcttgctggggccaaagggaccccctggcatacctggaccacccggagttagaggaatggacgggcctcaagggcctaaaggctccctggggcctcagggtgagcctggacccccaggtcagcagggcacccccggtacacagggtctgccaggccctcagggcgctatcgggcctcatggagaaaaaggccctcaggggaaacccggacttcctggtatgcctggtagcgatgggccacctggacaccccggaaaggagggcccacccggtaccaaaggtaaccagggtccatccggaccccagggccctctcggctaccctggccctagaggagtcaaaggtgttgatggaataaggggactcaaggggcataagggggagaaaggagaggacggttttccaggctttaaaggcgatattggcgtcaaaggcgatagaggagaggtcggtgtaccgggatctcgcggagaagacggacccgagggaccaaagggacgcactggtccaacaggagaccctggcccacctggcttaatgggcgaaaaaggaaagctaggtgtgcccggtctgcctgggtatccaggaagacaggggccaaaagggtccctgggcttccccggatttccgggagcctccggcgaaaagggcgcacgcggactcagcggcaaatcagggcctcgtggcgaacggggtccaacagggcctcggggacagcgagggccacgaggggcaaccggaaagtctggcgcaaaaggcacttccggcggagacggcccacacggtcctcctggggagcgcggattgccgggtccacagggccctaacgggttccctgggccaaagggtccgcctggtccccctggaaaggatggcttgcccggtcatcccggacaaagaggagaagtggggtttcaggggaaaaccgggcctcctggtcccccaggagtggtcgggcctcagggggcagcgggagagaccggacctatgggggaacgcggacatcctggccctcccggtccccctggagaacagggtttgcccggaacggcaggtaaggagggtactaaaggtgaccccggaccccctggcgctccgggaaaagacggcccagccggacttcgcggttttccaggcgagcggggtcttccaggaacagcgggaggacctgggctgaagggtaatgaaggcccttccggcccacccggtccggctgggtctcctggcgaacgcggtgctgctggttccggcggaccaatcggtcccccaggcaggccaggcccacagggtccgcctggggctgctggggaaaagggtgtgcccggagaaaagggtcctattggcccaacgggcagggatggggttcagggccctgtgggactacctggacctgccggtccacccggtgttgccggagaagatggtgacaagggcgaagtgggagaccccggacaaaaggggacgaaaggcaataagggagagcacggaccccctggtccacccggacccatcggtccggtgggccagccgggagctgccggtgcagatggggagccgggtgcacgtggtcctcagggccatttcggagctaagggagacgagggtacacggggattcaatggtccccctgggcctataggcctgcaagggcttccgggtcctagcggtgagaagggagagacaggggacgtggggcctatgggaccgcctgggccacccggaccaagagggccagctggcccaaatggtgccgacgggccacaaggtccgcctggcggagtgggcaaccttgggccacccggagagaaaggagagcccggtgagtccggctcacctggcatccaaggagagccgggagtgaagggacctcggggagaacgcggtgagaagggtgagagtggtcagccaggggagcctggcccacctggaccaaagggacccacaggagatgacggccctaaggggaaccccggaccagtgggctttcctggcgatcccggacctcccggtgaggggggtcccagggggcaggacggcgctaaaggtgataggggggaggacggcgaacctggacaaccaggctcccccggtccaaccggggaaaatggaccacctggtcctcttggaaagcgtggaccagcgggatccccaggtagtgagggccgacagggtgggaagggtgccaaaggcgaccccggagctatcggagcaccagggaagaccggtcccgtgggcccagctgggcctgcagggaagccgggaccagatgggctccggggtcttcctggtagtgtaggacaacaaggcagacccggagccactggccaagcgggtccccctggtcccgtgggtcctccaggcctgccgggtcttagaggagatgctggcgctaaaggcgagaaggggcacccgggtcttatcgggctgataggaccaccaggagaacagggcgaaaaaggagaccgtggtctgcccggtcctcaaggatcccccggacagaaaggggagatgggaattccaggagccagcggcccaatcggcccaggcggacctcctggcctgccgggtcctgctggtcccaagggcgcaaaaggagccacaggaccaggtggcccaaaaggggagaaaggtgtacagggccctcctggccacccaggaccacctggggaggtgatccagcccctccccatacaaatgcctaaaaagacccggaggtcagtggacggatcgcgtctaatgcaggaggatgaggccatacctacaggcggtgctcccggatcacccggagggctggaggaaatttttggtagcctggattccctgcgtgaagagattgagcagatgcggcgacctaccgggacccaggatagtcctgcccgtacctgtcaagatctcaagctgtgccacccagagctgcctgacggggaatattgggtggacccaaaccaggggtgcgcacgtgacgcctttcgggtattctgtaacttcactgcaggcggagagacatgtgtgactcctagagatgacgttacacaattctcctacgtggactctgagggaagtccagtcggcgttgttcagctaaccttcctgcggctgctctccgtgtcagcccaccaagatgtgtcatatccatgctccggtgcagccagagacggccctttgcgcctcaggggagctaacgaagatgaactgagtcccgaaacttcaccctatgtaaaggaattccgggacggctgtcagacccagcagggtaggaccgtgctcgaagtccgcactcccgtcctcgaacagctgccagtactggatgcatccttttcagacctgggagccccaccacgccgaggcggagtcctgctaggtccggtctgcttcatgggtta

SEQ ID NO: 232601 - DNA, 5132 bp, Artificial Sequence
  derived and/or modified sequence
atggaaagatgttctaggtgccatagattactgctgctccttccactcgtcctcgggctaagtgctgccccagggtgggccggagcgcctccagtggatgtgctacgcgcacttcgcttcccttctctgccggacggtgtacggagggctaaaggcatatgcccagccgacgtggcatatagggtggcccgtccagcacagctgtccgccccaacccggcaattatttcctggcggattcccaaaggatttcagcctgttaaccgtggttcgtacaaggcctggcttgcaggccccactcctgactctgtattctgcccaaggggtgcggcagttagggcttgaattgggcagacccgtaagattcctttacgaggaccagactggacgtccccagccacctagtcagccagtatttagagggctgtcgctggccgatggcaagtggcatcgagtagctgtagccgtcaaaggacagtccgtaaccttaattgtggattgcaaaaaacgagtgacacggcctctgcccaggtccgcgagacctgttctcgacacgcacggggtgatcattttcggcgctcgcatcctggacgaagaagtgtttgaaggcgacgtgcaggagttggctatagtccccggtgtacaggctgcctatgaatcatgcgagcagaaggagctcgagtgcgagggagggcaacgcgagcgcccacaaaaccagcagccacatcgggcacaaaggtcccctcagcagcaacccagccgcttgcacagacctcaaaatcaagaacctcagtcccaagatccaacacctggtgaagaggaagagatcctcgaatctagtcttctgcctccactggaggaagagcagacagatctgcaagtgccacctaccgcagacaggtttcaggcagaagagtacggagaagggggaacggatccccctgaagggccatacgactacacttacggatatggggacgactaccgtgaagaaaccgagcttgggcctgccctgagtgccgaaactgcccactctggcgcagctgcccatggacccagaggactcaagggcgagaaaggggagcctgctgtgcttgagccaggcatgctcgtcgagggccctccaggtccagagggcccagccggtcttatcgggccacctggtatccaaggaaatcccggacccgtaggagaccccggagaaaggggacccccaggtagagcgggactgcccggaagcgatggcgctccaggcccaccagggacatcgctcatgctgccctttagatttggctccggcggtggggacaaggggccagtggtggcagcccaggaagcccaggctcaggctattctgcagcaggccaggctggcgctacgtgggccaccagggcctatgggctacactgggaggcctgggcctttaggtcagcctggctcccctgggctgaaaggcgagagcggcgacctgggccctcaaggaccccgaggacctcaaggacttactggtcccccagggaaggccggacgtaggggaagggccggtgccgacggagccagaggcatgcctggagatcctggtgtaaagggcgatcggggttttgatgggttgcccggtctgcctggggaaaaaggccaccgaggcgatacaggcgcacagggtttacccggaccaccaggagaggacggtgaacgcggtgatgacggggaaatcgggccaagaggcctccccggtgagtctggccctcgcggactgttaggacctaagggcccaccaggcatcccaggaccaccgggagtgcggggaatggatggtccccagggcccaaaaggctctcttggcccacagggcgagcccggaccacccggacagcagggaactcccggtacacagggcctaccaggaccccaaggagccattggaccacatggtgagaaaggcccacagggtaagccgggtctcccagggatgcccggttctgatggtcctccaggacaccctgggaaagagggaccacctggcaccaagggcaaccaggggccatctggccctcagggtcctctgggctacccagggcctcggggagtgaaaggcgtcgatggcatcagaggtttgaagggccataagggagaaaaaggggaagatgggtttcccggattcaagggcgatattggggtgaaaggagataggggtgaggtcggggtccccggaagccggggagaggatggccctgagggacctaaggggaggactggtccaaccggcgatccgggtccacccggtctcatgggtgagaaaggcaaattaggcgttccagggttgcctggatatcccggtagacaaggaccgaaaggaagcctgggctttccaggatttcccggagcgagtggggaaaagggcgcacgcggactgtcaggtaaaagtggccctagaggtgagcgcggacccaccggcccacggggtcagaggggacctcgcggtgctaccggcaaatccggtgccaagggaacatctggaggagatggacctcacggcccaccaggagaaagaggactaccaggtccacagggaccgaacggctttcccggaccaaaaggtcccccaggccctccaggaaaggatgggctgcctggacatccaggacaacgcggtgaagttggatttcaggggaaaacagggccacccggtccacctggagtagtggggcctcaaggcgcagctggagagactggtccaatgggggaacgaggacatcctgggcctcctggtccacctggtgaacaggggctgccaggaaccgccggaaaagaaggaactaaaggagaccctggacctcctggcgctcctgggaaagacggccctgctggactgcgcggttttccgggtgagcggggtttgcctggcacagccggaggcccaggactgaagggtaacgaagggccaagtggcccaccaggcccagctggctccccaggcgaacgcggagcagctgggagcggcggacctatcggacccccaggcaggcccggaccccagggtccccctggggctgccggtgagaagggcgtgcccggagagaaaggacctatcgggccaacaggcagggacggagtgcagggcccagtagggctccccggacccgcagggccaccaggcgtggcaggagaggacggtgacaaaggcgaggtgggtgatcctggacagaaaggtacaaaagggaacaagggagagcatggcccaccaggaccaccaggcccaatcggaccagtcggccagcctggcgctgccggagccgacggcgaaccaggtgcaaggggaccccaagggcactttggcgcaaagggagacgaaggcactaggggattcaacgggcctcctgggcctataggtctacagggcctgcccggaccaagcggggaaaagggtgagacaggggatgtgggaccaatgggccctcccggtcccccagggcctcgcggtcccgctggcccaaacggtgcggacggacctcagggcccaccgggaggcgtcggtaacctgggacctcctggagaaaagggggagccgggtgagtcaggatctcccggaattcaaggagagcctggcgtgaaagggcctcggggagaaaggggtgagaagggcgagagtggacagcctggggagcccggaccacctggccctaagggtccaacaggcgacgatggtcctaaaggcaaccctgggccagtgggatttccaggcgatcccggacctcccggagaaggcggaccgaggggccaagatggggctaaaggagacagaggcgaggacggggaacctggccagccaggatcgccagggcctacaggggagaacggccctccaggccctctgggaaagcggggaccagccggttcacccggtagcgaaggccgacaagggggaaagggtgccaagggcgatcctggagccatcggggctcctggaaaaactggaccagtaggcccagccggtccagccggaaagccaggaccagatgggcttagagggctgcctggttccgtcggtcaacaaggacgaccaggcgctacaggacaggctggacctccagggcctgtcggaccgccaggactgccaggactgagaggggatgccggtgccaaaggagaaaaggggcaccccggtctcatcggcttaatcgggccacctggagagcagggtgagaagggagatcgcggactgcccggaccccaagggagtccagggcagaagggcgagatgggcataccaggcgctagcggccctattggcccaggaggacctccaggcctgcccggtccggcagggcctaaaggagccaagggtgccaccggtcctggaggacccaagggagagaaaggcgtgcagggcccaccgggacacccgggaccccctggagaggtgattcagcccttgcctattcaaatgccaaaaaagacacgcagaagcgtggacggatctcgacttatgcaggaagatgaggctatccccactggcggagctcccggttctcctggcggactggaagagatcttcggctctctcgacagtctgagagaggagatcgagcagatgcgccgaccaacaggaacacaggatagtccagcgcgtacttgccaagatctgaaattatgccatcctgagctgcccgacggcgagtattgggtggaccccaaccagggatgtgcaagagatgccttcagggtcttctgcaatttcacggccggtggagaaacctgcgtaactcctagggacgatgtcacccagttttcctatgtcgattccgaaggatcccccgtcggagtcgtccaactcacatttttaagattgttatctgttagcgcgcaccaagatgtttcttacccatgttctggtgcagcaagggatgggcctcttcggctccggggtgcaaacgaagacgaactctctcctgaaaccagcccttatgtgaaggaatttcgagatgggtgccagacacaacagggaagaacggtccttgaagtacgaacgcctgttctggagcagctgcctgtgttggatgcctccttttccgatctcggagctccaccgaggagggggggagtactgctgggcccagtatgctttatggggta

SEQ ID NO: 232602 - DNA, 1875 bp, Artificial Sequence
  derived and/or modified sequence
atggaacgatgctctaggtgccaccgcctgctgctcctcttacctctagtcctgggtctgtcagcggcaccaggatgggctggagccccacctgtggatgtgctccgcgcactacgcttcccttcgctccctgatggagtccggagagcaaagggcatttgtcccgctgacgttgcatacagagtggcacggcctgcccagctttccgccccaacccggcaattgtttccaggtgggttccctaaagatttcagcctgctgacagtcgtacgcacaagacccggtctccaggctccactgctgaccctctattccgcccaaggagtgaggcagctgggactagagttgggacgcccagtgcgtttcctgtatgaagatcagacaggacggcctcagccaccatcgcagccggtttttcgaggactgtccttagccgatggcaaatggcatcgggtcgccgtcgccgtcaagggacagtcagtaacactgattgttgactgtaaaaagcgcgttacccggcctctcccacggtcagctcggccagtgttagacacgcatggggtgataatttttggcgcaagaatcttagatgaggaagttttcgagggcgacgtccaggaattggctatcgtgccaggcgtacaggctgcttatgagagttgcgagcaaaaggaattagagtgcgagggagggcagcgggagcggccacagaaccagcagccacacagggcacagcgttcacctcagcagcagccttcccgcctgcataggccccagaaccaggagccacagagtcagccaacggaaagcctgtattacgattacaaacctccatattacgacgtcatgacaaccggcacgaccccagactatcaggaccccactccaggtgaagaggaggaaattctggagagtagtctgcttcccccactcgaggaggagcagactgacttgcaagtgcctccgacagcggacagatttcaagcagaggaatacggcgaagggggtaccgatcctccggaaggcccttacgattatacatatgggtacggagacgactatcgagaggagactgagctgggcccagcacttagtgctgaaactgctcactcgggtgctgctgcccatggtcccaggggcctaaagggcgaaaagggggaacccgctgttttagagcccggaatgcttgtagaaggtccacctgggccagaggggccagccggtctgatcggtccacccggaatccaggggaatccgggaccggtcggggacccaggagaaaggggccctcccggtcgggcaggattgccaggctcggatggggctcccggtcctccaggcaccagcctgatgctgcccttccgatttgggagcgggggaggcgacaaaggccctgtggtggcagctcaagaagcacaggcgcaagctattctacagcaggcacggttagcgcttcggggtcctcctggtcccatgggctacaccggtcgccctggccctctgggccagcctgggtcacctggactcaaaggcgagtccggcgatctcgggccacaaggacccagggggccacagggcctaactggacctcccggaaaagccggaaggagagggcgtgctggagccgacggagcacggggaatgccgggagaccctggagtcaaaggagacaggggatttgacgggctgcctggtctccccggagagaagggccacagaggagacacaggcgcacaagggctccctggtccgccaggagaagacggtgaaaggggtgacgacggcgaaatcggacctcggggtctccctggcgaaagcgggccaagaggcctacttgggcctaagggtccccctggcattcctgggccaccttag

SEQ ID NO: 232603 - DNA, 1875 bp, Artificial Sequence
  derived and/or modified sequence
atggagcggtgtagccgctgccacaggctgcttctgctgctgccgctggttctcgggctttcagctgcgccagggtgggctggtgctcctcccgtcgacgtgctgagagctcttcgttttcctagcctgcccgacggtgtccgaagggccaaaggcatctgtcctgctgacgtcgcgtatagggtagccagacccgcacagttgagcgctccaacacgccagctgttcccgggaggctttccaaaagacttcagtctgttgaccgtggtacgcactcgcccaggcctgcaagcaccactgctgacattgtattccgcccagggagttcgccagctcggcttagaactaggcaggccagttagattcctatacgaggaccagaccgggagaccccagcctccttcgcagccagtgttccggggtctgagtctcgccgacggcaaatggcatcgcgtggctgtggcagttaagggacagtctgtcacgctgatcgttgattgtaaaaagcgggttacacgtcccttgcccagatcagctagacctgtactggacacacacggcgtcattatcttcggcgcacggatccttgatgaagaagttttcgagggagatgttcaggaattggctatcgttcccggagtgcaggccgcatacgaaagttgtgagcaaaaagagctggagtgcgaagggggacaacgagaaagacctcagaaccagcagccccatagggcacagagaagtccccagcagcagcctagccgcctgcataggccacagaaccaagagcctcaaagtcaacctaccgaatcgttatactacgactatgagccaccatattacgacgtgatgacaacgggaacaacacctgactatcaggatcccactccgggagaagaagaagaaatattagagagcagcctcctgcctccacttgaggaggagcagactgatttacaggtaccccctacagctgacagatttcaggccgaggagtacggagaaggcggtactgacccaccagaagggccatacgactatacttatggctatggagacgattaccgagaagagacagaattggggcctgcccttagcgccgagacagcgcactctggcgcagccgcacacggaccaaggggactgaagggcgaaaagggagagcccgcagtcctggagccgggtatgcttgtagaaggccctccaggcccagaggggcctgccggactcattgggcctccagggatacaaggaaatccaggacccgtgggggatccaggtgaaagaggtccacccggacgggctggattacccggatcagacggggctcctggccctcctgggacttccctcatgctacctttcagatttggttccggcggaggggacaaaggcccagtggtggcagcacaggaagcccaagcacaagccatccttcaacaagctagactggctttgcggggtccacctggacccatgggctacaccggtcggcctggaccactcggccagcctggcagtccaggcctgaagggcgagagtggcgacctcggcccacaagggccacgaggaccccagggcttgacagggcctccaggcaaggccggaaggcggggaagggccggagccgacggggcaagaggaatgcctggtgaccctggtgtgaagggagaccgcggtttcgatgggcttcccggactgcctggcgagaaggggcacaggggagacaccggtgcccagggtctccctggccctcctggggaagatggtgaacggggtgacgatggcgagatagggcctagaggactcccaggtgagtctggcccaagaggtctgttggggccaaagggaccaccgggtattccgggacccccatag

SEQ ID NO: 232604 - DNA, 1794 bp, Artificial Sequence
  derived and/or modified sequence
taggcacccccagtagacgtgttgagagctctccgattccccagcttgccagacggcgttcgtagagccaaaggcatttgccctgcagatgttgcttatagggtcgccagaccagctcagcttagtgcccctacacgccagctattcccagggggatttcccaaggacttcagtctgcttaccgtggtgagaacccgcccaggcttgcaggccccattgctgacactgtactctgcccagggagtgcgacagctggggcttgaactgggaagacctgtacgattcctttatgaggatcaaacaggaagaccccagccccctagccagcccgtatttagaggactgagtctcgctgacgggaagtggcaccgggtggctgtcgccgtgaaggggcaaagcgttaccctgatcgtggactgtaagaagagggtgacaaggccactgcctcgaagcgcacgtccagtgcttgatacccacggcgtgataatcttcggtgctcggatcttagacgaagaagttttcgagggggacgtgcaggaattggctatcgtccctggtgttcaggccgcatatgagagctgtgagcaaaaggaactggagtgcgagggcggacaacgcgaacggcctcaaaatcagcagccgcacagagcccagcggtccccccagcagcagccctcaaggctgcatagaccccagaaccaggaacctcagtcccagcccaccgagtcactatattatgattacaagcctccctattacgacgtaatgactacaggcaccacaccagattaccaggaccctacaccgggtgaggaagaggagatcctggagtcttctctcttgcccccactggaagaagagcagacagatctccaagtacctccaacagctgatcgcttccaggccgaagagtacggcgagggcggaaccgatcctcctgaaggtccctatgattacacctacgggtatggagatgactacagggaagagactgagctcggacctgccctgagcgctgaaactgctcactccggggcagctgcccacggacctagaggtctgaagggagagaagggcgaacctgcagtccttgaaccgggaatgctcgttgagggcccaccaggaccagaaggccctgccggacttattgggcctcctgggattcagggcaacccaggccctgtgggggaccctggtgagagaggacccccaggccgagccggactgccaggctccgacggcgctccagggccaccgggaacctccctgatgctgccttttagattcggcagtgggggtggtgacaagggccctgtcgtggctgcacaggaagctcaggctcaggccattctgcagcaggcacggctggcgctcaggggccctcccggaccgatgggctataccggacgtcccggaccgctgggccagcccggaagtcccggacttaagggggaatccggggatctggggcctcagggtcccagaggaccacagggcttaaccggaccaccaggaaaagctgggaggaggggccgtgctggcgctgacggcgcaagaggaatgcccggagacccgggagttaaaggtgatagggggttcgacggccttccaggcctccctggagaaaagggccacaggggtgacacaggcgctcaaggcctgcctggcccaccaggggaagacggggagagaggcgacgacggggagatcggtcctcgcggactcccaggcgaatcggggcctaggggtctgttggggccaaagggtccccctggtattccaggtcccccttag

SEQ ID NO: 232605 - DNA, 1875 bp, Artificial Sequence
  derived and/or modified sequence
atggagcgctgcagccgctgtcacagacttttactactgcttccccttgtacttggactgagcgccgcacctggatgggctggggctcccccagtcgacgtgttacgggctctgaggtttcccagcctcccggacggagtgcgccgagctaagggaatctgccccgctgatgtggcctatcgcgttgctagacccgctcagcttagcgctcccactagacagcttttcccaggcggattccctaaggatttctcactcctcacggtggtcaggacccggcctggtttgcaagccccactcctgaccttatactccgcccaaggagttcgccagctaggacttgagcttggaagaccagttaggttcctatatgaggatcagacgggcagacctcaacctccaagccagcccgtatttagaggcctctccttggcagatggtaaatggcaccgtgtggccgtggccgtgaagggccagtcggttaccttgatcgtggactgtaagaaaagggtaactagacccctgcctcgttcagcccgacctgtactggacacacatggagtcatcatctttggggcaagaatactggacgaggaggtgttcgaaggagatgttcaggagctggctatcgttccaggtgtgcaggccgcttacgagtcttgcgaacagaaggaactcgagtgcgaaggcggacagcgcgagaggccgcagaatcagcaaccccacagggcccagcggagtccccaacagcagcccagccgtttgcaccggccacagaaccaggaaccccagtcacagcctacagagtctttgtactatgattacgaacccccatattatgacgtcatgactactggcaccacccctgactaccaggaccctacacccggagaagaggaagaaattctggagagcagccttttgcctcctttggaggaggagcagacggatcttcaggtcccgcctaccgctgaccggttccaggccgaggaatatggggaaggagggaccgacccccctgagggcccatacgactatacttacggctacggcgacgattaccgcgaggagacagagctgggtcccgctctgtcagccgagaccgcccatagcggcgcagccgcacacgggcctcgcggacttaagggtgaaaagggagagcctgccgtactggagcctggaatgttggtggagggcccaccaggccctgaagggccagcgggactgatcggcccacctgggatacagggaaaccccggtcctgtcggcgaccccggtgagcgcggacctcctggccgtgcagggttacccggatccgatggtgcccctggccctcctgggaccagtttaatgctgcccttcagattcgggtccgggggaggcgacaagggacccgtcgtcgccgctcaggaggcccaggcccaggctatactccaacaggcacggctcgctctgaggggccctcctgggcctatgggatataccggtaggccaggaccattaggccagccagggtcaccaggtctaaaaggtgagtctggggacctgggcccacagggaccgagaggacctcaggggctgacgggaccgcctggtaaagcaggcaggagagggagagccggtgctgatggtgccaggggcatgcccggtgacccaggtgtcaagggagataggggattcgatggactgcccggtctgcccggagagaaaggccaccgaggtgacacaggcgctcagggactgccagggcctcccggtgaggatggtgaaaggggcgatgatggtgagatcgggccaaggggactccccggagagtcgggacctagagggctgctcggccctaaaggccctcctgggattcccggtcccccatag

SEQ ID NO: 232606 - DNA, 1875 bp, Artificial Sequence
  derived and/or modified sequence
atggaacgatgttcccggtgtcaccgcctcctgttgctgctgccactcgtgctggggctgagtgccgctcccggttgggctggagcgcctcccgtcgatgtgctcagggccctccgctttccttccttgcccgacggtgtccgcagagcaaaaggcatttgccctgccgatgtcgcctatcgagtggcaaggcctgcacagcttagtgccccaactcgccaactgttccccggtggcttcccaaaagacttctccttgctgaccgtcgtgagaacgcgcccaggtcttcaggctccactcctgacgttatactcagcacagggagttaggcagttaggactggagttgggaccacctgtcagatttttatacgaggaccagaccggtagaccgcagccaccatcccaacccgtgttccggggactctctcttgccgatggtaagtggcacagggttgccgtcgccgtgaaaggtcaaagcgtaactctaatcgtggactgcaaaaaacgggtgactcgccctttgcccaggagcgctcgccctgtccttgacacccatggggtgataattttcggagccaggatccttgacgaggaagtttttgagggcgatgtgcaggaactggcgatcgttccgggagtgcaggccgcatacgagagctgtgaacaaaaagagttggagtgcgaaggcggacagcgggagcgcccacaaaatcagcagccgcatcgtgctcagagatctcctcaacagcagccaagtcgactccatagaccgcagaaccaggagcctcagtcccaacctacggagagcctatactacgactacaagccaccatactacgacgtgatgacaacaggcactacacctgactaccaggaccccacccctggtgaggaagaagaaatcctcgaatcatcactcctccctcccctagaggaggagcagacagatctgcaggtaccgcctacggccgaccgatttcaagcagaggagtacggcgaaggtggtactgacccccctgagggcccttacgactatacctatgggtatggggacgattatagagaagagactgagttggggcctgcgctgtccgcagaaactgcccactcaggcgctgctgcacacggcccacgtggattgaaaggcgagaagggtgagcctgccgttttggagccgggaatgctggttgaagggcctccaggcccagaggggccagccggactcatcggccctccaggcatccagggcaaccctggccctgtgggtgaccctggagagcggggaccaccaggaagggctggcctccccggttccgatggggctccaggccctccaggtacttccctgatgctgccctttcggttcggttccgggggtggcgataaaggacctgtggtagcagcccaggaagcacaggcacaagcgatcctgcagcaggctcggctggccttgaggggtcccccaggacccatgggttacaccggaagaccaggccctctggggcagcctgggagtccaggtctcaagggggagtccggagacctgggacctcaaggtccaagagggcctcagggcctgacgggacccccagggaaggctggcagaaggggaagggcaggcgcagacggcgcaagaggcatgcccggagacccgggtgtcaaaggggaccggggatttgacggcctgcctggcttgcccggtgaaaaaggccatcggggtgataccggagcacaggggctccctggaccacctggagaagatggggagcgaggcgacgatggcgaaatcgggcctagagggttacccggtgaatcaggtcctcgcggactgcttgggccaaaaggtccacccggaattcctggccctccgtag

SEQ ID NO: 232607 - DNA, 1875 bp, Artificial Sequence
  derived and/or modified sequence
atggagcggtgctcacggtgtcaccggctgctattgctcctgcctctcgtgcttgggctgagcgccgcacccggttgggcaggagcgcctccagttgatgtgctgcgggcactgaggtttcccagtcttcccgacggggtcagaagggccaaggggatctgtcccgcagacgtggcttatagggtcgctaggccagcccagctgtctgctcctaccaggcagctgtttccgggaggatttccaaaggatttctctctgcttacagtagtcagaaccaggcctgggcttcaagccccactactcaccctctactccgcccaaggtgtgcgacagcttggtctggaacttggacggcctgtgcgatttctttacgaggaccagaccggcaggccccagcctccaagccagccagtattccgtggactctccctcgctgatggaaaatggcacagggtggcggtggctgtgaagggccagtccgttacgttaatcgtcgattgcaaaaaacgtgtaacccgcccactgccccgtagcgctcgccctgttttagacacacatggggtcattatatttggcgctcgaattctggatgaagaagtgtttgagggcgatgttcaggagctggccatcgtccccggagtacaggccgcatacgagtcatgtgagcagaaggagctcgagtgtgaaggcggtcagcgcgagcgcccacagaatcagcagccacatagggctcagcgttctccacagcagcagccctccaggttacaccggcctcagaatcaagagccccagagccagccaaccgaatcactctactatgactataagcctccatattacgacgtcatgactaccggcacgacaccagactaccaggaccctacacctggagaggaagaagaaattctagaaagctcactgttgcctccactggaagaagagcagaccgacttacaggtgcctccaaccgcagatcgctttcaggcagaagaatacggcgaggggggtactgaccctcccgaaggaccttacgactatacatatggatatggtgacgattatcgggaggagaccgagcttggccctgctctatccgccgagactgcccattcaggcgctgctgctcacggccctaggggcctgaaaggcgagaagggggagccagcagtcttggaacctgggatgctggttgagggacccccaggtccagaaggccctgccggactgataggtccacccggaatacagggtaacccagggcctgtaggcgaccccggagagcgcggacccccagggagggcaggcctgcccggaagcgacggggcaccaggaccgcctggaacctcgttgatgctgccttttcggtttggttcgggcggaggggataagggccctgtggttgcagcacaggaggctcaggcacaagcaattctgcagcaggcgcgattggcactccggggaccacccggaccaatgggctatactggacgcccaggacccctggggcagcccggatctcctgggctgaagggcgaatctggcgacctggggcctcagggcccaaggggcccacaggggctgactgggcctccagggaaggccggacggagaggtcgagccggagcagatggtgcgcgaggtatgcctggggatcctggagtcaaaggagatagaggcttcgacggtctccctggcctgcccggtgagaaaggtcaccgaggcgatacgggcgctcaggggcttcctggaccccctggtgaagacggcgagaggggcgatgatggtgaaatcggaccccgtggtttgccaggcgaatctggcccacgagggttactgggtcctaagggaccccctgggataccgggtcccccatag

SEQ ID NO: 232608 - DNA, 1875 bp, Artificial Sequence
  derived and/or modified sequence
atggagcgttgttcccggtgccacagactcctgctgctgctgcctttagtgctgggtctgtccgccgctccgggttgggccggagccccacctgtggacgttctcagggcccttaggttcccaagtctgcctgacggggtgaggagggcaaagggtatctgtcctgccgacgtggcctacagggtggcacgaccagctcaactctcagcacccaccaggcagctcttcccaggcggattccctaaggacttcagtctgctgacagtggtccgcactcgtcccggtctgcaagccccactgctcacactgtattcagcccagggcgtgcgacagttgggactcgaactcggcaggcccgtgaggtttctgtatgaggaccaaaccggcagaccacagccacccagccagccagtgtttagaggactgtctctggcggacggaaaatggcacagggttgcagtggcagtcaagggccagtcagtcacactgatcgtggattgcaagaagagagttacccggcctctaccacgatccgcacggcctgtgcttgatacacatggtgtgattattttcggcgcacgtatactggacgaggaggtgttcgaaggagatgtccaggaacttgccatcgtgcctggggtgcaggccgcatatgagagctgtgaacaaaaggaactagaatgcgagggaggacagagagaaagacctcagaaccagcagccacatagagcacagaggtctccccaacaacagccatcccggttgcacaggccacagaaccaggagcctcaatctcagcctactgagagcctgtactatgactacgaacccccatattacgatgtgatgaccaccggaaccacccctgattaccaggaccctaccccgggagaggaagaagaaatcctcgagtcttccctacttcctcccttagaagaggagcagacagacctgcaggtcccccctaccgcagaccgcttccaagccgaagaatacggggaggggggaacagatcccccagaagggccttatgactacacctacgggtatggagacgattaccgcgaagaaactgaactagggccagctctcagtgctgagacagctcacagtggagccgctgcacatggcccacgaggtttgaagggagaaaagggagaacccgctgtcctcgagcctggaatgcttgtggaagggcctcctggacccgagggccctgccggtttgattggtcccccaggaatccagggcaatccgggaccggtgggggatccaggcgaaagaggtcctcccggtagagctggactgcctggctctgatggcgcaccaggaccccctggaacctcactaatgctgcctttcaggtttggctccgggggaggagacaaggggcctgtggtcgcggctcaggaggcgcaagcacaggcaatcctccagcaggccaggctggcactgcgcggacccccagggcctatgggctatacgggaaggccgggacccctcgggcagcctggttctccagggctgaaaggcgagtctggcgatctgggccctcagggacctagaggaccccaagggctgaccggccctcccggtaaggctggcaggagaggacgtgccggagcagatggcgctcgcggtatgcctggcgatcctggagttaagggagacagaggattcgacggattacctggcctgcccggagagaaaggacatcgcggagacaccggcgctcagggtctgcctgggccacctggcgaagatggagagaggggagatgatggtgagattggacccagggggctgcccggagagtcaggaccgaggggcctgttgggtcctaagggtcccccaggcattcccggtccgccttag

SEQ ID NO: 232609 - DNA, 5069 bp, Artificial Sequence
  derived and/or modified sequence
atggagaggtgctctcgatgccaccgcctgttgttactgttgcctcttgtgctgggcctatcagctgcccctggctgggcgggtgctcctcctgtggatgtgctgcgagcccttagattcccatcactgcctgatggcgtgcggcgtgcgaagggtatttgtcctgctgacgtagcctacagggtggctcgaccagcccagctgagcgcacctactaggcagctcttcccagggggtttcccgaaggacttcagcctgctaacagtcgtgcggacccgccctgggctgcaagcccctttgctgacgctgtattcggcccagggcgtgcggcagctcgggttggagctcggccctccagttaggtttttatatgaggaccagacaggtaggcctcagcctccttcccagccggttttccgtggcctgagtctcgcagatggaaagtggcacagggttgccgtagcagtgaaaggtcaatcagtgacactgatcgtggactgcaagaaaagagttacccgccctctgccacgatcagcacgtcccgtgctcgatacccacggggttatcatatttggtgcgagaattttggacgaggaagtgtttgaaggcgacgttcaggaactggccatcgtcccaggagtgcaggccgcatatgagtcatgtgagcagaaagaattggaatgcgagggcggtcagagagagcgcccacagaaccaacagcctcacagagcgcagcggtctccccagcagcaaccctcccgcctgcacagacctcagaaccaggagcctcagtctcaggagcagactgatttacaggtgcctcctaccgcggaccgtttccaggccgaggagtacggggagggaggaacagacccaccagaaggaccatacgactacacttacggctacggcgatgattatcgcgaggagactgagctggggcctgccctgtcagcggagactgcacacagcggagccgctgcccatggccctcggggactcaaaggcgagaaaggagagccagccgttctcgagcctggtatgctggtggaagggccacccggaccagagggacctgccggtctgattggccctccaggcattcagggcaacccaggcccagtaggagatccgggagaaaggggacctcccggtcgagctggactacctggctcagacggagccccagggccacctgggacatctctgatgctgccctttagattcggaagcggtggcggtgacaaggggccagtagtcgcagcacaggaggctcaggcacaagcgatcctgcagcaggcgagattggccctgcggggtccacccggtccaatgggttacactgggaggcccggaccgctcggccagcccggatcacctggcctgaaaggggaaagcggcgacctcgggcctcagggtccaaggggccctcagggacttactggacccccaggcaaggccggaagacgaggtcgcgctggggcagatggcgcacgcggtatgccgggagatcccggtgtaaagggcgaccgtggcttcgatggcctccctggcctcccaggtgagaaagggcacaggggggacaccggtgcacaggggcttccgggaccgcctggagaggatggcgaaagaggtgacgatggcgagatcgggcctaggggcctgcctggcgaaagtgggcctcggggactgttgggacctaaggggcctcctggtattcccggtccgcctggggtccgcggtatggacgggccacaaggtccaaagggatctctgggaccccagggagagccaggccctccaggacagcagggcacccctggaactcaaggcttacccggtccccagggtgcaatcggcccacatggagagaagggaccgcaggggaaaccgggtctccccggtatgcccggatctgacggccctccagggcacccaggcaaagaaggccctccgggaacgaagggaaatcagggtccatctggccctcagggacccctcggctaccctgggcctcgtggagtaaagggagtggatgggatccgcggactgaaggggcataagggcgagaagggcgaagatggcttccctggttttaagggagacatcggggtgaaaggggaccgcggtgaggtgggagttccagggtctcgcggtgaagacggccctgaaggccctaagggacgaaccgggcctacgggagaccctgggccaccgggactgatgggcgagaagggcaaactgggcgtgcctggactgccgggatatcccggaagacaggggcctaagggtagtcttggattcccaggctttcccggtgcaagtggcgaaaaaggagctagaggtctgtccggcaagtccggacctagaggagaacggggtcccacaggaccccgaggccagcgcggacctcgtggcgcaactggtaagtctggcgcaaagggcacatccggtggagatgggcctcacggtccgcctggggagcgcggactgccgggaccacagggacccaacggattccccggacccaagggcccacccggacctcccggaaaggatggcctgccagggcacccgggtcagaggggggaagtcggtttccagggcaaaactggcccaccaggtccaccgggtgtcgtcggcccacagggcgcagccggtgaaaccgggcctatgggcgagcgaggtcaccctggtccaccagggccacctggtgagcagggcctgcccggtacagctggcaaagagggcacaaagggggatcccggtccacccggtgcacccggtaaggatggaccggcagggctgcgcggattcccaggagagcgtggactccctgggaccgccggtgggcctggactaaaaggaaacgaggggccatccgggcctcctggtcccgctggtagtccaggagagcgcggtgccgcaggctcagggggacctattggtcctcccggaagaccgggtccccagggccctcccggagccgcaggcgagaaaggcgtgcccggtgagaaagggccaatcggcccaacagggagggatggggtgcaaggccctgtgggcctgcccggacctgctggccctcctggagtcgccggagaggacggggataaaggagaagtgggggacccaggccagaaagggactaaaggaaataagggagaacatggtccacccggaccaccaggtcctatcggaccagttggccagccgggagccgctggcgcagacggagagcccggagcaagaggcccacaaggtcattttggagcaaagggtgacgagggaacaagggggttcaacggacccccaggcccaattggcctgcagggcctccctggaccctcaggggagaagggggagaccggagacgtagggccaatgggaccccctggacccccaggccctagaggtccggctggccctaatggggcagacgggcctcaagggcctccgggaggggtgggaaatcttggcccacctggcgagaaaggggagcccggagagtctggctcccccggtattcaaggcgaacccggagttaaaggccctcggggtgaaagaggagaaaaaggcgagtctggccaacctggcgagcctgggccacccggaccgaaagggcctacgggcgacgatggccctaaaggcaacccaggcccagtcggttttccaggggacccgggtcccccaggtgaagggggtcctaggggccaagatggagcgaaaggtgatcgcggagaagacggggagccaggacagcccggttcacccggtcccactggggaaaacggtcccccaggtcctctgggaaagagagggcctgcaggctctcctggaagcgagggtcgccaaggaggcaagggcgcaaagggggatccaggagctatcggcgctccgggaaagacaggacctgtcgggcctgctggccctgcaggcaagccgggaccagatggcctccggggtttacctggaagcgtggggcagcaagggaggcccggagccactggccaggctggcccaccaggcccagttggacctccagggttgcccggtctgcgcggagatgctggcgcaaaaggcgagaagggtcatccgggtcttatcggattgatcggaccccctggtgagcaaggcgagaaaggggaccggggactgccaggaccacaaggctccccgggtcaaaagggtgagatgggcatccctggcgcaagcgggccaatcgggcctggcggacccccaggcctacccggaccagcaggaccgaagggcgcaaagggtgcgaccgggcctgggggaccgaagggcgagaagggtgtccaaggaccacccggacaccctggcccaccaggcgaagttattcagccgctcccgatccagatgcccaagaaaacccggagatccgtggatggttccagactcatgcaggaggatgaggcaatccctaccggcggagctcctggatctcctgggggacttgaagagatttttgggagcctggattcgctgagagaggaaatcgagcagatgcggaggccgacgggtacacaagattcccccgcacgcacatgccaagacctaaagctgtgtcatcctgaactgccagacggggagtactgggtggaccctaatcagggatgcgccagggacgctttccgcgtgttctgtaatttcaccgccggaggcgagacatgtgtcactcctcgcgacgatgttacacagttctcctatgtggattcggaaggatctcctgtaggcgtggtgcagttgacatttctgcgcctgctgtctgtatctgcgcaccaggacgtatcatatccatgttccggagccgcacgcgacggaccgctgcgtctgaggggcgcaaacgaggatgagctcagtcccgagacatccccttacgtgaaggaatttagagatggctgccagactcagcagggcagaacagtactggaagtgagaactcctgtgctggaacagcttccggttctggacgccagtttctcagacctgggagctccgccacggagaggaggtgtactcctaggaccagtatgttttatggggta

SEQ ID NO: 232610 - DNA, 5132 bp, Artificial Sequence
  derived and/or modified sequence
atggagcgttgcagcaggtgtcaccgtctgctgcttctgctaccattagtcctgggacttagcgctgccccaggctgggccggtgcccctcctgtcgatgtcctgcgggcactgaggttcccatccttaccagatggagtgaggcgcgcaaaagggatttgtccagccgacgtagcttatcgggtcgctaggccagcccagctgtctgcccctacaagacagctcttcccgggaggcttcccaaaggatttcagtctgctcaccgtcgtacgaactcgccctggactccaagccccactgttgacgctgtacagtgctcagggggtgcgacagctcgggctggaattgggtccaccagtccggtttctgtacgaagatcagacgggaaggccacagccacctagccaacccgtttttaggggtctcagtctggctgatggcaaatggcaccgtgtcgccgttgccgtgaagggacagtcagtgactctgatcgttgactgtaagaagcgcgtcactcgccctcttcctcgctcagcccgtccagtgctggacacacacggggtcatcatcttcggtgctcggatcttagacgaggaagtctttgagggcgatgtgcaagagctagcaatagtgcccggagttcaggctgcttacgagtcctgtgagcaaaaagagctggagtgtgagggcggtcagcgcgaaaggccccagaatcagcagccgcaccgggctcaaagatctccccagcagcagccttctcgattacaccgcccacaaaaccaggagccgcagagccaggatcccacacctggagaggaggaagaaatactggaatcatcgctccttccaccattggaggaggaacagacagacctgcaagtgcccccaactgctgatagattccaagccgaggagtacggtgagggcggaaccgatccaccagaaggcccatacgattacacatacggctacggggatgactaccgcgaggagactgagcttggcccagcccttagcgccgagacagcccattctggcgctgccgcacatggtccgagaggtttgaaaggagagaaaggcgaacctgctgttctagagccgggtatgctggttgaaggcccacctgggccagagggaccggcaggtctgatcggaccaccgggaattcagggtaatcccggaccagttggagatcccggtgaaaggggacccccagggagggccggtttgcccggatctgacggggcacctggtccgccaggcacttcgcttatgttaccttttcgcttcggatcaggaggcggagacaagggacccgtcgtagcggcacaggaagctcaggcacaggccattttacagcaggcaagactggccctgcgaggacctcccggtcccatgggctatacagggcgacctggaccattgggccagcctggcagccctggcctgaagggggaatccggcgacctgggccctcaggggccacgtggcccacaaggcctaaccggaccacccggtaaggccggacgcaggggtcgcgcaggcgctgacggtgctcggggaatgccaggagatcctggcgtcaaaggggatcggggttttgacgggcttcccggtttgccaggcgagaagggtcacagaggcgacacaggcgcacaggggctgccagggccacccggagaggatggagaacgcggagacgacggagaaatcgggccacggggtctgcctggggagagcggccctaggggattgttaggtccaaaaggacccccaggtataccaggccctcctggggttcgtggaatggatggccctcaaggaccaaagggctccttgggaccccagggggagccaggtccccctgggcagcaggggaccccaggtacacaaggcttgcctggaccacagggcgctataggccctcatggagagaaggggcctcaaggaaagcccggactgcccggtatgcccggtagcgacggaccacccggacaccccggtaaagaggggcctccaggtacaaagggcaaccaggggccaagcggccctcagggtcccctggggtatcctggtcccaggggagttaaaggtgtggatggaattcgaggactgaagggccacaaaggagagaaaggagaagatggttttcctggatttaagggtgatataggcgtcaagggcgaccgtggagaggtgggagtgccaggaagcagaggagaggatggccctgaaggacccaagggccgaaccggacccacgggtgaccctggaccacccggactcatgggcgagaagggtaaacttggcgtgccaggacttcctgggtaccccggacggcagggtcctaaggggtcattaggatttcctgggtttccaggagcctccggcgagaaaggcgctaggggcttgtctggaaaaagcggcccacgaggcgaaaggggcccaacaggccctcgcggtcagcggggaccaagaggggctacgggcaagagcggtgctaagggcactagcggcggtgatggccctcatggtccccctggcgagagaggcctccccggaccccagggccctaatgggtttcccggtcctaaagggcctcccggacccccaggcaaggacggcctgccgggacaccctggtcagcggggtgaggtgggatttcaaggcaagacaggtcccccaggacctccaggtgtggttggtccacagggtgccgctggagagacgggcccaatgggagagcgtgggcaccctggtccccctggacccccaggcgagcaagggttgcccggaaccgccggaaaagagggaaccaaaggtgaccctggtccaccgggagcccctgggaaggacggcccagctggcttgagagggttcccgggtgaacgaggactccctggaactgcgggtgggccaggactcaaagggaatgaaggcccaagtggccctcccggtcccgcaggtagcccaggggaacgcggagccgcaggaagtgggggacccattggaccacccggacggccaggacctcagggtccccctggagcagccggagaaaagggggtccccggtgaaaagggacccataggcccaaccggtagagatggagttcaggggcctgtgggtcttcccggtccagcgggacctcccggagtggctggtgaggatggcgacaaaggcgaggtcggcgaccccggacagaaaggtactaagggcaacaagggggagcacggtccaccaggtcctccagggcctattggccctgtgggacagcccggagcagcaggagctgatggagagcccggagccaggggacctcagggtcatttcggggcaaagggcgacgagggcaccagaggatttaacggaccccctggccctatcggcctgcagggtctgcccggtccctctggcgagaagggtgagaccggggacgtggggcctatgggcccacctggcccacccggacctcgcggaccggctggcccaaatggtgcagatggaccgcaaggacccccagggggagtaggcaatctgggacccccaggagaaaagggggagcccggtgagtccggctccccaggaattcaaggcgaacccggtgtgaagggacctagaggcgaaaggggcgaaaaaggcgagtcgggccagccaggagaaccagggccacccggtcctaagggaccaactggcgacgatgggccaaaggggaatcccggtcctgtgggtttccctggcgaccccggtccaccgggtgaaggaggcccaagggggcaggatggggctaagggcgataggggcgaggacggagagcctggccagccaggctcacctggtccgactggtgagaatgggcctcctggacccttggggaaacgtggccctgcaggcagtcctggatctgagggccgacaagggggaaagggggctaagggagatcctggtgctattggagcaccaggcaaaaccgggccagtcggtcccgctggacccgctgggaaacctggtcctgacggactaaggggcctgcccggttccgtgggacagcagggtcgacccggagcgaccgggcaggctgggcctcccggtccagttggaccacctggccttcctggcctgcgcggagacgccggtgcaaagggggaaaaaggccaccccggtctcatcggcctcatcggtccaccgggtgaacagggagagaagggagacagaggcctccctggtcctcagggctctcctggacagaaaggggagatggggatcccaggagcgtcaggacctatcggtccaggcggaccaccaggacttccgggaccggctggccctaaaggcgctaagggcgcaaccggccctgggggaccaaagggggagaaaggtgtgcaagggccaccagggcatccaggacccccaggagaagttatccagcccctgcctattcagatgccaaagaagacacggagaagcgtggatggttcccggctcatgcaggaagacgaagccattccgactggtggagcccctggctcaccgggaggactggaagagatcttcggaagtctggattcactgcgggaagagattgaacagatgaggcgtccaactggcactcaggatagccccgcaagaacatgccaagacctcaagctgtgccatcccgagctccccgatggagagtattgggtggaccccaaccaaggctgtgcgagggacgcatttcgggtcttctgcaactttacggcgggtggagaaacatgcgtgaccccacgcgatgatgtcacgcagtttagttacgtggattccgagggctctccagttggtgtggtacagctaacttttctgagactgctgagtgtttctgcacaccaggatgtgagttatccctgctccggggctgctcgcgatgggccactgagactgagaggggcaaacgaggacgagttgagtcccgaaaccagtccttacgtcaaagagttcagagacggatgccagacccagcaaggcagaacggtcctggaagtgcgtaccccagtgttggagcaacttccagtgctagatgccagcttttctgacttaggggcacccccacgtcgcggtggggtgctgctgggccctgtgtgctttatgggata

SEQ ID NO: 232611 - DNA, 5147 bp, Artificial Sequence
  derived and/or modified sequence
atggagcgatgcagcagatgtcaccggcttctgctcctgctgcccctggttctgggattgtctgccgctccaggctgggccggagctccacctgttgacgtcctgagggccctgcgattcccctcactcccagacggcgtcagaagggctaaggggatctgtcccgctgatgtggcataccgcgtggcaaggcccgctcagctgtccgcacccacaagacagctgtttcccggaggcttccctaaagattttagtctgctgaccgtcgttaggactcggcctggactccaagcgcctttgctgaccttgtactctgcccagggcgttcggcaacttggcctcgagctgggcaggccagtgcggtttttgtacgaggatcagaccggtcggccacagcccccttcacaacccgtcttcaggggattgtcactggctgatgggaaatggcatagagtggccgtcgcagttaagggacagtctgtcacacttatcgttgactgcaagaagcgagtgacccggccactgccccgatccgcacggcctgtccttgacacgcacggcgtgattatcttcggggctagaatactggacgaggaggtctttgagggggacgttcaagaactagcgatcgttcctggggtgcaagctgcctatgagtcttgtgaacagaaggagctggagtgcgagggtggccagagggagaggccccaaaaccagcaaccacacagagctcagagatctccgcagcagcagccttctagattgcacagaccgcagaatcaggagccacagagtcagcccacggaaagtctgtactatgattacgagcctccatattacgacgttatgactactggaacaacccctgattaccaggaacagaccgatctgcaggtgcccccaactgctgatcgcttccaggctgaggaatatggtgagggaggcaccgacccccctgaaggaccatacgattacacctacggatatggggacgattatcgggaggagaccgaactggggccagctctgtccgccgagactgcccatagcggcgcagctgcacacggacccaggggcctgaaaggagaaaagggcgaacccgctgtgctggagccagggatgctggtggagggacctcctggccctgaagggcctgccggtctgattggccctccaggcatccagggtaatcctgggccagtaggggaccctggcgagagaggtccacccggtcgggcaggcctgccaggcagcgacggcgctcctggcccacccggaaccagtttgatgctacccttccgttttggatctggcggaggcgacaaagggccagtggtagccgctcaggaagcccaggcccaagcaatactccagcaggccaggctggcgctgcgcggtccccctggcccaatggggtatacaggcaggcctggacctttaggccaaccgggatcccctggactgaagggtgaatcaggggaccttggcccacagggcccacgaggcccacagggactcaccggtccgccagggaaggctggacgtaggggccgtgccggagccgacggggcacgcggaatgccaggggatcccggtgtgaagggcgataggggctttgatggcctccccggactgccaggagaaaagggacatagaggagatactggcgctcagggactaccgggaccgccaggcgaagatggcgagcgcggagacgacggggaaattgggcctcgcggattgccaggtgagagcggcccacgcggattactgggcccaaaaggcccacctggcatccctgggcctccaggtgtgcgaggtatggacggacctcagggccctaagggttccttgggcccacagggcgagcctgggccacccggtcagcaaggcacacccggaacacaaggacttccaggccctcagggtgctattggaccgcatggtgagaagggcccacaggggaagcctgggttgccaggtatgcccggaagcgacggtcccccagggcacccgggtaaagaggggcctcctgggaccaagggaaatcaaggacctagcgggcctcaaggtcccctgggctaccccggacctcgcggtgtgaagggggtcgacggtatcagaggcctaaagggacacaaaggagagaaaggggaagacggattccctggcttcaaaggtgatatcggtgttaaaggtgatcgcggagaggtcggggttcccggttcccgcggagaggacggacctgaggggccaaagggcagaacaggaccgacaggggatccgggaccccctgggctcatgggcgagaagggcaagttaggcgtgcctggcctaccaggatatcctggcagacagggccctaaaggatctctgggattcccaggattcccaggtgcatccggagagaagggcgctcgcggactctccgggaagagcggaccacgcggagagcggggaccaacaggaccccgaggtcagcgaggtccccgaggagccacaggcaaatctggggcaaaaggaacctcaggaggcgatggaccgcacggcccacctggcgagcgaggactgcctgggcctcaaggccctaatggctttcccggaccaaagggtcctctgggccctcctggaaaggacggcctgcccggacatccaggtcagaggggcgaagtcggattccagggcaaaaccggaccccctggtcctcctggagtcgtaggccctcagggcgctgctggagagaccgggccaatgggagaaagaggtcatcctgggcctccaggccctccaggggagcaaggcctgcccggaactgctggcaaagaaggtactaagggcgatcccggaccaccaggagcgccagggaaggatggcccagccggtctgcgcggattccccggagaaaggggattaccagggactgccggaggccctggcctgaagggcaatgagggccctagcggtccgccagggccagctggaagccccggagagaggggggctgctggatcaggaggaccgataggcccacccggacgtcctggacctcagggcccaccaggcgctgcaggggagaagggggtgccaggcgagaaagggccaatagggccaaccggcagggacggtgtgcaggggcctgttggtctgcccggtccagccggtccccctggcgtagccggagaggatggggacaagggagaggtgggagaccctggacagaaggggacgaagggtaacaaaggagagcacggccctccgggtccacccggacctatcggcccagttggccaacccggagcagccggagctgacggagagcccggtgctcggggacctcaagggcatttcggtgccaaaggcgacgagggtaccagaggctttaacggaccaccagggcctatcggcctgcaaggtctccccggacccagtggagagaagggagaaaccggagacgttggtcccatgggtccgcctggcccacctggccctcggggacctgcaggccctaatggcgctgacggccctcagggccctcctggcggagtggggaacctagggcctccaggagagaaaggtgaaccgggtgagtcaggatcacctgggattcagggcgagccaggagtcaagggacccaggggggagcggggagaaaagggtgaatccggacagcccggagaaccaggccctcccggtcccaagggtcctaccggcgatgatggcccaaagggaaatcctggccctgttggttttccaggcgacccgggaccgcctggcgagggcggaccaaggggccaggatggcgctaaaggagataggggtgaagatggagagcccggacagcctgggtcaccgggacccaccggtgagaatgggccacctggcccacttggaaaaagagggccagctggcagccctggcagtgaaggtaggcagggagggaaaggagcgaaaggggaccccggagctatcggcgctcccggaaaaacaggacccgtgggaccagcaggtccagccggaaagcctggacctgatggactccgagggctgcccggaagtgttggccagcaggggcgacctggagcaaccggccaagccggaccacctgggccagtaggacctccagggttgcccggactgcgaggtgatgcaggcgcaaagggagagaagggacacccagggctgattgggttgattggccctccgggtgaacaaggtgagaagggtgacagagggctgccgggtcctcagggctcacccggtcagaagggcgagatgggcattcccggagcgtccggacccatcggacctggcggacccccaggcctgcccggtcccgcaggacctaaaggagccaaaggcgctacggggccaggtgggccaaagggcgaaaaaggagtacaggggcctccaggccatccgggtccccctggcgaggtcattcagccactgccaatccagatgcctaagaaaacgcgtagatctgtggacggcagcaggctgatgcaggaagatgaggctatccctaccggcggagccccaggatcccccggaggcctggaggagatcttcggcagcctcgatagtcttcgggaagaaatcgaacagatgagaagaccaaccggaacacaggattctcccgctagaacttgccaggacctgaaactctgtcacccagagctcccagacggcgagtattgggtcgatccgaatcagggctgcgcccgagatgcctttagagtgttttgcaatttcacggcgggtggtgagacatgtgtaacaccacgggatgatgtgactcaattcagttacgttgatagcgagggtagccccgtgggtgtggtgcagctgacattcctgcgactgctgtctgttagcgcacaccaagatgtctcctacccttgctctggagctgccagggacgggccattgcgccttagaggcgcaaatgaggatgagctctcccccgaaacttctccatacgtgaaagagttcagagacgggtgccagacccaacagggccgaacggtgctagaagttcggactcctgtcctcgagcagcttccagtgctggatgcgtccttcagtgacctgggtgctcccccaagacgcggaggggtgctgttaggacctgtgtgctttatgggtta

SEQ ID NO: 232612 - DNA, 5051 bp, Artificial Sequence
  derived and/or modified sequence
ggagctccccctgtggatgtgctgcgcgctctgcgcttcccatcactgcctgatggtgtgagaagggccaaggggatttgtcctgctgatgtggcctaccgggtggctcgacccgctcagttgtccgcccctaccaggcagctgttcccaggcggtttccccaaggatttctccctgctcacggtcgtgcgcacaagacccggtttacaggctcccctgctcaccctctattccgctcaaggtgttcgccagttgggactagagctggggcgacctgttcgctttctctatgaagatcagaccggccgacctcaaccccctagccagcccgtgtttcgagggctgagtctcgcggatggcaaatggcatcgcgtagccgtagccgtgaaaggccagtccgttacgcttattgttgattgcaagaaacgggtaacgcgcccacttcctaggtctgctcggccagttctcgacacccatggggtgattatatttggcgctagaatcctggatgaggaagtgttcgaaggagacgtgcaggagcttgcgattgtacctggagtccaggccgcatatgagagctgtgagcaaaaagagttagaatgtgagggaggccagcgagaacgccctcagaatcagcagcctcaccgtgcacaacgatcacctcagcagcagccaagtagattgcaccgaccccagaaccaagagccacagtctcaggaccccacgccgggtgaagaagaggaaattctcgagagcagcctgctgcctcctttagaagaagagcaaactgacctgcaagtgccaccaaccgccgacaggtttcaggcagaggagtacggtgagggcggtactgacccgcctgaaggcccttacgactatacatatggatatggtgacgactacagggaagagacagaacttggtccggcactatccgccgagacggcgcactcaggagctgccgcacacggtccacgcggactgaaaggtgagaagggtgaacccgcagtcctggaaccgggtatgctggtggaaggaccacccggtccagagggcccagccggattaattggacccccaggcattcagggcaaccccggacccgtgggtgatcctggcgagcgtggcccaccgggacgggcaggacttccaggcagcgacggagctcccggtccaccaggtaccagcttaatgctgccctttagattcgggagcggcggtggcgacaaaggtcccgtcgttgctgcccaagaggcacaggcccaggccatccttcagcaggctagacttgcattacgagggcctcctggccctatgggttacaccggaaggccagggcctctgggccagccaggctctcccggactcaaaggggagtcaggcgacctagggcctcagggaccacggggaccccagggtttaactgggcctcctggcaaggctgggagacgtgggcgtgcgggagctgatggcgcacgcggaatgcctggagatcccggagtgaagggcgatagaggtttcgacggtttacccggactgcctggagagaaagggcaccggggtgataccggagctcagggtctgccaggcccacccggtgaagacggcgaacgcggagatgatggagaaataggtccccgaggccttcccggtgagtcaggcccacgtggcttgctcggtcctaaagggcctcctggtatacctggccctccaggggtcagggggatggacggaccccaaggccctaagggcagcctcggaccccagggggagcccggtcccccaggccagcagggtacaccgggtacccaggggctgccaggccctcagggcgctatcggaccacatggtgagaagggccctcaaggcaaaccgggactgccaggcatgcccggaagtgacgggccaccgggtcacccaggcaaagaaggccctcctggaaccaaaggcaatcagggaccatccggtccccagggacctctgggatatccaggccctcgaggcgtaaaaggtgttgatggcatcaggggactgaagggccacaaaggcgagaagggagaggacggattccccggattcaaaggagacattggggtaaaaggggaccgtggagaggtaggtgttcccggatcaaggggtgaggatggacccgaggggcctaaaggaaggaccgggccaacgggagaccctggaccgcctggccttatgggggagaaggggaagttgggggtccctggtttgcccggttacccaggaagacagggccctaagggaagcttgggatttcctggatttccaggggcttctggcgagaaaggagcacggggattgtccggcaagagcggccctaggggcgaacgtggtcccacgggccctagagggcaacgcggtccccgtggtgctacaggaaaatccggcgctaagggcacaagtggaggcgatgggcctcatgggcctccgggagagagaggcctgccaggacctcaggggccaaacggattccctggcccaaaaggccctcccggtccacctggaaaagatggactgcccggacaccccggtcaacggggtgaggtcgggtttcaggggaaaactggtccgcctggcccaccaggtgtagtcggcccacagggagctgcaggcgaaactggcccaatgggagagcgtggccacccaggaccgccaggccctccgggtgagcagggtctgccaggaacagctgggaaagagggcacaaagggagatccgggtccaccgggtgctcccggtaaggacggcccagctggcctgcggggatttcctggcgagaggggtttgccaggcacagccggtggaccaggcctgaaaggcaacgagggtcccagcggccctccaggccctgccggatcccccggtgagcgcggagccgcaggctctggagggcctattggtcccccaggtagaccaggaccgcagggccctccaggcgctgccggagaaaaaggtgtcccgggagagaaaggcccaatcggtcccactggtagagatggggtgcagggacctgtgggactgccagggccagcgggaccaccgggtgtggcgggagaagatggcgataagggcgaggtgggagacccgggacagaaggggacaaagggcaataaaggagaacatggaccaccgggacccccaggccctattggtcccgtggggcagccgggagcagccggagccgacggcgaaccgggagcacgtggaccacaggggcacttcggagccaaaggagacgaagggacccggggattcaacggccctcccggacctattggcctgcaaggactccctgggccaagtggtgagaagggcgagacaggtgatgttggtccaatgggccctcccggacctccagggccacgcggtccggcaggtccaaacggagcagatggacctcaggggccaccaggaggagttggcaacttagggccacccggagagaagggggagcccggagaaagcggatcccccggaatccagggagagccaggggtgaagggccctcggggagaacggggtgagaagggcgagagcggacagccaggagaaccaggaccgccaggacctaagggacccacgggagacgatgggccaaaggggaaccccggtcccgtgggctttccgggagatcccggaccgcctggggaaggcggacctcgcggacaggacggtgctaagggagaccgaggcgaggacggcgaaccaggacagcccggttcacccggtcccaccggcgaaaacggaccgcctggacccctggggaagcgtggaccagccggttctcctggatcagagggaaggcaggggggtaagggcgctaagggcgatccaggcgcaatcggtgccccaggaaaaaccggaccggtcggccctgcaggccctgctgggaagcctggaccagacggcctccgcggattgccgggaagcgtgggtcagcagggacggccaggtgctacaggccaggcgggtccccctggtcccgtcggtcctcctgggctgccaggcctccgtggcgatgccggtgcaaagggtgaaaaaggccatcctggtttgatcggcctgatcggcccacctggggagcagggagaaaaaggtgatcgtggactccccggaccgcagggtagtccgggacagaagggcgaaatgggaatccctggagcaagtgggccaatcggccctgggggaccccctgggctgccgggtccagccggtcccaaaggtgctaagggagcaaccggcccaggtggtccaaagggcgagaagggcgtgcaaggcccacctgggcacccgggacctcccggagaggtcatccagccgcttcctattcaaatgcccaagaagactagacgaagcgtagatggctccagactaatgcaggaggacgaggcaattcccactggcggtgcgccaggctcccccggaggactggaagaaatcttcggttccctagacagtttgagagaagagatcgagcagatgagacgccctactggtacccaggatagtcccgctcgtacctgccaggaccttaagctttgccacccagagctgccagacggcgagtattgggtggatcccaaccaaggatgtgccagggatgcgttcagagtgttttgcaacttcaccgccggaggggagacctgtgtcacacctagggacgacgtaacccagtttagttatgtggatagcgagggctcaccggtgggagtagtgcagctgacgtttttgcgtctgctgtctgtgtcggcacaccaagacgtttcctacccttgctcaggagctgctcgagacggaccgctgaggcttcgaggagccaacgaagatgagctgtctccggagacttctccctacgttaaggaattcagggatggatgtcagacacaacagggcagaactgtgctggaggtacgtactcctgtattggaacaactacccgtcctggatgcctcatttagcgacttgggcgctccgccaaggcggggtggagtgctgctcgggccagtctgctttatgggata

SEQ ID NO: 232613 - DNA, 5132 bp, Artificial Sequence
  derived and/or modified sequence
atggagaggtgttctcgttgtcaccggctgcttctcctgcttcctttggttttagggctgagcgcagccccaggttgggcaggagctcccccagttgatgtacttcgcgcattaaggtttccttccttgcccgatggcgtgagacgggcaaaggggatttgcccagccgatgttgcatacagagtggcccgacccgcacaactgagtgccccaacaaggcagctgtttccaggcggattccctaaggacttctcactccttaccgttgtcaggacgcgcccaggcttgcaggctcccctgttaaccttatacagcgcccaaggagtgagacaactggggctcgagttggggaggcctgtcaggttcctatacgaagaccaaacggggagaccccaacctccatcccagccagtctttcgcggactttcactggccgacggtaaatggcaccgggtggcagtggccgtgaaaggccagtctgtgaccctaatcgttgattgcaaaaagagagtgacaagaccactgcccagatctgcgcgaccagtacttgacacccacggtgtgattatctttggggcacgcatccttgacgaagaggtcttcgaaggcgacgtgcaagagttggcaatcgttcccggagtgcaggccgcttacgaatcatgtgagcagaaggaattagaatgcgagggcggacagcgcgagcggcctcagaatcagcagcctcatcgagctcagaggtcaccccagcagcagccaagcaggcttcaccgcccacaaaatcaggaaccccagagccaggaccccacgccaggtgaggaggaggagatcttagaatccagcttgctacctcccctcgaggaagagcaaaccgatctccaggtccctcctacagcagaccgattccaggcagaggagtacggcgagggtggaaccgatcccccagaaggcccatacgattacacttacggctatggagatgactatcgagaagagactgagctgggcccagccctgtccgctgagaccgcccactccggggcagcagcacatggaccgaggggactgaagggtgaaaagggggagccagctgtactagaaccaggaatgctggtggaggggccaccagggcctgagggccctgcaggactcatcggcccacccggtatccagggcaaccctggacctgtcggcgatccgggagagcggggtccccctggcagagctgggcttcccggaagtgacggagcccctggcccaccagggactagcctgatgctcccgtttagattcggcagcgggggtggggataagggtccggttgtggcagcccaggaggctcaggcccaggccatcctgcaacaggccagacttgccttgagaggcccacctgggcctatgggctatacaggccgacctgggccactgggtcagcctggttcaccaggcctgaagggcgagtctggtgacctgggaccccaaggcccacggggtccgcaaggattaactggtccacccggaaaggccggacgccgtggcagggcgggagccgacggcgctagaggaatgcccggagaccctggtgtgaagggcgacagaggcttcgatggcctgcctgggcttcctggggagaaaggacataggggggacaccggtgcccaggggctgcctggaccccctggtgaggacggcgaaaggggcgatgacggcgagatcggaccaaggggtctcccaggagagtctggtcctagaggcctgctgggcccaaaggggcctcccggaatccctggcccaccgggagtacggggtatggatggaccacaggggccaaaaggaagcctcgggccacaaggcgagcccggtccgccagggcagcagggcacgcccggtacacaggggctcccaggtccacagggtgccatcggaccccacggagagaaggggccacagggcaagcctggactaccgggtatgcccggaagtgatggccctccgggacatcctggtaaggagggaccacctggaacgaagggcaatcaagggccatctgggccacagggtcccctaggatacccaggcccaagaggcgttaagggcgtcgatggaataaggggcctgaaaggacacaagggagagaagggcgaagatggctttcccggtttcaaaggcgacattggcgttaaaggcgatcggggtgaggtcggcgttccaggatcaagaggagaggatggaccggaaggcccaaagggacgcactggaccaaccggtgatccaggaccacctggcttgatgggggaaaaaggtaagcttggggtgccaggcctacctggctacccgggacgacaaggtcctaagggcagcctgggattcccgggttttccgggtgccagcggagagaagggtgcacgcggactatccggtaagagtggccctaggggcgaaagaggccctacgggtccacgtggacaacgaggacccaggggagctactggcaaaagtggagctaaaggaacaagtggtggcgacggcccacatggcccacctggcgagcggggactgccaggccctcagggacccaacgggttccccggacccaagggcccacccggtccccctggcaaagacggtctgccaggacaccctggacagcggggagaagtgggctttcaaggtaaaaccggacccccaggaccacccggagtagtcggccctcagggtgcagcgggagagaccggccctatgggtgaaaggggacatcctggccctccagggccacccggagagcagggactgccaggcactgccggaaaagaagggacaaaaggtgatccaggacctccaggtgccccaggcaaggatggacctgctgggctgcggggttttccgggagagaggggactgccaggaaccgccggaggcccagggttaaaaggtaatgagggcccttccggaccccctggcccagctggcagcccaggtgagaggggagctgccggtagcggcggtccgattggtcctccaggacgtcctggcccacaggggcctccaggcgctgcaggcgaaaagggagtccctggagaaaagggacccatcggacccacggggcgtgatggcgtccaaggtccggtgggactccctgggccagcaggccctccaggcgtagccggtgaagacggagataagggtgaggtcggcgaccctggccagaaggggactaaaggcaacaaaggagaacacggtcctcccggaccccctggaccgatcgggcctgtgggccagcccggtgcagccggagcagacggagaacccggagctagaggtccccagggccactttggcgctaaaggagatgaggggaccaggggctttaatggtccacccggaccgatcggcctgcagggtctgccaggaccgagcggagaaaaaggcgagacaggcgacgtgggacctatgggcccacctggcccaccgggacctcggggacccgctggaccaaacggcgctgacgggccacaaggccctcctggcggagtgggaaacttgggtcccccaggagagaaaggagaaccgggagaatccggatcacctggcatacaaggagagcccggagtgaagggaccaagaggcgaacgtggggagaagggcgagagtggtcagcccggtgaacctggccctccagggccaaaaggtcccactggtgacgacgggcctaaaggaaacccaggccctgtcggcttcccaggggaccctggtccgccaggagagggcggtcctcggggacaggacggggcaaagggggatcgtggtgaggacggggagccaggacagcctgggtcaccaggaccaacaggcgaaaacggcccaccaggtcctctggggaagcgtggcccagccggatcacctggatccgaaggtaggcaaggcggaaagggagcaaagggagaccctggggctataggggcaccaggcaagacagggccagtagggccagctggtcctgcaggcaaacctggcccagatgggttgaggggcctgcccggtagtgtcggccagcaaggtaggccgggtgcgactggacaggcaggaccgcctggcccagtcggcccacccggactgcccggattaagaggagatgcaggggctaaaggagagaagggccatcctggacttataggtctgattggccctccgggagagcaaggcgagaagggcgatcgcggtttgccaggccctcagggatcgccgggacaaaaaggggagatgggcataccgggtgcaagcggacccatcggaccaggtggtccgccaggattacccggaccagccggaccgaagggcgcaaagggcgcaaccgggccaggtggtcccaagggggagaagggcgtccagggacctcctggccacccagggccacctggggaggtgattcagcctctcccaatccagatgccgaaaaagacaaggcgtagcgtggacggctcgagactgatgcaagaagacgaagctatcccgaccggaggagctccaggaagtcctggcggacttgaggaaatctttggcagtctggatagtctcagagaagagatcgagcagatgaggcgcccaacaggtacacaggacagtcccgctcggacatgccaggatctgaaactgtgtcaccccgagcttcccgacggagaatattgggtggacccaaatcagggttgtgcgagggacgcgtttcgagtcttttgcaactttacggccggaggcgagacttgcgtgacacctcgggatgacgtgacacagttttcctacgtggactcagagggctctccagtgggcgtggtgcagctcacctttctgcggctgttgtcagtaagcgcccaccaggatgttagctatccatgctcaggcgcagcacgagatggacctctccgcttgcggggagctaacgaggacgagctttcacctgagacttccccctatgtgaaggagttcagagacggctgccagacccagcaaggtcgcacagttctcgaggttaggacccccgtgctggagcagcttcccgtgttggatgcttccttttcagacttgggagctccccctaggcgcggaggagtgctcttggggccagtgtgctttatgggcta

SEQ ID NO: 232614 - DNA, 5133 bp, Artificial Sequence
  derived and/or modified sequence
atggaacgttgttcccgctgtcataggctgctcctcctgctgccattagttctgggtctgtctgccgctcccggttgggccggagccccacccgtcgacgttctgcgagctctgagattcccttccttacccgatggggtccgtcgtgccaaaggaatctgtccagccgacgtggcgtacagggtcgcgagaccggctcagttgtccgcccctacgaggcaactgtttcccggtggctttccgaaggatttttctctcctgaccgtggtaaggactcgccctggactgcaggcccctctccttaccctctatagcgctcagggcgtccggcaactggggctcgagttaggtaggccagtgcggtttttgtatgaagaccaaactggaagaccccaacccccatctcagcctgtattccggggtttatccttggccgacggcaaatggcaccgcgttgccgtcgccgtcaagggtcaaagtgtcacccttattgttgattgtaaaaagcgggttacacgccctctgcctagatcggcccgtccagtccttgatacacacggagtgatcatattcggagccaggatattggacgaagaggtgttcgagggcgatgtgcaagagctggccatcgtgccgggtgtgcaggccgcatatgaaagttgtgaacagaaggagctggaatgcgaggggggtcagcgcgagaggccccagaaccagcagccacatagagcccagagatctcctcagcagcagccatccaggctacaccgtccccagaaccaggagccccagagtcaggacccaaccccaggggaagaggaggagatcttggagagctcactgttgccccctcttgaggaggaacaaaccgaccttcaggtgccgccaaccgccgaccgcttccaggccgaggagtatggggaaggcggtaccgaccccccagagggtccgtacgactatacatacgggtacggcgatgattaccgggaggaaacggagctgggcccagccttgtctgccgagacagcccatagcggtgcagcggcacatgggccacgtggccttaagggcgaaaagggggaacccgctgtgctggaacctggtatgcttgtggaaggacctcctggcccagaggggcctgcaggtctaattggaccccctggtatccagggaaacccaggcccagtgggagaccccggagaaagagggcctccaggtcgggcagggctgccagggtcggatggcgctcccggtcctccagggacatcactcatgctaccctttagattcggctctggcggaggagacaaaggcccagttgtggcagctcaagaggcacaggcgcaggccatactccaacaggccagacttgctttaagggggccaccgggacctatgggatataccgggaggccgggacctctgggtcagcctggaagtccgggactgaagggcgagtcaggagacctcggcccacaaggcccacggggtccacagggccttacagggcctcccggtaaggcgggaagaagggggagagctggggctgacggtgccagagggatgcccggagatccaggagtgaaaggagaccggggatttgacggcctgcctggactcccaggggagaaaggccatcggggtgacaccggtgcacaaggcttacccggtcctcctggcgaagatggcgagcgtggtgacgacggggagattggccctcggggtctcccaggcgagtctggcccaagagggcttctagggccaaaaggcccacccggaattcccggaccgcctggcgtcagaggcatggacggccctcaaggccctaaaggatctctgggacctcagggggaaccagggccaccaggacagcaaggcactcctggaacccagggattaccaggaccgcaaggggctattgggccacacggcgagaagggtccccagggaaaaccaggactgcctggcatgccagggagtgacggacctcccggacaccctgggaaggaaggtcctcctgggaccaagggaaaccagggaccttccgggccacagggacccttggggtaccccggtccccgaggggttaagggggtcgatggcattaggggcttgaaaggacataagggggaaaaaggtgaagacggattccctggcttcaaaggggatattggagtaaaaggggaccggggagaagtgggcgtccctggatcacgaggcgaggatggaccagagggaccaaagggacggacaggtcccaccggtgaccccggaccccctggcctgatgggagaaaaaggaaagctgggtgtacccggacttccaggttatcctggcaggcaggggccaaaggggtctctgggtttcccaggcttccccggtgcctccggcgagaagggggcaagagggctgagcggtaagagcggacctcgcggagaaaggggacccacagggccaagaggacaacgtgggccacggggagcaaccggtaaaagcggcgcaaaagggacatctggaggagacggcccacacgggcctccaggagagcgcggactgcccggtccacaggggcctaatggctttccaggaccgaagggccctccgggaccaccaggcaaggatggcttgcccggacaccctggccagcgcggtgaagtggggtttcagggcaagacgggtccacctggtccacctggggtcgtaggaccacagggcgctgcaggggagaccgggccaatgggggagagaggtcatcctggcccacccggtccaccaggagagcaggggctccctgggaccgcgggaaaagagggcactaagggtgatcccggaccccctggggcacccggaaaggatggacccgctggtttgaggggctttcctggcgaacgcggactacctggaactgcgggaggacctggactgaaaggcaacgaagggccaagcggacctccgggaccagccggatcgcctggggagcggggagccgcaggttcagggggacccatcgggccaccaggccgtcctggtccccaagggccacccggagcggctggcgagaagggcgtgccaggggagaaggggccaattggcccaacgggccgagacggtgtgcagggacctgtgggactgccaggccctgccggaccgccaggtgttgccggtgaggacggcgataagggagaggtaggtgatccaggacagaaggggaccaaaggaaacaagggagagcacggtcctccagggcctccaggcccaattggtccagtcggtcagcccggagcggctggcgcagatggggaaccgggagcaaggggcccacagggtcatttcggggcaaaaggagatgaggggaccagagggtttaatggcccaccaggtccaatcggtcttcaggggctgccgggtccatccggtgaaaagggggagactggcgatgttggtccaatgggaccacccggacctccagggccaaggggccctgccggacctaacggtgccgacggaccccaggggcctcctgggggtgtcggaaacctgggccctccgggtgagaagggggagcctggagagtccgggtccccaggcatccagggagagccaggggtgaagggacccaggggtgaacgcggtgagaaaggcgagtcgggccaacccggagagcctggcccaccagggcctaagggacctacgggggatgatggccctaagggcaatcccggacccgtcgggtttcccggtgaccccggaccaccaggggaaggcggtccacgaggacaggatggtgcgaaaggggatcggggtgaggatggggagccgggacagcctgggtctccaggcccaactggggagaacggtccacccggacctctgggcaagcgcggaccggctggaagcccgggtagcgagggtcggcagggcggaaagggcgctaaaggggatcccggtgctattggggcaccgggaaaaacgggcccagtcggacctgccggaccggctgggaaaccgggtccggacgggttaaggggcctgcccggatctgtcggccaacagggacgacccggtgccaccggacaggcaggtccgcctggtccggtggggcctcccggactacccggactcaggggagacgccggtgccaaaggtgaaaaagggcaccctggactgattggtctcattggaccaccaggcgagcagggggagaaaggcgacagggggctgccgggtccccagggctctcccggtcagaaaggggaaatgggaattccaggcgctagtggccctatagggccaggtgggccaccaggtctcccaggcccagctggaccaaaaggagccaagggagccactggcccaggtggacccaaaggcgagaagggggtccagggtcccccagggcacccaggccctccaggcgaggtcatccaaccattgccgatccagatgccaaaaaaaacccggagaagtgtagatgggtcccgtcttatgcaggaagatgaagcaatccccaccggcggagctccagggagcccaggtggcttggaagaaatctttggatcattggatagtttgagagaggaaatcgaacagatgcggaggcccaccgggacacaagattcacctgcccgtacctgtcaagatctgaagctttgccacccagagttaccagatggagagtattgggtggatccaaatcagggttgcgctcgggatgcctttagggtgttctgtaacttcacagcaggaggtgaaacttgtgtcactcccagggatgatgtgacacaattttcatacgttgacagcgagggctcacctgtaggggtggtgcaactgaccttcctgagactcctgtctgtcagcgcccatcaggacgtgtcgtatccatgcagtggcgctgcgcgagatggtccgttgcgactgcgcggagccaacgaggacgaacttagccctgagacctccccatacgtaaaagaatttcgtgacggatgccaaacacagcaagggagaaccgtgctcgaggtgcgtacccctgtgctcgagcagctcccagttcttgacgctagcttctctgatctgggtgctccccctcgccgaggaggtgtcttgctgggtccagtatgtttcatggggtar

SEQ ID NO: 232615 - DNA, 5069 bp, Artificial Sequence
  derived and/or modified sequence
atggagcgatgctcaagatgtcatcggcttctgttgcttttaccgctcgtgcttgggctgagcgccgctccaggttgggctggagcccctcctgtagacgtcttgcgcgctctgaggtttccatctctccccgatggtgtgcgtagagccaaagggatctgccctgccgacgtggcgtaccgagtggctaggcccgctcagttgagcgcacctacccggcagctgtttcccggtggatttccgaaggatttctccctgttgaccgtcgtgcgaactcgacctgggctacaggccccactactgaccctctattccgcccagggcgtgcgacagctcggcctcgaactgggcagaccagtgcgctttctgtatgaagaccagacaggacggcctcagcccccaagtcagcctgtctttagagggttgtcacttgcggacggcaagtggcacagagtcgccgttgcagttaagggacagagtgtcacactgattgttgattgcaaaaaaagagtgaccaggcccctgccccgatccgcgagaccggtgctcgatactcatggagtgatcatttttggcgctcggatcctggatgaagaggtctttgagggtgatgtccaggaactcgccattgttccaggggtgcaagctgcatacgaaagttgcgagcaaaaagagttagagtgtgaaggcggtcaacgggagagaccacaaaatcagcagcctcaccgcgctcaaaggtccccccagcagcagccttctaggctacaccgtcctcagaaccaggaaccgcagagtcaggaacaaactgatctgcaggttcccccaaccgccgatcgctttcaagccgaggaatacggcgaggggggaaccgacccaccagaaggtccatatgactatacttacggttacggtgatgactacagggaggagactgaactgggacctgccttgtctgctgaaacggcacattctggcgcagctgcccatggccctagagggctgaagggagaaaagggggagcctgctgttctcgaaccaggcatgctggtggaggggccaccaggacccgaagggccagctggcctgatcggtcccccagggattcagggcaacccaggtcccgtaggcgaccccggagagcgcggaccacccggtagggcgggtcttcctggaagcgatggggcaccaggcccaccgggaacctccttaatgcttcctttccgctttggttctggtggaggagataagggccctgtggtggccgcacaggaagcgcaagcacaggctatattgcaacaggcgagacttgccttaagaggcccacctggacccatggggtacacaggcaggccgggtccgctgggacagccaggctcacccggactcaagggggagagtggcgatcttggtccacaggggccacgcggtccacagggcctcacagggcctcccggtaaggccggaagacgcggaagggcaggagccgacggagccagagggatgccaggagacccaggcgttaaaggggacagggggtttgatggactccccggactgcccggagagaaaggccaccgaggggatactggggcacaggggcttccagggccacctggtgaagacggtgagaggggggatgacggggagatcggccctcggggacttccgggtgaatcaggtcccagaggcctcctggggccaaagggaccacccggtatcccaggcccacctggtgtccgaggcatggatggaccccagggcccaaaggggtcattggggcctcaaggtgaacctggccctcctggtcagcagggcactccaggtacccagggtctgccagggccacagggtgctatcgggcctcacggggaaaaagggcctcaaggaaagcctggccttccaggcatgcctggaagcgatggccctcccggtcaccccggaaaggagggcccaccaggcacgaaaggcaaccaagggcctagcggaccccagggcccattgggataccccggtccccgaggggtgaagggggtcgacggcatcagaggacttaagggacataagggggagaagggggaagatggctttccaggatttaagggcgatatcggggtcaagggcgacaggggagaggtcggggtgcccggttctcgtggggaagacggccctgaggggccaaagggcaggacggggccaactggagatcccggacctccaggcctgatgggagaaaagggaaagctgggggtgccagggctgccgggttatccagggagacaggggccaaagggcagccttggcttcccaggatttcctggagcctctggagaaaaaggagcaagaggactgagcggcaaaagcggccctagaggcgaaaggggtccaactggccctagagggcagcgcggacccaggggtgccacgggcaaatcaggcgctaagggaacatctggtggtgacggaccgcacggtcccccaggcgagagaggcttaccagggcctcaggggcctaacggctttcctggacccaagggtcctctgggtcctccgggtaaagacggtcttccagggcatccaggccaacgcggagaagttggattccagggcaagacaggaccacccggtccaccaggcgtggtgggccctcagggagcagcaggtgaaactggccctatgggcgagcggggtcacccagggcctccaggcccacccggtgagcagggcctgcctggaacagccggtaaggagggcactaaaggtgacccaggccctcctggggctccagggaaggatggcccagcagggttacgagggttccccggtgagaggggccttcccggtacagccggtgggccaggtttgaaaggaaatgaaggacctagcggcccaccaggacctgctggaagcccaggcgagagaggagccgcagggtctggcggacccatcggaccgccaggtcgtcctggaccgcagggaccgcctggcgcagccggtgagaaaggagtccccggtgagaaaggacctatcggaccaaccggtcgagatggggttcagggacccgtaggcctgccgggacccgcaggcccaccaggcgtggccggtgaggacggcgataagggcgaggtgggcgaccccggtcagaaaggcactaaaggaaataaaggggaacacgggcctcccggacctcctggtcctatcggtcccgtcggccaaccgggagccgcaggggcagatggcgaaccgggagcgcgtggtcctcagggtcacttcggggcaaaaggcgatgaggggacccgaggctttaacgggcctcccggtcctatcggactgcaaggacttccaggccctagtggcgaaaagggggaaacaggggatgttgggccaatgggtcctccagggcctccaggtcctcgcggtccagctggcccaaacggagctgacggccctcagggacccccaggcggagtggggaaccttggccctcccggagagaagggggaacctggggagagcggcagtccagggattcagggggaacctggagtcaaggggccacgaggggagagaggggagaaaggagaaagcggacagcccggtgaacctggtcccccaggccctaagggacccactggcgatgatggacctaagggcaatccagggcctgtgggcttcccgggtgatcccggaccacctggagaagggggaccaaggggacaagatggggcaaagggggatcgaggggaagatggcgaacctggacagcctggatcccccggacctactggggaaaatggtccgcctgggcctctggggaaaagggggcctgctgggagtccagggtccgaaggacgccaggggggtaagggtgctaaaggagatcctggggcaattggagctcctggcaagactggacctgtgggcccagccggtcctgctggaaagcccggacccgatgggctgcgcggtctgcccggttcagtgggccagcagggtaggcctggcgctaccgggcaggcgggacctcctggtccagtggggccacctggcttgccagggcttcgaggggacgctggtgctaagggcgagaaggggcatccaggacttataggcctcattggaccacctggagagcagggcgaaaaaggcgatagaggccttccaggtccccaagggtctccaggtcagaagggcgaaatgggaattcccggtgcctcaggccctatcggacctggagggccacctggtctgcctggccctgcagggcctaagggagccaagggggcaactggcccaggaggccctaaaggcgagaagggcgtccagggtccgccaggacatcctggcccacccggagaagttatacagcctttacctatccagatgccaaaaaaaacccgtcgctcggttgacggctcccgactgatgcaagaagatgaagcaatccccacaggtggcgctcccggaagccctggaggtctcgaagaaatcttcggaagtctcgactccttgagggaagaaatcgaacagatgcgtcgcccaacaggaactcaagattcaccagccaggacctgccaagatttaaaactgtgccaccctgagttgcccgatggtgaatattgggtggaccctaatcaggggtgcgcgcgtgatgcttttcgtgtattttgcaactttacagccggaggagaaacttgtgtgactccacgcgacgacgttacgcaattttcctacgtcgactcagagggctctccagtgggcgtagtgcagctgacattccttcgcctacttagtgtctcggcacaccaagatgtctcctatccctgcagcggtgccgcaagagatggacctctgcgtctgagaggcgctaatgaggacgagctgtcaccagagacatccccgtatgtgaaagagttcagggatggatgccaaacccaacaaggtcgtaccgtccttgaggtgcgtaccccagtccttgagcaactgccagtcctggatgcttccttctccgatctgggagcaccgccaagacgaggcggagttctgttaggtcctgtgtgcttcatgggcta

SEQ ID NO: 232616 - DNA, 5210 bp, Artificial Sequence
  derived and/or modified sequence
atggaacggtgctcccgatgccaccggttgctcctcctgctcccgctagtccttggactttccgcagcaccaggctgggccggagccccacctgtcgacgtgctgcgagctctgcggtttccaagcttaccagatggtgtgcgcagggctaaagggatctgtcccgctgacgttgcgtatagagtggctcgccctgcacagctcagtgctcccacccgccagctgtttcctgggggattccccaaggacttcagcttgctgacggttgtcaggaccaggcccggactgcaggctccactactgacactctactccgcacaaggcgtccgacaacttggacttgagcttggtaggcccgtacgatttttatacgaggatcagaccggacggccacagcctccaagccaacccgttttccgtgggctttcactggccgacgggaagtggcacagagtggcggttgccgtcaagggacagtcagtcacgctcatcgttgactgcaagaagcgggtgaccaggcccctccctcgctccgccagaccagtcttagatacccacggagtcattatatttggtgcacgtatactcgatgaggaggtgtttgagggggatgtgcaggaactggcgatcgtgcctggagtgcaagccgcttatgaatcctgtgagcaaaaggagcttgaatgtgaggggggacagagggagcggcctcagaaccagcaaccacacagggcccaaagatctccacaacagcaacctagcaggctccatagaccccagaatcaagaaccccaatcacagcccacagagtccctttactatgattatgagcccccatactacgacgtgatgaccacaggaacgaccccagactatcaggatcccacacccggagaggaagaagagattttggaaagctcactgcttcctccactcgaggaggagcaaaccgatctccaggtgcctcctacggctgatagattccaggccgaagaatacggcgaggggggtaccgatcctcctgagggcccttatgactacacctatggttatggtgatgactatcgggaggagacggagctcggacctgcactaagcgcagaaaccgctcattctggcgcagccgcacatggcccacgaggtctcaaaggcgagaagggtgagccagccgttttggaaccgggtatgctggtagaggggccaccaggcccagaaggcccagccggactgataggccctccaggcattcagggtaaccctggacccgttggggatcccggtgagcggggacctcctgggagagctggactgcccggtagtgatggggcaccaggaccacctggcaccagcttgatgttgccttttcgttttggttccggcggaggggacaaagggcctgtggtagctgcccaggaggctcaggcccaggcaatcctccagcaggctagactggctctgcggggaccacctgggcctatggggtacactggccgtcctgggccactcggccagccgggaagccccggtctgaagggtgaaagtggggatctgggcccacagggcccaaggggtcctcagggactgacgggtcctccgggaaaagctggccgtcgaggtagagcaggcgctgatggggctcgaggaatgcctggagaccccggtgtgaaaggtgatagaggcttcgacggactgcctggactgcctggcgagaaagggcacaggggcgacaccggcgcacaaggcctaccaggacccccaggcgaggacggtgaacgcggagacgacggggagatagggccacggggacttccaggagagagcgggcctcgcggactcctgggtcccaaaggacctcccggaatacccggaccacctggcgtccgcggaatggacggaccacaaggccctaaaggctcccttggaccacagggagagcctgggccacctggccagcagggcacccctggtacccagggtttgcccggtccccagggcgctatcgggccacatggcgagaaaggaccccagggaaagcccggtttgcccggaatgccaggttcggatggaccccctgggcatcccggtaaagaaggcccacctggcaccaaagggaatcagggaccttcgggaccacaggggccattgggctaccctggacctcgaggagttaagggcgtagacggaattcgcggactcaagggacacaaaggagaaaagggcgaagatggatttcccggattcaaaggcgatatcggtgtgaagggtgaccggggtgaagtgggagttccagggagccggggagaggacggaccagagggaccgaaggggaggacgggccctactggcgatcccggtcctccaggactcatgggggaaaaaggcaaactcggagtgccaggactgcccggatacccaggccgtcagggccctaagggatctcttggcttccccggtttcccaggcgcatctggcgaaaaaggagctaggggcctcagcgggaaaagcggcccacgaggggagcgcggtcctactggtcctcggggtcagaggggaccaaggggggcaactggcaagtcgggggctaagggaactagtggtggagacggcccacacggaccccctggagaacgagggcttccgggtccccaggggccaaacggatttcctgggcctaaggggcctctaggccctcccggaaaagacggactccctggccaccccggacaacggggtgaggtcggcttccaggggaaaacgggaccgcctgggcctccaggtgtggttgggcctcaaggagcagcaggggagacgggacccatgggggagaggggccacccagggcctcccggacctccaggcgagcaagggttaccaggaacagcgggaaaggaaggaacaaaaggcgacccaggacccccaggcgctcccggaaaagatggtcccgcagggctgcgcggatttcctggagaacgtggattacccggaaccgccggtggtcccggactgaagggcaacgagggcccaagtggtccacccggacctgcaggaagcccaggagaaaggggcgctgccggatccggtgggcctataggaccccctggtagacccggaccacaggggccaccgggagctgccggtgagaagggagtccctggtgagaagggtcctattggccctactggaagagatggtgtgcaggggccagtgggtctcccagggcctgctgggcctcccggagtggccggagaagatggtgataaaggggaagtgggcgaccccggacagaagggaactaagggaaataaaggtgagcacggccctcccggaccccctggcccaattggaccagtggggcagccaggggcagctggagctgacggagagccaggagccagaggaccacaaggccattttggcgcaaaaggcgacgaaggcacccgcggatttaacggaccacccggaccgatcggcctccaagggttgcctggtccgtcaggggaaaaaggcgaaacaggcgacgtcggtcccatgggtcctcctggccctccaggcccaagagggcctgccggtccgaacggtgccgacggcccacaaggaccccctggaggagttggcaacctgggccctcctggggaaaagggggagccaggcgaatctggatctccaggcatacagggagagcctggagtaaagggccctcgcggtgagagaggtgagaaaggagagagcggtcagcccggagagccaggccctcccggacctaaagggcctactggcgatgacggcccaaagggcaacccgggtcccgtggggtttccaggggaccctggcccacccggagaggggggtcctcgcggacaggacggtgcaaaaggcgatagaggcgaggacggagagcctgggcagccaggctctcccggacccactggtgagaatggccctcctggcccactgggaaaacgcggacccgctggaagccctgggagcgagggtagacaaggaggaaagggagctaaaggggacccaggcgcaatcggcgcacccggtaagacgggaccagtaggccctgccggaccagccggaaagcctgggcctgatgggctgagagggctcccaggaagtgttggacaacaggggaggcccggtgccaccgggcaggccggtccacctgggcctgtagggccacccggattgcctgggcttcgcggagacgccggagctaaaggtgagaaaggccaccccggtcttattgggcttatcggaccccctggcgaacagggcgagaaaggggacagagggcttccgggacctcaggggagccccggacagaaaggagaaatgggtatacccggagccagtggaccaattggtcccggaggaccaccaggcctgccaggaccggcaggcccaaaaggcgcaaagggcgctacaggtcccggagggcctaaaggagaaaaaggggtccaaggcccaccaggacaccccggacccccaggggaggtgatccagcctctgcctattcagatgccaaagaagaccaggagatcagtggatggaagcaggttaatgcaggaggatgaagctattcccaccggtggcgctcccggatcccctggagggcttgaagagattttcggttcacttgacagcctcagagaggagatagaacaaatgcgacgccctactggaactcaggacagtcccgctcgcacatgccaggatctcaaactgtgccacccagaattgcccgatggagaatactgggtggaccccaatcagggatgcgccagggatgcattccgcgttttttgcaactttacagccggaggagaaacctgcgtgacacccagggacgacgtaacccaattcagctacgtggactctgagggttcacccgtgggagtggtccagctcacattcctccgtctactgagtgtgtctgcgcatcaggacgtgagctatccttgctctggcgctgccagggatggtcccttgcgcctgaggggtgcaaatgaggacgagttgtcgcctgaaacctcgccttatgtaaaagaatttagggacgggtgccagactcagcaggggaggactgtccttgaagtgcgcactcctgttctcgagcaactccctgtccttgacgccagtttcagtgacttgggagcacctcctaggcggggaggggtgctgcttgggccagtctgtttcatgggcta

SEQ ID NO: 232617 - DNA, 5210 bp, Artificial Sequence
  derived and/or modified sequence
atggagaggtgttctagatgtcacaggctcttgctgctgctcccactagtacttgggctcagcgccgctcccggatgggcaggtgcccctcctgttgatgtcctgcgggctttacgcttccccagcttaccagatggagtcagacgggctaaggggatctgccccgcagacgtggcctaccgggtcgcgaggcccgctcagctatcagctcccacgaggcagctgtttcccggagggtttcccaaggactttagtttactaacagttgtacggacgagacctggtcttcaagctcctctgctgactctgtattcggctcagggggtgcgccagctggggctggaattaggcagaccagtaagatttctgtatgaagaccagactgggaggccccagccgccttcccagccagtgtttcgcggtctgtcactggctgacggcaagtggcatcgagttgctgtcgccgtcaagggccagtcagttaccctgatagtggattgtaaaaaaagggtaacccgtcctctgccgagaagcgctcgtcctgtactcgatacccatggggtgataatcttcggggctcgcatcctcgacgaagaggtgtttgaaggcgacgtgcaggaattagcaattgtacccggtgtccaggctgcatacgagtcatgtgaacagaaggaattagaatgtgagggcggtcaaagggaaaggccgcaaaaccagcagccccatcgggctcagcgctccccccaacagcagccttcacgcctgcatcgtccacaaaaccaagaaccacagagccagcccacggaaagcctctactatgactacaaacccccttactacgatgtgatgactacaggcaccaccccagactaccaggatccgacgcccggagaggaggaagagatccttgaaagcagtttacttcctccacttgaggaagaacagactgaccttcaggtgcctcccactgccgatcggtttcaggctgaagagtatggtgaagggggaactgacccgccagaaggaccctatgattacacctatggttacggagatgattatcgagaggagactgaactgggcccagcattaagtgcagagactgcccattccggagccgcagcccatgggccaagaggcctaaaaggcgaaaagggtgaacccgcagtccttgagcccggaatgctcgtcgagggtccccctggccctgagggccctgcgggtctgattggacctcccggaattcaggggaatccaggtcctgtgggcgatccaggtgaacggggaccccctgggagagctggcttacctgggtcggatggcgcaccgggtccaccagggacgagccttatgttgccgttccgtttcggctcaggcggaggggacaaggggcctgtagtcgctgcccaggaagcgcaggcacaggccattttacaacaggcaaggctggctctaaggggcccacctggaccaatgggttatacaggacgtcccggacccctcggacagcccggatctcccggactgaagggagaatcaggcgatcttggacctcaggggcctcggggtcctcagggattaacaggtccccctggcaaggcgggtagacggggtcgtgctggagcggatggcgcaagaggaatgccaggtgaccccggtgttaagggggataggggcttcgatggcctccccggtctgcccggtgaaaagggccatcggggtgacactggtgctcagggtctccccggtccccctggagaagacggggagcgtggcgatgacggagagatcggcccacggggactgcctggagagtccggacccagagggctcctcggccctaaaggccctcccggtatcccgggacccccaggggtcagggggatggacggaccccagggaccaaaggggagtctaggccctcagggcgagcccggtcctccagggcaacagggaacccccggaactcaggggcttccgggacctcagggcgctatcggtccacatggcgagaaaggtccgcagggtaaacccggactacctggcatgcctggctccgatggacccccagggcaccccggtaaagagggaccccctgggacaaaggggaaccagggaccttcgggcccacaggggcctctgggctaccctggcccaagaggggtgaaaggggtcgatggcatccgcggattgaaagggcacaaaggggaaaagggagaggacggatttccaggatttaagggcgatatcggagtgaagggtgatcgtggagaagtgggcgtgcccggaagtcgcggagaagacggaccggagggtccaaaaggcagaaccgggcctaccggcgacccgggtccgcctgggctcatgggcgagaaagggaagctcggggtacctgggctgccagggtaccccggtaggcaggggccaaaaggctcacttgggtttcccggattcccaggcgcttctggagagaagggcgctcgcggacttagtggcaaatccgggcctcgcggagagagaggacccactggcccacggggacagcgtggtccacgcggagccacggggaagagcggcgctaaaggaaccagtggaggtgatggacctcacggcccacccggagaacggggtctgcccggaccccaagggccaaatggattcccagggccaaagggaccacccggacctcctggcaaagatggattaccgggacatccaggacagcgcggagaggtgggatttcagggaaaaaccggccctcccggaccgcctggagtcgtcggaccccagggagccgcaggggagaccgggcctatgggtgagcggggacaccccggtcctcctggccctcccggagaacaaggcctgcccggaactgcaggaaaggaaggcactaaaggcgatccagggccaccgggtgcccctggcaaggatggaccggcaggcttacgtggatttccaggcgagcgaggcctacccggaacagcgggtggccctggcctcaaaggcaacgagggcccttccgggccacccggtcctgccggttctcccggtgagcggggagccgcaggctctgggggacctatcggccctcctggtagaccgggacctcaagggcctccgggagccgctggtgagaaaggtgttcccggagagaaaggcccaattggaccaaccggacgagacggggtccaaggtcctgtgggcctgccaggacctgcagggccacctggtgttgccggtgaagatggggacaagggcgaagtgggagaccccggacaaaagggaaccaagggcaacaaaggcgagcacggaccaccaggccctcccggtcctataggcccagttggtcaaccaggagccgcaggggctgacggcgagcccggagccagaggccctcaaggccactttggtgcaaaaggggatgaagggactcgaggattcaacggaccccctggacccataggccttcagggactccccggaccttctggggagaagggcgaaactggagacgtgggtcccatgggccctccaggaccaccagggcctcgcggtccggcagggccaaacggggcagatggtccccagggccctccaggtggtgtgggcaacttggggcctcctggcgaaaagggcgaaccgggagagagtggctctcccggaattcagggcgagccaggggtgaaaggccctcggggagagcgcggagagaagggcgagtccggccagcccggagagccgggaccacccggtcctaaaggcccaacaggagatgacggcccaaagggcaacccaggcccagtaggctttcccggtgacccaggcccacctggtgaagggggacctaggggccaggatggcgctaaaggtgatcgtggggaagacggggagcctggacagcctggctccccaggccctacaggtgagaacggtcccccaggacccctcggtaagcgcggacctgccggatctccaggatctgagggtagacagggcggaaaaggtgcaaagggtgaccctggggcaattggtgcacccggtaagaccgggcctgtgggtccagccggtccagcaggaaagccaggtcctgatggactgcgtggcttgcccggttcggtgggacagcagggaaggcctggcgcaacaggtcaggccggacctccaggaccagtcggccctcccggattgccaggcctcagaggagacgcgggagcaaaaggcgagaaaggacatcccggtcttatcggactgattgggcctcctggggagcagggagaaaaaggggatcggggtctcccaggcccacagggctcccccggacaaaagggggaaatgggaattccaggtgcatccggcccaataggcccaggaggacccccaggattgcctggccctgccggaccaaagggtgcaaaaggagccactggcccagggggaccgaagggggaaaaaggagtgcagggccctcctggccatcctggtcctcctggcgaagttatccaacctctgcctattcagatgcctaaaaaaactcgcaggtcagtcgatggatccagacttatgcaggaggatgaggcgatcccgactggcggtgcccctggtagccccggaggtctagaagagattttcgggagcctggatagcctgagagaagaaatcgagcagatgagacgacccacgggtacgcaagattctcccgcacggacatgtcaggatctgaagctctgccatccggaacttccagatggcgagtattgggtagatcccaaccaggggtgcgctagggacgctttccgggtcttttgcaatttcactgcaggtggtgaaacttgcgtgactccaagggacgatgtcactcaattttcgtacgtggactccgaaggatcccctgtgggagtggtccagctgaccttccttcgtcttctgtccgtttccgcccatcaggacgtctcttacccatgctctggcgctgcccgtgatggaccacttcggcttcggggtgccaacgaagacgagctctcgcccgagacctccccatacgtaaaagagttccgagatggatgtcagacccagcagggtagaacggtactggaggtacgtaccccagtgctggagcagctgcccgttctggacgcaagtttcagcgatctgggggcaccacccaggcgaggaggtgtgctattggggcctgtttgcttcatgggtta

SEQ ID NO: 232618 - DNA, 5211 bp, Artificial Sequence
  derived and/or modified sequence
atggagaggtgtagtcggtgtcatcgactgctcttactgctgcctcttgtgttaggcctaagcgctgccccaggttgggctggggcacctccagtggacgtgttgagagctcttcggtttccctcacttccggatggtgtgcgcagagcaaaaggcatctgcccggctgatgttgcgtaccgcgtcgcacggccagctcaattgtccgcacccacccgccagctcttcccaggcggttttccaaaggacttctccctgctgaccgtagtgaggactaggcctggactccaagcacctctgctcaccttgtattccgctcaaggggtaagacaactcggactggagcttggcagacccgttaggttcttgtacgaggaccagaccgggagacctcagcccccttctcagcctgttttcagagggctgagcctcgcagatggtaagtggcatagagtcgcagtcgcagtgaaggggcagagtgttacattaatcgtagactgtaaaaaaagggtaactcgcccactgcctcgatctgctcggcctgtgctagacacccacggagtaataatattcggtgccaggattcttgacgaagaagtgttcgagggtgacgtccaagaactcgccattgtgccaggagtgcaagctgcttatgagagctgtgaacagaaggagctggaatgcgagggtggacagcgcgagaggcctcaaaatcagcagcctcatcgcgcacagagatcaccccaacagcagccttctcgcctgcaccggccacagaaccaggagccgcaatcacagcccactgagtccctgtactacgattataagcctccatactatgatgtgatgaccaccggaaccaccccagactaccaagaccctactcctggggaggaagaagagattctggagagctcgctgctgccgccactggaggaggaacaaaccgatctacaggtccccccaacagcagaccgttttcaggcagaggagtacggcgaaggagggaccgacccgcctgaggggccatacgactacacctacggatatggtgatgattaccgggaagagacagagctggggcctgccctctctgccgagactgctcatagcggggctgcagcacatgggcctcgcggtctaaagggggaaaagggcgagcctgcagtcctggaaccagggatgctcgtggaagggcctcccggtccagaggggcctgcgggtctgatcggccctcccggtattcagggaaatccgggtcccgtgggggacccaggggaaagagggccaccaggccgagccggtctgcctggctcagatggggctcccggaccccctggtacttctctgatgttgccatttcggtttgggtccggcggaggagataaggggccagttgtcgcagcccaagaagctcaggcccaggccattctgcagcaggcgaggctggcacttcgaggccctccgggtccaatgggctacaccggacggcctggccctcttggacagcctgggtcccctggactgaaaggagagtccggagatctaggccctcagggcccaagggggccacagggactgactggtcccccaggtaaggcgggtcgaaggggcagggcaggcgctgatggcgctaggggaatgcccggagacccaggtgtgaaaggagaccggggtttcgacggcctgcccggactccccggagaaaagggacatagaggcgatacgggggcacagggtctgccgggtccacccggtgaggatggagagcgcggtgacgatggcgagattggcccaagaggtctgccaggtgaaagcggaccccgaggcttactcggccctaagggaccgccagggatccccggacctcctggtgttagaggcatggatggacctcaaggcccaaaggggagtcttggccctcagggcgaacccggaccaccaggccagcaagggacccccggtactcaaggcttacctggaccacagggagccatcggccctcacggggagaaagggcctcagggtaagcctggcctgcccggaatgcctggttccgatggaccccctggccacccgggaaaagagggacctcctggaactaagggtaatcagggtccaagcgggcctcagggtcccctggggtatcccggtccaaggggcgtgaaaggcgtagatggcatccgtggtctgaaaggacacaaaggagagaaaggagaagacggcttccccggttttaaaggcgatatcggtgtgaagggggatcgcggagaggttggcgttcccggttcgaggggggaagacggtcctgagggtccgaagggcagaactgggccaacaggtgacccgggacccccagggcttatgggagagaaaggtaagttgggtgtgcctggcttacccggatatccgggtcggcaaggccctaaggggtcactgggattcccgggtttccctggcgcttctggcgaaaagggagcacgcggtctgagtggcaaatccggaccacggggagaacggggacctaccggtcccagggggcaaaggggtccacggggagctaccgggaaaagtggggcaaaggggacatcaggcggagacgggcctcacgggcctccgggtgaaaggggattgccaggcccacagggtcccaatgggttccccggacccaaagggcctccaggtccgcctggaaaggatgggctgccagggcacccgggacaacgcggtgaggtaggtttccagggcaaaacggggccaccaggccctcctggcgtcgtgggcccacagggagccgctggcgaaacaggccctatgggtgaacggggacaccctgggccacctggccctccaggcgagcaggggctccctggaacagccggtaaggaggggacaaagggggacccaggccctcccggagccccaggaaaagacggacccgctggtcttcgcggatttccaggggaacgaggattacccggaaccgctggtggtcctggattgaaaggtaacgaaggaccaagcggcccacccggaccagcgggaagccccggagaacggggagcggcaggcagtggcggtccaatcgggcctcccggaagacccggacctcagggacctcccggagccgctggggagaagggagtgcctggcgagaaggggcctatcggcccaacaggcagagatggtgttcagggcccagtaggtctacccggtcctgctggaccccctggggtcgcaggggaggacggtgataagggggaagtgggcgaccccggacaaaagggtaccaaggggaacaaaggagagcatgggccaccgggaccacccggaccgataggtccagtaggacaacctggcgctgctggcgctgatggagagccaggggcacgcggaccgcaggggcactttggagccaagggtgatgagggcactcggggtttcaatggaccaccagggccaataggactccaaggcctcccaggaccttctggggaaaagggcgaaaccggggacgtcggtcccatgggaccccctgggcctccgggaccacgcggtccagccggtccgaatggggcagatgggcctcaagggcctccgggtggagttggaaacctggggcctccgggagagaagggcgagcccggagagtcaggttctcccggaatacaaggtgaacctggcgtaaagggcccacggggagagcgcggtgaaaaaggggagtccggtcagcccggagagccagggcctcctggcccaaaaggacctaccggcgacgatggtcccaagggcaaccctgggccagtcggatttccgggagaccctggaccaccaggagaaggaggcccacgagggcaagatggggcaaagggagaccgaggtgaggacggagagcctggtcagcccggatcgcctggcccaactggcgagaacggaccccctgggcctcttgggaagagggggcctgctggctcccccggaagtgaaggtagacagggcggaaaaggcgcaaaaggtgaccccggagcgattggcgctccaggcaagaccggaccggtaggcccagcaggtcccgctgggaagcctggtcccgatggccttcggggtctcccagggtccgtgggacagcagggacgtcccggagcaacaggacaagccggtcctccagggcctgtcggaccccctggtctcccaggcctccgcggtgatgctggggctaagggcgaaaaagggcatcctggcctgatcggcctgataggccctccaggcgagcagggcgaaaagggggaccgcggattgcctgggcctcagggaagcccaggacagaaaggcgagatgggcataccaggagcctctgggcctatcgggccagggggacccccaggtctccccggaccggcagggcctaagggagccaaaggcgctaccgggccaggaggacctaagggagaaaagggggttcagggacccccaggccacccgggacctccaggggaggtgattcagccattgccaatccagatgcctaagaaaactagacgttctgtggacggatccaggctgatgcaggaagatgaggctattcctacaggaggcgcacctggttcccccggaggattggaggagattttcggatccctggatagcctgcgcgaagagatcgagcagatgagacgccctacaggcacacaagatagtcctgcgcgtacctgtcaagacctcaagctgtgccacccagagctgccagatggggaatattgggtagacccaaaccagggctgcgcccgtgacgcattcagggtcttctgcaatttcaccgctggcggagaaacatgcgtgacgccccgagacgatgtcacacagttttcatatgtagatagtgagggatcacccgtaggcgttgttcagttgacattcctacggctcctgagcgtctccgcccatcaagacgtctcatacccctgctctggcgctgcacgtgatgggcctctgcggctgaggggcgcaaatgaagatgaactgtctcccgagacgtctccttatgtcaaggagtttcgcgatggatgtcagactcagcaaggaagaacagtccttgaagtgcgaactccggttctcgagcaactgccagtgctggatgcctccttctctgatctgggagcgccaccccgacggggaggcgttctcctgggccctgtgtgtttcatggggtag

SEQ ID NO: 232619 - DNA, 5069 bp, Artificial Sequence
  derived and/or modified sequence
atggaaagatgtagcaggtgtcaccgtctcttgttacttctgcccctggtgctaggtctgagcgcagcgcctggctgggccggagctcctcctgtagatgtactgcgggcacttcggttcccatccctaccggacggggtgagaagggcaaaaggcatttgtcctgcagacgtcgcttaccgggtggcgagaccagctcagctctcagctcccacacgacagctatttcctgggggttttcccaaggacttcagtctcctgaccgtggtcaggacaaggcccggacttcaggccccactcctcacgctgtacagtgcacagggcgtgcggcagctgggcctagagctcgggcgtccagtgcggttcctctatgaggaccaaaccgggcgaccgcagcctccttctcagcccgttttccggggtttatctcttgctgacggaaagtggcaccgagtggccgtcgcagtgaaaggccagagcgtgacacttatcgtggattgcaaaaaaagggtgacaaggccacttccaaggagcgccagacccgtgctggatacacacggagtgattattttcggggcacgtattctagatgaagaagtcttcgagggcgatgtccaggagcttgccatcgttccaggtgttcaggccgcatacgagtcctgcgagcaaaaggaactggagtgcgagggcggacaaagggaacgcccacagaaccagcagccgcatagggctcagcggtctccccagcaacaaccatccaggctccatcgccctcagaatcaggaaccccagtcccaagaacaaaccgacctccaggtgccacctactgccgatcgctttcaggccgaggaatacggcgaggggggtacggaccccccagaaggcccttacgattacacatatgggtacggtgatgattaccgcgaggagaccgaactcggaccggctctcagcgcagaaacagcccactcaggagccgctgctcatggacccagaggacttaagggagagaaaggtgagcctgctgtgctcgaacctgggatgctcgtcgaggggccaccaggaccagaggggccagccggactgatcggaccgccaggcatccagggcaatccaggacctgtgggagatccaggagaacgcggtccaccaggcagggccggtcttcctggatctgacggggctccagggcctcccggtactagcttgatgttgccgttccgcttcgggtcaggcggaggagacaagggacccgttgtcgctgcgcaggaggctcaagcacaggctatcctgcagcaagctcggctggccctcaggggccctcctggccctatgggttataccggcaggccaggccctctagggcagcccggttcaccaggcttgaagggcgagagcggggatttggggccacagggacctcgcggaccccagggactcacgggacccccagggaaggccggacgaaggggtagagctggggctgacggggcaagaggtatgccaggcgaccctggagtgaaaggcgatcggggattcgatggattacctggactgcctggcgagaagggacatcgcggtgacaccggtgcccaggggctgcccggacccccaggtgaagacggagagcggggagacgacggagagataggccctcggggtctgcctggagagagcggccctagaggactcttggggccaaagggccctccaggaatccctggtccgcctggggtgcgaggcatggatggaccccaaggacccaaaggcagtctgggcccacaaggagagcccggacctcccggacagcagggtacacctggtacacagggcttgcctggaccccagggagccatcggccctcacggcgagaagggcccacagggaaagcctgggctccccggaatgcctggctcagacggccctccgggacatccgggtaaagaaggcccacccggtacaaaagggaaccagggaccctcaggacctcagggtccgctgggatatccaggtcctagaggcgtgaagggtgtagatgggattcggggtctgaaaggtcataagggcgagaagggtgaagacgggtttccaggctttaagggcgatattggggtgaaaggagaccgcggagaggtaggagtgccagggagtcgcggagaggatggtccggagggaccgaagggtcgaactggaccgaccggcgatcctggccctccaggccttatgggcgaaaaagggaagttaggagtccctggtctcccaggctaccccggtaggcaaggtcctaaaggtagccttggatttcccggatttcccggtgccagcggcgagaagggggcacggggtctgtccgggaagagtggcccacggggagagcgcggacccactggaccgaggggacagcggggtccaagaggcgctactggcaaatcaggagcaaaaggtacctctggcggtgacggtccacacgggcctccaggcgaacgtggtcttccaggtcctcaggggcctaatgggtttccaggccctaaggggccacctgggccaccaggcaaggacggattgcccggacatccaggccaacgcggtgaggttggattccaggggaaaaccggccctcccggaccccctggggttgtgggccctcaaggggcagcgggagaaacaggccctatgggcgaacgcggacatccaggtcctcccggtccaccaggcgaacagggcttacctggcacagccggtaaggaaggcacgaagggcgaccccggtcctccaggcgcaccaggtaaggacggaccggcaggacttagagggttccccggagagcgtggcctccctgggaccgccggaggccctggactgaaagggaacgagggtcctagtggccctcctggaccagcaggctctcctggagaacgaggcgcagcgggatccgggggacccatcggtcctccaggaagaccaggcccacaaggtccgccaggcgctgctggcgaaaaaggggtccccggagaaaaaggtccaattggtccaaccggcagagacggagtgcaggggcctgtcggtctgcccggaccggcagggcctcctggggtggctggcgaggatggggacaaaggcgaggtcggagaccctggtcagaagggaaccaaaggaaataaaggtgagcatggccctcccggaccgcctggtccgattgggccagtggggcagcccggagcggcaggagccgatggcgagcccggagctagaggtccccaagggcacttcggggctaagggagacgaaggtacacgcggttttaatgggcctcctgggccaattggacttcagggacttccaggcccttctggtgaaaagggcgaaaccggtgacgtgggccctatgggtcctccaggccctcccggtccacggggaccagcaggacccaacggagcagacgggcctcagggcccacccggaggagttggcaacctcggcccaccaggcgagaagggagaacctggagagtcaggaagccccggtattcagggagagcccggagtgaaaggcccacggggtgagcgcggtgaaaagggcgaatcaggtcagccaggggagcccggtccgccaggaccaaaggggcctaccggtgacgacggccctaagggaaacccagggccagtcgggttccctggtgatccagggccacccggagagggcggtccgcgtggtcaggacggcgcaaagggcgataggggcgaggatggcgagcccggacaacccggtagccccggtccaaccggggagaatggacccccaggcccactgggcaaaaggggcccagctggcagtcctggcagcgaaggcaggcaggggggaaagggagctaagggggatcctggtgcgattggcgctccgggaaaaactggccctgtgggtccggcagggcctgcgggtaagcctggccctgacggcctgagaggcctaccgggaagcgtggggcagcaaggaaggcctggcgcaaccggacaagctgggccacccggacccgtggggcctccaggactgcctggactgcgaggagatgcaggagcaaaaggggagaaaggccatcctggactgatcgggctgattggcccacccggtgagcagggcgaaaagggcgaccgcggacttcctggcccacagggctcaccagggcagaagggagagatggggattcctggcgcaagtggcccaatcgggcctgggggacctcctgggctacccggtccagctggacctaaaggagccaaaggtgccaccggccctggcggaccaaagggtgagaaaggggtgcagggccctcctggtcaccccggtcctcccggagaggtgatccagccccttccaatccaaatgcctaagaagacacgcagatcggttgatggctcaaggctgatgcaagaggacgaggccatcccaactggaggtgcacccggtagtccaggagggctggaagaaatcttcgggtccctggattccctccgagaggagattgaacaaatgcgacggcctacaggtacccaagacagtcccgcaagaacatgccaggacttaaagctgtgccaccctgagctgcccgatggcgaatattgggtggatcctaaccagggatgcgccagagacgcgttcagggtgttctgcaacttcacggcagggggtgagacgtgcgtcactccaagagacgacgttacgcagttcagctatgtcgacagcgagggcagccccgtgggggtcgtgcaactgacgtttttgagactcttatccgtgagcgcccatcaagatgtgagttacccgtgctctggggcagctcgagatgggccactgcggctgcgtggtgcgaacgaggatgagctgtcgcccgaaacatccccttacgtaaaggagtttcgggacgggtgccagacacagcaaggaaggacagtgctggaggtacgcacgccggtgctggagcagctgcccgtattggatgcaagtttctccgacctgggggcaccaccaaggcggggtggcgtcctcttaggcccagtgtgcttcatggggta

SEQ ID NO: 232620 - DNA, 5132 bp, Artificial Sequence
  derived and/or modified sequence
atggagcgctgtagcagatgtcacaggctcttactgttacttcctttggtcctcggtctgtccgcagcgcctgggtgggctggcgctccccctgttgacgtgctgagggcgctccgcttcccatctctgcctgatggggtcagacgcgcaaaagggatctgcccagccgatgtggcgtatcgagtcgcgagacccgcacagctgagtgcccctacccgacaactgttcccagggggatttccaaaggatttctctctgcttactgtcgtaagaacaagacccggtctacaggcccctctcctgaccctgtacagcgcccagggagtgcgccagttgggactggagcttggcaggcccgtaagattcttgtacgaggaccagacaggccgtccgcaaccgcctagccagccagtgttcaggggcctgagtctagccgacggtaaatggcaccgagtggccgtggctgtcaagggacaatctgtgaccctcatagtcgactgcaaaaagcgcgtaactagaccccttccaaggtccgcacgcccagtcttagacacgcatggggtgatcatctttggggctcgtatcttggatgaggaggtttttgaaggagacgtgcaggaattggcaattgtcccaggagttcaagccgcatatgaatcctgcgaacagaaagaactcgagtgcgagggcggacagcgtgaacggcctcagaaccaacaaccccaccgcgcacagaggtctcctcagcagcagccatcgcgcttacatagacctcagaaccaggaacctcaatcccaggaccctactccaggggaggaagaagagatcctggaatccagtctgctccctccgctggaagaagaacagaccgacctgcaagtgccccctaccgctgataggtttcaagccgaagaatacggggaaggaggaaccgaccctcccgagggaccctacgattacacctacggctacggagacgattacagggaggaaactgagttgggcccagccttgtctgccgagacggcccactcaggtgctgctgctcatgggcctaggggcttgaagggggagaaaggcgagcccgctgtgctcgaaccaggcatgctggtagagggccctcctggaccagagggtccggctggtctcattgggccacctggtatccagggcaacccagggccagtgggggaccccggagaacggggacctcctggcagggctggactgccaggatcagacggtgctcctggaccaccaggtactagcctcatgctgccgttccgcttcggaagcggaggcggagataagggcccagtggttgccgctcaagaggcccaggcacaggccatcctgcagcaagccagattggcactgcggggaccacccggtcccatgggctacacaggccgaccgggacccctcggccagcccggatcgcctggactgaagggagaaagtggagatctgggtccccaggggccaagagggccacaaggtttaacaggcccaccagggaaagcaggaaggcggggtagagctggggctgacggggctcgaggaatgccaggggaccccggtgtgaagggggatagaggcttcgatgggcttcccggattgcctggggagaagggacaccggggagacacgggggctcaaggcctgcctggccctcctggcgaagacggggaacgaggcgatgacggcgagattggcccacgcggactcccaggggaatcagggccacggggactcctgggccctaaaggaccacctggcattccgggacccccaggagtgaggggcatggacggaccccagggccctaagggctctctgggtccgcaaggggagccaggccctcctggccagcaggggacccctggtacgcaggggctgcccggaccccagggggctattggccctcacggcgagaagggccctcaaggcaaaccgggactacctggtatgcctgggtctgacgggcctccaggacatccgggaaaggaagggccaccaggcacaaaaggaaatcagggaccttcgggtccccaaggtccgcttggataccctggaccaaggggagtgaagggggttgacggcattagggggttgaaggggcacaagggcgaaaaaggggaggatggattccccggttttaaaggcgatattggagtcaagggtgaccgcggagaggtcggcgtcccgggatctaggggggaggacggcccagagggtcccaaagggagaactggccctacaggcgatccgggacccccaggattgatgggagagaaaggaaaactcggcgtacctgggctacctgggtacccagggcgacaggggccaaagggatctcttgggtttccaggatttcccggagcatctggcgagaagggggcaagggggcttagcggaaaaagcggcccacgcggagagcggggtcccacaggacccagaggacaaaggggcccaaggggagccaccggcaaatcaggagcaaagggaactagcggcggagatggtccccatggaccccctggagaacggggtctaccaggtcctcagggccctaacggctttcctggccctaagggccctctgggcccacccggtaaagacgggctgcccggacacccgggacagcgaggtgaagtcggcttccaggggaagaccggccctcctggcccaccaggcgtggtaggccctcagggggctgcgggtgagaccggtcctatgggggagcggggacaccctggcccacccggtccccctggcgaacaaggcttacctggtactgccggtaaggaaggaaccaaaggtgaccctggaccccctggggcacccggtaaggacgggccagcagggctgcgaggattcccaggcgagaggggtctgccaggtactgctggaggaccaggccttaagggtaacgagggcccttcaggacctcctgggcctgcaggaagcccaggtgaaaggggtgccgcaggcagcggcggacctatcggaccccctggccgtccaggaccgcaaggcccaccgggtgcagccggtgaaaagggggtcccaggtgaaaaaggacctataggtcccacagggagggatggggttcaaggacccgtcggtctgcccggacccgctggccctcctggggtcgctggggaagacggggacaaaggggaggtcggggacccaggccagaaaggcacaaagggtaataagggggagcatggcccaccagggcctcccggacctatcgggcctgtgggccagcccggagccgctggagccgacggagagcctggtgctcgtggacctcaaggccattttggcgcaaagggggacgagggaacccggggttttaatggacctcctggcccaattgggcttcaaggcctgccaggcccatcaggcgagaagggggagacgggcgatgtgggtcctatgggcccacctggccctcccggtccccgtggaccagcaggaccaaacggagccgacggtccccaaggaccacccggaggagttgggaaccttggccctccaggggagaagggcgagcctggagaatcagggtcccccggaatccaaggcgagcctggcgtgaaggggcctcgaggggagagaggggaaaagggggaatcaggccagcctggtgaaccgggaccgcctggccctaaaggacctaccggagacgacggccctaaagggaacccgggtccggtgggattccctggcgacccagggccaccaggagaggggggtcctagaggtcaagatggagctaagggcgatagaggcgaggacggcgaacctggccagccaggaagtcccggacccaccggcgagaatggcccacctggacctctggggaaaagaggtccagctggatcccctggcagcgaggggcgacagggaggtaagggcgctaaaggggaccctggagcaattggtgccccaggcaagaccggcccagtaggcccagctgggccagcgggaaagccaggccctgatgggcttcgcggtctaccaggaagcgtggggcagcagggacgccctggagctacaggtcaggcaggtcccccagggccagtgggccctccgggactgcccggacttcggggagacgccggagctaaaggtgagaaggggcaccctggcctgattgggctcattggcccacctggtgaacaaggagagaagggagaccggggtctcccgggacctcagggctccccaggccagaaaggcgagatgggcatcccaggtgccagcgggccaataggccctggaggccctcctggactgcccggacctgccggacctaagggtgcaaaaggtgcgaccggccctgggggtccaaagggcgagaaaggagtccaggggcctccgggtcaccctggtcctcctggcgaggtgattcagccgctgcctattcagatgcctaagaagaccagacggtcagtcgatggtagcagattaatgcaggaggatgaggctatacccacgggaggcgcacccggaagtcctggaggactagaagagattttcggtagcctcgactccctgagggaagaaatcgaacagatgaggcgcccaacggggacgcaggactcacctgcacgaacttgccaggacttaaagctttgtcatccagagctgccagatggagagtactgggtggatccgaatcaagggtgtgctcgcgacgctttcagggtgttctgtaatttcacggcagggggtgaaacttgtgtaaccccgagagatgatgtaacccaattttcttacgtggattcggagggcagcccggtgggcgtggtccaacttacttttctcaggctgctgtcagtgtcagctcaccaagatgttagctatccctgttccggcgctgcaagggatggccctctgcgattgaggggagccaatgaagacgagctctcacctgaaacaagtccttatgtcaaagagtttagggacggctgccagacccaacaggggagaaccgtcctggaggtgcgtacacctgtcttggagcagctcccggtgctggatgctagcttcagcgatctgggggcaccccctcgtcgcggtggtgtcctcctgggcccagtgtgtttcatgggata

SEQ ID NO: 232621 - DNA, 5070 bp, Artificial Sequence
  derived and/or modified sequence
atggagagatgctcacgctgtcatagactgctgttgctgttacctctagtgctgggactgagcgcagccccaggttgggctggtgctcccccagtggatgtgctgcgtgcacttcggttcccctcacttccagacggggtgagacgagcaaagggtatatgtcccgctgacgttgcctacagggtggctagacctgcccaattatctgctcctacccgccagttgtttcccggtggctttcccaaggatttcagtctcctgactgtggttcgtacacgccctgggctccaggcccctctgcttacgctgtacagcgcacaaggagtgagacagctcggcttggagctgggaaggcctgtccggtttctgtacgaggaccagacaggcaggcctcagccgccatcacagcctgtattccgcggactgagcctggcggacggcaagtggcatagggttgctgtcgcagtgaaagggcagtcagttaccctgatcgttgattgcaagaaaagggttacacgaccgttacctagatccgctagacctgttctggacacacacggcgtgataatatttggcgcacggattctcgacgaggaggttttcgagggggatgtgcaggagttggccattgtgcctggagtgcaggccgcatacgagtcatgcgaacaaaaagaactggagtgcgaaggcggacagcgagagagaccccagaatcagcagccccatagggcgcaaaggtccccacaacagcagccaagtcgactgcatcgtccccagaatcaagaacctcagtcccaggagcaaactgacctgcaggtccctcccaccgccgacaggtttcaggctgaggagtatggtgagggtggtacagacccccctgaggggccatatgactacacttatgggtacggagatgattatagggaagagaccgagctgggacccgcactgtcggctgaaactgcacattccggggctgctgcccatgggccacggggtctcaagggcgaaaaaggcgagcccgcagtactcgagccaggaatgctggtcgaagggcctcctggcccagagggccctgcaggactgattggccctccaggaatccagggcaaccccggtcccgtcggcgaccccggagaaagaggaccccctggacgggctggcttgcctggctcagacggtgctcctgggccaccagggacatctctgatgttacccttcaggtttggatccgggggaggcgacaaaggtcccgtggtggccgctcaagaagcccaagcccaggccattctccagcaggcgagacttgctctccgcggtcctccaggccctatgggttacaccgggaggcccggtcccctcggacagcctgggagcccgggtctaaagggagagagcggcgatctcggaccacagggtcctagaggccctcaaggcttgacaggacctccgggaaaggctgggcgaagaggacgcgcaggagcagatggcgctcggggaatgcctggagatccaggggtcaaaggcgataggggattcgatggtctcccaggattaccaggagagaagggacacagaggcgacaccggcgcacagggcctgccagggccacctggagaagacggcgagaggggagacgacggcgagataggcccacgaggcctgccgggtgaatcagggccaagaggactgctgggtcccaagggcccaccgggaataccaggacctcccggtgtaagagggatggacgggcctcagggaccgaagggatctctcggccctcagggagaacctgggccaccaggtcagcaaggtactcccggaacccagggtctgcccggtcctcagggcgctattggcccacatggcgaaaaaggacctcagggcaaaccgggactccctgggatgcctggttctgacggcccacctggccaccccggtaaggaaggcccaccaggcacaaagggtaaccaaggcccatctggtcctcaggggcctctggggtatccaggccctaggggagtgaagggggttgatggtataagaggtctgaagggccacaagggggaaaaaggggaggatggatttcctggttttaagggcgacatcggtgtcaaaggggacagaggagaagtgggtgtgccagggtcccgaggcgaggatggacccgaggggccaaagggacggacagggcctacaggagaccctggaccaccaggcctgatgggggaaaagggtaaactaggcgtgccgggtctgcccggatatcccggtcggcagggacctaagggcagtctcggattccctggcttcccaggagcctccggagagaaaggggcaaggggactgagcggcaaatccggtccacggggagaacgcggacccaccgggccacgaggccaaaggggccctagaggcgctacgggcaagagtggcgcaaagggaaccagcggcggtgacgggcctcacggacctccaggtgaaagaggtctgcctggaccccagggacctaacggctttccaggccctaaagggccaccaggccctccaggcaaagatggcttacccggacaccccggacagagaggcgaagtcgggttccagggaaaaacgggacctcctggacctcccggtgtggttggcccacagggcgctgccggtgagactggacccatgggtgagcggggacaccctggaccaccgggtcccccaggagaacaggggctgcccggaacggcaggaaaggagggaaccaagggagacccaggtccccctggagcccctggcaaggacggccctgcaggcctgcggggatttcctggcgagagaggactgcccggaactgcagggggacccggattaaaaggcaatgagggcccttccggccctcccggacctgccggatcacctggggagagaggcgcagccggaagcggaggaccaatcggtcccccaggccgaccagggcctcagggtccacctggagccgcaggcgaaaagggtgtcccgggtgaaaaaggcccaatcggacctaccggacgggatggagtccagggtccagtagggctccctggtcctgctgggcctcccggagtggctggcgaggatggtgacaaaggggaggtcggcgaccccggacagaaggggacaaagggcaataagggggagcacggacccccagggcctccgggacctatcggccctgtcggacagcctggagccgctggggcagacggcgagccgggagcacggggtccccagggtcattttggggctaagggtgacgagggtacccgcggattcaacggccctcccggacctataggcttgcagggccttcctgggccaagcggcgaaaaaggtgaaacaggcgacgtcggtcccatgggccctccaggcccaccaggacctcggggtcccgctggaccaaacggcgcagacggtcctcagggaccacccggaggcgttggcaacctgggcccacctggcgagaaaggtgagccaggggagtcaggcagtcccggaattcagggcgaacctggcgtcaagggtcccagaggggagcgcggtgagaaaggggaatctgggcagccgggagaacctgggccacctgggcctaagggtcccacgggggacgatggcccaaagggaaacccaggacccgttggctttcccggagatccaggccctcctggagagggaggacccagaggccaggatggagccaagggagacaggggtgaagatggagaaccaggtcaacctggatcccccggtcctactggtgagaacggccctcccggaccgttaggcaagagagggccagccggatccccgggatcagaaggcaggcagggtgggaaaggagcaaaaggcgacccaggggctataggagcgccagggaagacgggcccagtggggcctgccggacccgctggcaagccaggcccagatggtcttcggggactacctgggagtgtaggacagcagggcagacctggcgcaacgggccaggctgggccacccggaccggtaggaccgcctggcctcccaggtctgaggggtgacgcgggagccaaaggtgaaaagggccaccctggactgatcggtctaattgggccaccgggagagcagggcgagaagggcgacaggggcctgcccggtccccagggatcccctggccaaaagggcgagatgggtattcccggtgctagtgggcctattggacccggaggcccacctggactgcccggtcccgcagggcctaagggagccaaaggagccacaggtcccggtgggcctaagggcgagaagggggtgcaggggcctccaggacaccctggaccacctggagaagtgatccagcccctgccaatccaaatgccaaagaagactcggagaagtgtagatggcagcagactgatgcaggaagacgaagccatccctacaggcggagccccaggtagccctggcggattggaagaaatattcgggagcctggacagcctgcgtgaagaaatcgagcagatgcggcgaccaacaggtacacaggactcgccagcaaggacgtgccaggaccttaaactgtgccatccagaactccctgacggcgagtactgggtggaccccaatcaggggtgtgccagagatgcctttcgggtgttctgtaattttaccgccggaggtgagacctgtgttacccccagggacgatgtcacgcagttctcctacgtggactctgaagggagccccgtgggggttgtgcagcttacatttttaagactgctgtccgtgtccgcacatcaggacgtctcgtacccatgctccggggcagccagggatgggcctctacgcctcaggggagcgaacgaagacgagctgagtccagagacttcaccatacgttaaggaattccgagatgggtgtcaaacacagcagggcagaaccgttttggaggttcggacaccagtcctggagcaactacctgtgctcgatgccagcttcagcgatctgggggcaccacctcgcaggggtggcgtcctactcggaccggtgtgtttcatgggctaa

SEQ ID NO: 232622 - DNA, 5210 bp, Artificial Sequence
  derived and/or modified sequence
atggagaggtgttcccgatgtcaccggctgcttcttctgctcccgctagtgttggggttgtccgccgcacccggatgggctggtgccccaccagtggacgtattgagggccttgagattcccaagccttccagatggcgtccggagggctaaaggcatctgtcctgccgacgtggcttaccgggttgcgaggccggcacagctcagtgcacccacgcggcagctgttcccgggaggattcccgaaagacttttctctcctcactgtggtgagaacgagaccaggactgcaggcccctttgttgaccctctactcagcacagggtgttagacagctgggcttggagctggggcctcccgtgaggtttctgtacgaggaccaaaccgggaggccacagccaccgtctcagccggtgttcaggggcttgagcctggccgacggcaaatggcacagggttgcagttgctgttaaagggcaatctgtgaccctcattgttgactgcaagaagagggttactaggcctcttcctagatccgccagacccgtgctggacactcacggggttatcatttttggcgcacgaattctggatgaagaagtgttcgagggtgacgtccaagaattggctatcgtcccaggagtgcaagcagcttatgagtcctgtgaacaaaaggaactagagtgtgaagggggacagcgagaacggccacaaaaccagcaacctcatcgtgcccagagaagcccccaacagcagccgagccgactgcacagacctcagaaccaggagccacagtcccagcccacagagtccctttattacgattataaacccccttattatgacgtaatgactacaggcacaaccccggactatcaggatccaacccccggtgaagaagaggagattttggaatcaagtttgctgccacccctcgaggaggagcagacagacttacaagtcccaccaactgcggaccgatttcaggcggaagaatacggcgagggcggaactgatccgccagagggcccttacgactatacttatggatacggagatgactaccgggaagagaccgagctgggacccgctctatctgctgaaaccgcccattccggagccgctgcccatggcccaaggggactgaaaggtgagaagggcgaacctgcggttctcgaacctgggatgcttgtggagggtccacccggaccagagggccctgcagggctcattgggcctcctggaatccagggaaatcctggcccagtcggggaccccggtgaacgcggtccccctggcagggcaggtctgccaggttccgatggagcacccggacccccagggacatccctgatgttgccctttagatttggcagtggcggaggcgacaagggcccagtggtcgccgctcaggaagcccaggctcaagcaattctccagcaggcacggctcgccctgcggggtcctccagggcctatgggctacacggggaggcccggacccctgggccagcctggctcacccggactgaagggggaatctggagacctgggcccacaaggtccacgtggaccacaaggtttgaccggcccacccggaaaggcaggcagacggggaagggccggtgccgacggtgccagaggtatgccgggagacccaggcgtgaaaggagatcgcggtttcgatggcctcccagggttaccaggcgaaaagggccatagaggcgatacaggagctcagggcctacccggtcctcccggagaagacggcgagcgtggcgacgatggtgaaataggacctcgaggattgcctggggagtcaggcccacgtggcctgctgggacctaagggcccaccgggaatcccaggccctcccggagtgaggggaatggacggccctcaggggcctaagggctcattagggcctcagggagaacctgggcctcccggacagcagggaactccaggcactcaaggtttgcccggaccacagggggctatcggcccacatggcgaaaagggtccccagggcaagccaggccttccagggatgcccggatccgacggtcccccaggtcaccccggaaaggaaggacctcctggaacaaaaggaaatcagggtccatcaggaccccagggacccttgggctacccagggcctaggggggtcaaaggggttgatggaattagaggactcaaaggccacaaaggcgagaaaggcgaagacgggttcccgggatttaagggcgacattggagtcaaaggcgacagaggcgaggtcggggtccctgggtcgaggggggaagacggacctgagggccctaaaggccgaaccggcccaaccggagatcccggaccacctgggttaatgggtgagaagggaaaactgggggtacccggtcttcctgggtacccagggcgtcaggggcctaaggggtccctgggatttcctggatttcccggagcatccggggaaaaaggggcaagaggtctcagtgggaagtctggaccccgaggagagcgcggaccgaccggccctcgcggacaacgcggaccacggggagctactggcaaatctggggcaaaagggacaagtggcggagatggaccacacggcccaccaggcgagcggggacttcccggaccacagggcccaaacggctttcccggacctaaaggtcccccagggcctcctggaaaggacggcctcccgggacacccaggccagcggggtgaggtcgggttccagggtaagaccgggcctccaggcccaccaggagtggtcggaccccagggcgcagcgggagaaaccggacccatgggggagagaggccatcctggccctcctggccctccaggtgagcaagggctgcccggaaccgccggaaaggagggcaccaaaggtgatccaggaccgccaggcgcacctggcaaagatgggccagcaggactgcgcggtttccctggggaaaggggcctaccaggcacagcaggcggacctgggctgaagggcaatgaaggaccttctggaccccctgggccagcgggatcacccggagagcgcggagcggctggaagtgggggtccaattgggccacctggaagaccaggaccccagggaccgccaggagccgcaggagagaagggtgtaccgggagagaagggtccaatcggcccaactgggagggatggtgtgcagggacccgtaggtcttccgggacccgctggccctcctggggtggctggcgaggacggggacaagggggaagttggagaccctggccagaagggaacaaaaggcaataagggagagcacggtccccctggtccccctgggcctataggtcccgtcggccagccaggcgcagccggtgctgatggagaaccaggagctagaggcccacagggacactttggagctaagggcgatgaagggacccgcggatttaacgggcctccaggcccaatagggctgcaaggtctacctggaccctctggagagaaaggtgagaccggagatgtgggcccaatgggcccaccaggacccccaggccctaggggacccgcaggcccaaatggcgcagatggccctcaaggccctccaggtggggttggtaatctggggcctccgggagagaagggggaacccggagagagtgggtcccccggtattcagggcgagcccggtgttaaagggccacgcggagaaaggggggagaagggcgagtctggacagccgggagagccgggaccaccaggccctaagggaccgaccggggacgatggaccaaaagggaacccgggtccagtggggttcccaggcgacccgggaccacccggagaaggcggtcccagaggtcaagacggagccaaaggagaccggggtgaggatggagagcccggacagcctggctccccgggtccaacgggtgaaaacggcccacctggccctcttggaaaaagaggcccagccggatcccccggtagcgagggtaggcagggcggaaaaggggcaaagggtgaccccggtgctattggcgctcccggaaaaacaggccctgtgggaccggctgggccagcagggaagccagggcctgatggactgcgaggcttgccaggtagcgtgggacagcaggggcgaccaggggcaactggtcaggccggtccccctggacccgtaggccctcccggactgcctggcctacggggagacgctggagcgaaaggtgaaaagggccaccccggactgataggactaatagggcctcctggtgaacagggcgaaaagggggatcgcggactgccaggcccacagggcagtccaggacagaagggcgaaatgggcattcctggtgctagtggccctatcggacctgggggtcctccaggtcttcctggacccgcaggcccaaagggagcaaaaggagcaacaggcccaggcggaccaaaaggtgagaagggcgtgcaaggcccacccggacaccctggcccacccggtgaggtgatacagcctcttccaatccagatgccgaaaaagactcgtaggtcagtggatgggagccgactgatgcaggaagatgaggcaatacccaccgggggagccccaggatcacctgggggacttgaggaaatttttggttcactggatagcctgcgagaggagatcgaacagatgagaagacccactggaacacaggatagccctgccaggacatgccaggacctgaaattatgtcacccagagttgcccgatggcgaatattgggtggaccctaaccaaggatgcgcaagagatgcgttccgagtgttttgtaactttacagcgggtggcgagacgtgcgtgaccccgagagacgatgtcacacagttcagctacgttgatagcgagggttctcctgtgggcgtggttcagctcaccttcctgagacttttgtcagtgtctgctcaccaggacgtgtcatatccctgttcaggtgctgctcgcgacggtcccttgcgtctgaggggcgctaatgaggatgaactttcgccagaaaccagtccatacgttaaagagttcagggacgggtgtcaaacccagcaggggaggactgtgctggaggtaaggactcctgttctggagcagctgcctgtgctggatgcaagcttttccgacctcggcgctccaccccgtaggggaggagtgcttctcggtccagtgtgtttcatgggtta

SEQ ID NO: 232623 - DNA, 5147 bp, Artificial Sequence
  derived and/or modified sequence
atggagcggtgctctcgatgtcataggctcctactgctgcttcccctggtcttaggcctgtctgcagcccctggttgggccggagcccctcctgttgacgtactgagagctctgcgcttccctagtcttcccgacggggtgcggcgagccaagggcatctgtccagctgatgtggcctatagggtcgccagaccggctcagcttagtgccccaactcgacagctctttcctgggggattccctaaggatttctcattgctgacagtggtgcggaccaggcccggtctgcaggcacccctgctcacgctatattcagctcaaggagtgcggcagctcgggctcgagctcggacgcccagtgcgctttttatatgaggaccagacaggaaggccccaaccaccatcacagccggtttttcggggattaagcctggctgatggaaagtggcaccgcgttgcagtcgcagttaaaggccaaagcgtgactctcattgtggactgcaagaagcgagtaactcgccctctccctagaagcgctcggcctgtgcttgatacccacggagtcattattttcggagcaagaattctggatgaggaagttttcgaaggggatgtccaggagctagcaattgtccccggagtacaggccgcatatgaatcttgtgagcagaaagagctcgagtgtgaaggaggccagcgggagcgtccacagaaccagcagccccaccgagcccagcgcagcccacaacagcagccaagcaggctccatcgtccccaaaatcaggaaccacaatctcagcccacggaatccctgtactacgattacgagcccccttactatgacgtgatgacaactggcacgacccccgactaccaggaacagactgatctacaggtcccgccaactgccgaccggtttcaggccgaggaatacggcgagggtgggaccgacccacccgagggtccttacgactacacctatggctacggagatgattaccgagaggaaaccgagctggggccagccctgtcagccgagactgcccattccggagcggctgcccatggtccgagggggcttaaaggagagaagggggaacccgcagttttggagcctggaatgctggtcgagggtcctcctgggccagaaggcccagccggactaatcggccctcccggaatccagggcaaccccggtcccgtcggcgatccgggagagagagggccacctggtcgggctggtctcccaggaagtgacggggcaccaggtccacccggaacttctctgatgctgccctttcgcttcggttccgggggaggtgataaaggtcccgttgtcgctgcacaagaagctcaagcccaggcgatattacagcaagcgagactagccctgcgcggtccacccggtccaatgggttatactggcagacctgggcctctggggcagcctggatcaccgggactgaagggagagagtggggacctcggtcctcaggggccacgtggcccacaggggctcactggtccacctggcaaagctggtcggaggggcagagccggagccgatggggctcgtggtatgcctggtgatcctggagtgaaaggagataggggtttcgatggattgccaggattacccggtgaaaaaggccaccggggtgacaccggcgcacaagggctccccggacctccaggagaagacggcgaacgtggggatgacggtgaaataggccctcgcggactgcctggcgagtcagggcctagggggctgctggggcctaagggcccaccaggaatacctggacctcccggtgttcgaggcatggatgggcctcaaggaccaaaggggtccctgggaccacaaggagaacctggcccaccaggccagcagggcactcctggcacccaaggcctgccgggaccccagggcgcaatcggccctcacggtgaaaaaggaccccaagggaaacccggactgccaggaatgcccggatccgatggcccacccggacaccccggtaaggaggggccacctggcaccaaaggcaaccagggtccctctggccctcagggcccattaggctacccgggacctaggggtgtgaagggagttgatgggattcgaggcctcaagggacacaaaggcgagaaaggcgaagatggttttcccggattcaaaggcgacatcggcgttaaaggcgatcgaggcgaagtgggtgttcccggaagtcgtggggaggatggtcccgagggacctaaaggcaggactggtccaaccggtgaccctggtcctcctgggttgatgggtgaaaaggggaaactaggcgtgccgggtttgcctgggtatcccggaagacagggaccaaaaggctctttaggcttcccaggcttcccaggcgcaagcggtgaaaaaggcgctcggggattgtcgggtaagtccgggcctcggggtgagaggggaccgactggacctcgtggccagcgaggccctagaggggcaaccggcaaatcgggagcaaagggaacaagcgggggagatggcccacacggccctcccggagagcggggacttccagggcctcagggccctaacggctttcccggtcctaaagggccaccgggaccacctggaaaggatgggttgcccggacaccccggacagaggggtgaagtcggatttcagggaaagaccggccctcctggcccacccggagtggtcggaccccaaggcgctgctggcgagaccggacccatgggcgaacgcggacacccagggccacccggaccccctggagagcaagggctgcccggaacagctggcaaggagggtaccaagggcgaccctggccctccgggagccccaggaaaagatggcccagctggtctcaggggcttcccaggagagagaggcctgcccggtactgcaggcggtcccggactcaagggcaacgagggcccttctgggccaccaggacccgctggtagtcctggcgaaaggggcgcagcgggaagcggtgggccaattggtccgccagggaggcctggtcctcaaggccctccaggggcagctggagaaaaaggggtgcctggcgagaagggcccaatcggccctactggacgggacggcgtgcaggggcctgtagggctgcccggtccagccggaccgccaggtgtggctggcgaagatggagataaaggcgaggtgggtgaccccggacaaaaaggaaccaaagggaacaagggggagcacggtcccccagggccacctggccctattggtccagtcggacaacccggagccgctggcgcagacggcgagcctggtgccagggggcctcaagggcacttcggggctaagggggacgaaggaacaaggggatttaacggaccccctggcccaattggccttcaggggctgcctggccctagtggggagaagggcgagacgggagatgtgggcccaatgggcccacccggtcccccaggtccacggggaccagctggcccaaatggagctgatggaccacagggaccaccagggggtgttggaaacctgggccctcccggagaaaagggagaacctggagaaagtggctcccctgggatccaaggagagcctggcgttaagggcccacgcggagagcgtggagagaaaggcgagtctggccagcctggcgagccaggacccccaggacctaaaggaccaacgggggacgacggccctaaaggaaatccaggccctgttggatttccaggggaccctggccctcctggagaggggggacctcgtggtcaggatggcgctaagggcgatcggggtgaggatggtgagcctgggcagcccggaagtccaggtccgactggtgaaaatggccctcccggaccccttggaaaacgagggcctgccggtagcccaggctccgagggcaggcaaggcggaaagggtgccaagggagatccaggcgctattggggctcctggcaaaaccgggcctgtgggtcccgcagggccagcaggaaagcctgggcctgatggcctcagggggctacccggttcagtgggacagcagggacgcccaggcgctacagggcaggctggaccccctggtcccgtcgggccacccggtctgcctggcttacgcggagacgctggggctaaaggagagaaaggacatcccggtctgatcggactcatcggacccccaggcgagcagggcgagaaaggcgatagaggattacctgggcctcagggaagccccggtcaaaaaggcgagatggggatccctggcgcttctggccctatcgggcctgggggtccacccggactgcccggacctgccggtccaaaaggggctaagggggctaccggacctggcggaccgaaaggagaaaaaggggtacagggtcctcctggccatcctggcccaccaggagaagtgatccagcctctgccaatccagatgcctaaaaagacccgccgtagtgttgacggaagtcggttaatgcaagaggatgaagccatcccaaccggcggagcaccgggaagtcctggcggattagaagagatattcggaagcctggattcgctccgtgaggagattgagcagatgcgtcgccctacaggcactcaggacagcccagccagaacttgccaggaccttaaactatgccacccagagcttcccgatggtgaatattgggtggatcccaaccagggctgcgctcgcgacgcttttcgggtgttctgcaatttcacagcagggggtgaaacatgtgtgacccctcgggacgacgtgacacagttttcttatgttgattccgaaggcagcccggtgggtgtggtgcagttgacattccttcgccttcttagtgtgtccgcacaccaggacgtcagctacccatgttccggggctgccagagatggacccctgaggttgagaggggctaatgaagacgaattaagtcccgagacgtctccgtacgtcaaagaatttcgagatggttgccagacccagcagggcagaaccgtgctggaagtgagaaccccggtgcttgaacaattacccgtgcttgacgcatcttttagcgatctgggagctccgccacggagggggggagtgctcttggggcctgtatgttttatgggata

SEQ ID NO: 232624 - DNA, 5210 bp, Artificial Sequence
  derived and/or modified sequence
atggagcggtgctcaaggtgtcatcgcctgctcctgctgctacctctggtcttaggactgagcgctgctcccggttgggctggcgctcccccagtcgacgttctcagagctctcaggttcccttccctgcctgacggcgtgagacgggctaaggggatctgtcccgctgacgtcgcgtaccgcgtcgcaaggcccgctcaactgtcagcccctaccaggcagctgtttccgggagggtttccaaaggacttcagtctcctaaccgtggtacggactcgccctgggctccaggccccactgctgacactatactctgctcaaggtgtccgccagctcggcctggagctagggcgacctgtacggttcctttatgaggatcagaccggcaggcctcagccgccatcccagcccgtgttccgtgggctctccctggcggatgggaagtggcaccgcgtggccgtggctgtaaaagggcagtctgtgactttaatagtggactgcaaaaagagagtgacaaggccattacccaggtctgcacgccctgtgcttgatacccacggagtcataattttcggcgcacgcatcctggatgaagaagtttttgagggtgacgtgcaggaactggctatcgtgccaggagtgcaggccgcttatgaatcctgtgaacagaaggagctcgagtgcgaaggaggacagagagagcgccctcagaaccagcagcctcaccgcgctcagcgctcaccacagcagcagccgagccgcctacaccgcccacagaaccaggagccacagtcacagcccaccgaatctttatactatgattacgaacccccttactatgatgtcatgacaacagggaccacgcccgactatcaggatccaacccccggtgaggaggaggagattctggaatcatctttattgccacctctcgaggaagaacagacagacctccaggtgccccctacggcggacagatttcaggccgaggaatacggggaaggcggaaccgatcctcccgagggcccttatgactatacctatggctacggagatgattacagggaggagactgagctgggacccgctctctccgctgaaaccgctcattcgggagccgctgctcacggaccacgaggattaaaaggtgaaaagggagagccagccgtgttagagcctgggatgctggtggaaggccctccaggcccagaggggccagccggactgatcggaccacctggcattcaaggaaaccccggacccgtgggggaccctggcgagagagggccacccggtcgcgctggtctgcctggctccgacggtgcccctggaccacctggcacctccctgatgctcccttttcgctttgggagcggtgggggtgacaaaggccctgttgtggctgcccaggaggcgcaggcacaagcgatcctgcagcaagctagactcgctcttagagggcctcctgggccaatggggtacaccgggagacccggaccgctcggacagcctggttcacctggactgaaaggcgaatctggagatcttggtccacaaggcccaagaggccctcagggcttgacgggcccaccaggcaaagccggaaggaggggccgtgcgggagccgatggcgcaaggggcatgcccggtgaccctggggtcaagggtgatagaggcttcgacgggctgcctgggctgcctggtgaaaagggccatagaggtgacaccggggctcagggcctgccgggacctccaggcgaagatggcgagcgcggagatgatggggagattggccctcgaggcctgcctggcgagtccgggccacggggactgctgggccctaaggggcctcccggaattccaggcccacctggtgtaagaggaatggacggcccacagggcccaaaaggatcactcggaccccagggcgagcctggcccaccagggcagcaggggactcctggaactcaggggcttcccggtcctcagggtgctatcggtccccatggcgagaagggaccacagggtaagcccggtctgccaggtatgccaggcagcgacggaccgcctgggcatccagggaaggaaggccctcccggtaccaaaggtaatcaggggccaagcggtccacagggtcctctcgggtatcccggacccagaggggtgaagggggtagatgggatccgaggtctcaaaggccacaagggggagaaaggcgaggatggctttccagggtttaagggcgatattggtgtgaagggtgaccgaggggaagtgggcgtgccaggtagcaggggtgaagatgggccagagggacctaagggtcgtacgggaccaaccggggaccccggaccgcctggcctcatgggggagaaagggaaactgggtgtgcccggtctgccgggttacccgggacgccagggccctaaagggagcctgggcttcccaggcttccccggagccagtggagagaagggcgctcggggtttgagcggaaagagcggaccacgcggtgaacgcggacccactgggcctagaggtcagcgcggtccacggggagctactgggaagagtggtgctaaaggtacctcaggaggcgatggtcctcacgggccacctggggagcggggactgccaggaccccagggtccaaatgggttccccggacccaagggcccacccggaccccctggcaaagatggcttaccagggcatccgggtcagcgtggagaggtagggtttcaagggaagacgggccctcccggacctcctggcgtcgttgggcctcagggtgctgccggagaaacaggacccatgggagaaaggggccacccagggccaccgggtcccccaggcgagcagggcctccctggaacggctggtaaggaggggactaaaggtgacccgggtccccctggggctccgggaaaagacggaccagctggtttgcgtgggtttcctggggaacggggactgcctggcactgcaggaggtcccggtctcaaaggaaatgaggggccttctggtccgccaggacctgcaggttcccctggagagcggggtgctgcagggagtggcggaccaatcggtccccctggcaggcctggccctcaggggcctcctggtgccgctggcgagaaaggggtaccaggagagaagggacccataggtcccaccgggcgagatggtgtgcagggccctgtgggtttgccaggccctgctggaccaccaggcgtcgccggagaggacggcgataagggggaagtgggggatccagggcagaaagggactaaaggtaataagggtgagcatggcccacctgggccaccaggccctatcgggccagttggacaacccggagctgccggagcagatggggagccaggtgcaagaggccctcagggccacttcggcgcaaaaggggacgagggaacgcgtggatttaatggtcccccaggcccaatcggacttcagggactgcctggcccttccggagagaagggcgaaaccggagacgtcggtcccatgggccctcctgggcctcccggacctaggggccctgccggaccaaatggcgcagacggccctcagggcccacccggaggggtgggcaacctgggaccacctggggaaaagggtgaacccggagaatcaggctcccctggcatacaaggagagcctggagtgaaaggaccccgaggcgaaaggggcgagaagggtgaaagcggacaacccggtgagccaggtcctccaggacccaaaggccctactggtgacgatggaccaaagggtaacccgggaccagtcggctttcccggtgatccaggccctccaggcgaaggaggccctcgaggacaggatggagccaaaggcgatcggggagaggacggcgagccgggacagcccggatccccaggcccaacaggggagaacgggcctcctgggccactgggaaaacggggtcctgcgggaagcccgggtagcgaaggacggcagggcggaaagggcgctaagggagaccctggcgcaattggagcccctggcaagaccggaccagtgggtcctgcgggtccagcgggaaagcctggacccgatggactcaggggcctgcctggcagcgtcgggcaacaagggaggccaggagccacgggccaggccggacccccaggtcctgttgggccaccaggcttacctggcttgcggggagatgccggtgcaaagggcgaaaaaggccaccctgggctaatagggctgattgggcctccaggtgagcagggcgaaaagggggaccggggtctgccaggcccacagggaagtcccggtcagaagggggaaatgggcattcctggcgcatccggtccaatcggtccgggagggcctccgggactgcccggtcccgctggaccgaaaggtgcaaagggagccactgggcctgggggtcccaaaggcgagaaaggcgtgcaggggccacctggccatcccggaccaccgggtgaggttattcagcctctgcctatccagatgcctaaaaaaacacgaagatccgtcgacggctcacgcctgatgcaagaggacgaagctattcctacgggcggagcacctggctcccccggagggttggaggagatcttcgggtcgctggattcattgagagaagagattgagcagatgcgtaggccgaccggtacacaggattctcctgccagaacttgtcaggacctgaagttgtgccatccagaactgccagacggcgagtactgggttgacccgaaccagggttgcgctcgcgacgcctttcgcgtattttgtaattttacagcaggtggagagacctgcgtcactcctcgagacgacgtaacccagtttagctacgtcgacagtgagggatcaccggttggggtggtgcaactgacctttctcagactcctcagcgtgagcgctcaccaggacgtctcatacccatgttcaggcgctgcccgtgacgggccactgcgattacgtggagctaacgaggacgagctttcccctgaaacgagcccatatgtcaaggaattcagggatgggtgtcagactcagcagggccgaactgtgctggaggtgcgcacccccgtgttggaacaactccctgtgctcgacgctagttttagcgacttaggcgctcccccacgcagaggaggcgtgctcctggggcctgtttgcttcatgggata

SEQ ID NO: 232625 - DNA, 5069 bp, Artificial Sequence
  derived and/or modified sequence
atggagcgatgtagccgctgccatcggctcctgcttctactcccgctcgtgctggggctttctgctgccccaggctgggcaggggctccgcctgtggacgtgctcagggcactgcggtttccttccctgcccgatggtgtgcgcagggcaaagggcatatgtcctgccgacgttgcataccgagtggcaaggcctgctcagctgagcgctcctacacggcagctcttccctggtggtttccccaaagacttctccttgttgaccgtggtgcggactcgtcctggcttgcaggccccactactgacactgtactcggctcaaggagtgagacagctgggcctagagcttgggaggcccgttaggtttctgtatgaggatcaaacaggcaggcctcagccaccaagccagccagtgtttcgcggactgtcactggcagatggaaagtggcacagggtagcagtggccgtcaaagggcagtctgtcaccctcattgttgactgtaagaagcgagtcacgagaccactgccccgttctgccaggcctgtcttagatacccacggtgtgatcattttcggggcaaggattcttgatgaagaagtctttgaaggtgatgtgcaggagttagctatcgtgccaggagtgcaagccgcttacgaaagctgcgagcaaaaggagctagaatgcgaaggaggtcaacgagagcggcctcagaatcaacaacctcatcgcgcacagcgctcacctcagcagcagcctagcagacttcatcgcccacagaaccaggagccacagagccaggagcagacagatcttcaggttcctcccaccgctgacaggttccaggcggaagagtacggagagggcggaactgaccctcctgaggggccttacgattatacctacggatatggcgatgattatcgggaagaaaccgagctagggcctgccctgtctgctgaaactgcccactctggggcagctgcccacgggcctcgagggctgaagggggagaagggagaaccagctgtcttggaacctggtatgctggtcgagggtccccctgggccagaaggaccagccggtctgatcggccctcctggaatccagggcaacccaggcccagttggcgaccccggtgaacgtggtccaccgggaagggccggactgcccggaagtgatggggctccaggaccgccaggcaccagcctaatgctccccttccggttcggatctggcggtggagacaaaggacctgtcgtggctgcacaagaggcccaagcccaggctattctgcagcaggctcgccttgccctgcggggaccaccaggccctatgggctacacgggcagacctggccctcttggccagccagggagtccaggcctgaaaggtgaaagtggcgaccttggtcctcagggaccaagggggcctcaaggcctgactggacctcctgggaaagctggccgacgcggtcgtgccggagcagatggggctcgcggtatgcctggcgacccaggcgttaaaggggaccggggatttgacggcctgcccggactcccgggtgaaaagggtcaccgcggagacaccggcgctcagggtttgccgggacctccgggagaagatggggagaggggggacgacggcgaaatagggccaagaggtctgcccggtgagtcaggacccaggggcttacttgggcctaaggggcctcctggcattcctggtccacctggggttcgcggtatggacggccctcaggggccaaaagggagcctggggcctcagggagagcctggaccccctggtcagcagggcactcccggtacccaaggcttacctggtccccagggggctatcgggcctcacggcgagaaaggaccgcagggaaaacccggattacctggcatgccaggttcagacggccctcctggccaccctggcaaagagggtcctccaggaacgaagggcaaccaaggacctagcggccctcaaggaccattgggttacccaggaccgagaggcgtgaagggagtggatggcatccggggtctcaaaggacacaaaggcgaaaagggggaggacggctttcctggctttaagggtgatatcggcgtcaagggcgacaggggtgaagtcggagtgcccggatctcgaggggaggatgggcctgaagggcctaagggcagaaccggtccaaccggagacccgggacctcctggtttaatgggagagaaaggcaaattgggcgtgcctggactgcctggctatcccggacgtcagggtccgaaagggagcttggggtttccagggttcccgggagcttctggagaaaaaggtgccaggggtctgtctgggaaatctggacctagaggcgagcggggtcccaccggtcctcgcggacagcggggtcctcggggtgcaacagggaagtctggagccaaggggactagcggcggtgacggccctcatggacctccaggagagaggggacttcccggtcctcagggtcccaacggttttcctggacctaagggcccaccaggtcccccaggaaaggacgggctacccggtcaccctggccagagaggggaggtcggattccagggaaagacaggacccccaggaccaccaggtgtggttggccctcagggtgccgctggagagactggcccaatgggagagcgcggtcaccccggtccacctggaccacccggagagcagggacttcctggaacagccggaaaagagggtaccaagggagatcctggtcctccaggtgccccaggaaaagacgggccagctggactgagaggcttccctggcgagcgaggattgccaggtactgccggtggccctggactcaagggcaacgaagggccaagcggtccgcctggacctgccggatctcctggggagcgaggtgctgcgggttccggaggacccatagggccaccgggtcgaccgggtccccaaggtccccctggggcagcaggtgagaagggggtgcctggcgaaaagggccctataggccctaccggaagggatggtgtacagggtcccgtgggcctgccaggcccagccggaccgcctggtgtagccggagaggatggagataagggagaagtgggcgatccagggcaaaagggcacaaagggcaataagggcgagcatggccctccgggtcctccagggccaattgggcctgtgggacaaccaggtgcagccggtgccgatggagagccgggagccagagggccacagggccatttcggggcaaaaggtgatgagggaaccagggggttcaacgggccacccggtccgataggcctgcagggcttgcccggacctagcggggagaaaggtgagacaggagatgtgggtcccatgggtccccctggaccacctgggcctcggggacctgcgggacctaacggggctgatgggcctcaggggcctccaggcggtgttggaaacctgggcccacccggagaaaagggggaacccggtgaatcagggtccccgggaattcagggcgaaccaggggttaagggccctaggggtgagagaggcgaaaaaggagaatccggccagccaggagagcctgggcctcccggaccgaaagggccaactggagacgatggcccaaaaggcaacccaggaccagtcggattcccgggagatcccggaccgcctggcgaaggtggaccccgtggccaagacggcgcaaagggagaccgaggggaggatggagaacctggacagccagggagccccggaccgaccggcgagaacggccctccgggaccactgggtaagcgcggaccggcagggtcgcccggtagtgaaggcagacagggcggtaagggggctaagggcgatccaggggcaatcggagcaccaggtaagactgggccagtgggtcccgcaggccctgcaggcaagcccggacctgacgggcttaggggtttgccaggatcagtaggacagcagggcagacccggagctaccggtcaggctggcccacccggacctgtgggaccgccaggcctgccaggcttgcggggagatgccggtgcaaagggtgaaaaaggccatcctgggctcattgggctgattggcccacccggagagcagggcgagaagggtgatagaggacttcccggaccacagggcagccccggacagaaaggggagatgggtatccccggagcttctggtcctatcggtccaggagggcctccagggctgcctggacccgcagggccaaaaggcgcaaagggggcaactgggccagggggacccaagggcgaaaagggcgttcaggggccacccggacaccctggaccaccaggtgaggtgatccaaccactacctatacaaatgcccaaaaaaacaaggcggagcgtcgacggatctaggctgatgcaggaggacgaggcaatccccactggcggtgctccaggcagtccagggggacttgaggagatatttggcagcctggactccctacgagaagaaatcgagcagatgaggcggcctaccgggacgcaagactcccctgcaagaacatgccaggatcttaagctctgtcaccccgaattacctgatggtgaatactgggtggatcccaatcagggctgtgcccgagacgcatttagagtattttgtaatttcactgcgggtggagaaacgtgcgtaaccccaagggatgatgtgacccagttctcctacgtagatagcgaggggagtcccgtgggggtcgtgcaattgaccttcttgaggcttctgtccgtgtctgctcaccaagacgtttcctacccgtgttctggagcagcgcgtgacggtcccctgaggctaagaggtgccaacgaggacgaactgtccccagaaacgagcccgtacgtcaaagagtttagggatggatgtcaaacacagcagggaagaaccgtgctggaagtgagaactcccgtgctggagcagttgcctgtgctcgacgcatccttctcagacctaggagctccccctaggaggggaggcgtcctacttggtcccgtgtgctttatgggata

SEQ ID NO: 232626 - DNA, 5132 bp, Artificial Sequence
  derived and/or modified sequence
atggaaagatgcagtaggtgccataggctattgttgctactgcctctcgttctagggttgtcagccgcaccaggctgggccggagcccctcccgtcgatgtcctgagagctcttcgtttcccctcactgccagatggtgtaagaagggccaagggcatatgtcctgccgatgtcgcttatcgagttgcccgtccagctcagctgagtgctcctacacgacagctattccccggaggattccctaaagatttttctttgctgactgtcgtgcgcaccaggcctggattacaggcaccacttttaaccctatattcggctcagggggtgaggcagttgggtcttgaactgggacgccctgtgcgttttttatacgaggaccagactggtaggcctcagcctccctcacagcctgtgtttcgtggcctttctctcgccgatgggaagtggcacagagtcgcagtagctgtgaaagggcagagtgtgaccttaatcgtcgattgtaagaaaagagtgacacgtccactgccacggagtgccagacccgtactagatactcacggcgttattatcttcggcgctcggattcttgacgaggaggttttcgagggggatgtccaggagctggccatcgtccccggagtccaggctgcctacgagagctgtgaacagaaagaactggagtgcgaggggggacagagggagagaccgcagaaccaacagccccatagagcccagcgcagtccgcagcaacagccctcacggttgcataggcctcagaaccaggaaccacagtcccaggaccccaccccgggagaggaggaagaaattctggaatcctcactgttgccccctctggaagaagaacagacagatctacaggttccccctacggcggataggttccaggctgaagagtacggcgagggagggaccgatccaccggagggcccatacgattatacttatggatacggagatgattatcgcgaggaaacggagttggggccagctctgagcgccgagaccgcccactctggagccgctgctcatggcccaagagggctgaagggggagaagggagaacctgctgtgctcgaacccggtatgctcgtggaaggccctcctggcccagagggccctgccggactgatcggaccacctggaatacagggaaatccaggtccagtaggtgacccaggagaacgaggcccacccggaagagcagggctgcctggctctgacggtgccccagggccaccagggacatcactcatgctgccctttcgcttcggttccggtggtggtgataaggggcctgtcgttgccgctcaggaagcccaggcccaggccatcctacagcaggccaggctggctcttagggggcctccaggccctatgggatataccggcagacctggcccactgggacagccagggagcccgggactcaaaggcgagtctggagaccttggaccccagggcccacggggaccacagggattaactggcccacctggaaaggccggacggagaggccgagccggtgccgacggagcacgaggcatgcccggtgatcctggtgtcaagggtgaccgaggattcgacggcttgccaggtttaccaggcgagaaagggcatcggggtgatacgggggcacaggggctacctgggcctcccggtgaggacggggaaaggggtgacgatggcgagatcggtccccgtggtctccccggtgagagtgggcctcggggacttcttgggcctaaagggcctcccggtatccctggaccaccaggcgtcagggggatggacggtccgcaaggacccaaaggctccctcggccctcagggtgagccaggaccaccaggccaacaggggacacccggtactcaggggctaccgggtccgcagggagccatcggccctcacggggaaaaaggcccacagggaaaacccggactgcctggcatgcccggttcagacggcccacccggacacccaggcaaagagggcccaccgggaaccaagggcaaccaggggccatcaggccctcaaggccctctcggctacccagggcctagaggagtcaaaggagtcgacggtatcaggggtttaaagggacataaaggtgaaaaaggcgaggatggtttccccggattcaaaggggacatcggagtgaaaggagaccgaggggaagtgggggttcctggctcacggggtgaggacggtccagagggccctaaaggacgaacgggcccaactggagaccctgggccacccggtctgatgggggaaaagggcaaactgggggtgccagggctcccaggataccccggacgtcagggaccaaaaggttccctaggtttccccggattcccaggcgctagtggcgagaaaggtgccagggggttgagtgggaagtccggcccacgcggagagcggggaccgactggtcccagggggcagagaggaccccgaggggctactggaaagtcaggcgcaaagggaacatccggcggagatggccctcacggaccaccgggagaaagggggctacccggtcctcagggccctaatgggtttcccggacccaaggggccaccaggtccaccgggaaaagatgggctgccaggacacccaggccagcgaggagaggtcggctttcaagggaagaccgggccaccgggaccaccaggtgtggtggggccacagggggcagccggagaaaccggaccaatgggtgagcgcggacatcctggtcctccagggccacccggtgagcagggcttgccaggaaccgcgggaaaagagggtaccaagggtgacccaggccctccaggagctccaggcaaggatggacctgcagggcttaggggatttcccggtgagcgtggcctaccaggcaccgcgggaggaccgggactgaagggtaatgaaggcccaagtggccctccaggacccgcaggctcgcccggagaacggggagctgcaggaagtggaggcccaataggccctcctggacgccctggcccacagggcccacccggagcggcaggagaaaagggagtccccggagaaaagggcccaattggtcctaccggcagagacggagtgcagggacctgtgggcctgcccggtcctgcaggcccacctggtgtcgccggagaggacggggataagggggaggtgggagatcccggacagaaaggaaccaaggggaataaaggcgaacacggcccaccaggacccccagggcctatcggccctgtgggtcagccaggcgcagcaggtgccgatggcgagccgggagcccgaggacctcagggacatttcggcgctaagggagacgaggggaccaggggattcaacggccctccaggccctattggcctgcagggactaccaggaccttccggggaaaaaggagagacaggcgacgtagggcctatgggccctccaggaccccctgggccaagaggtccagccggaccaaacggagctgacgggcctcagggacctcccggtggggtggggaatctcgggccaccaggagagaagggggagcctggagaatcaggttcccccggtattcagggcgaacctggggtcaaagggccaagaggagagagaggcgaaaaaggagaatccggtcagcctggggaacccggacctcctgggcctaagggtcccacaggcgacgacggcccaaagggcaacccgggtcctgtaggcttcccaggagatccaggaccacctggtgagggtggccctagaggccaggacggagcaaagggcgatcgcggtgaggatggcgagcctggacagcccggatcccccggtccaactggtgagaacggccctcctgggccactcgggaagagaggccctgctggcagtccagggtccgaagggagacaggggggaaagggagcgaagggagatcctggagcaatcggggctcctgggaagacagggcctgtgggacccgctgggccagccggaaaacccggaccagacgggcttagggggctgcccggtagcgtcggtcagcaaggcaggcctggcgcaacgggtcaggctggaccgcctggaccagtcgggccacccggtctaccagggctgaggggcgatgctggcgctaagggggaaaaaggacatccgggtctgattgggctcatcggtcctccaggcgagcaaggagagaaaggcgacagagggctgccaggcccacagggcagcccagggcagaaaggtgagatgggaattcctggagcgtctggaccgattggcccaggaggtccacctggccttccgggaccagccggacctaaaggagcaaaaggagccacaggtcccggagggcctaaaggcgagaagggtgtgcaaggaccccctgggcaccccggaccccctggggaggtgatccagcccctcccgattcagatgcccaagaagaccagacgctcggtcgacggcagcagactcatgcaggaagacgaggcaatccctacagggggagcgccaggaagtcctggaggtttagaagaaatctttggaagtttggatagcttgcgcgaagagatcgaacagatgagacgccctacaggcacacaagacagcccagcaaggacctgtcaggatctgaagctatgccatcctgaactaccggatggcgagtactgggtggaccctaatcagggctgcgcccgtgacgccttccgagtcttttgtaattttacggccggaggggaaacttgcgtcacccccagggatgatgttacgcagtttagctacgttgacagcgaggggtctcctgttggggtggttcagctgaccttcctgcggctgctgtctgtgagcgcacatcaggacgtctcgtacccctgcagcggggcagctcgagatggacctctgcgcctccggggagctaatgaggacgagctctcgcctgaaaccagcccctacgtaaaagagttccgcgacggctgccagacccaacagggtcggacagtactggaagtccggacgcctgtgctggagcagttgcctgtgctagacgctagtttctcagacctgggagcccctcccagaagggggggagtcttactgggccctgtttgctttatgggcta

SEQ ID NO: 232627 - DNA, 5148 bp, Artificial Sequence
  derived and/or modified sequence
atggagcgctgcagtcgttgccatagactgcttctccttttacccctggtactgggtttatctgcagccccaggttgggcaggagccccacctgtagatgtgctgagagccctcaggtttccttccctgcctgatggggtgcggcgagctaagggtatctgtcctgccgatgtggcgtacagagtggctcgccctgcccagctttcagctcctaccaggcagctgtttcctggagggttccctaaggatttttcactgttgaccgtcgttcgcactcgacccggattgcaagctcctttactgaccctgtattctgcccaaggggtaagacagctgggcctggaacttggacgcccagtcaggttcctgtacgaagaccagacaggtcggccacagccaccctcacagcctgtgttccgcggactaagtttggcggatgggaagtggcatagggtggctgtggcagtgaaaggacagtcagtgactttgatagtggactgcaaaaaacgcgtcactcgaccactgcccagaagcgcaaggcctgtccttgacacacacggagtgattatctttggcgcaaggatcttggatgaagaggtgtttgagggcgacgtgcaggaactggcaatcgtgcccggtgtgcaagctgcatacgagtcatgtgagcagaaagaactagaatgtgaaggtggacagcgggagaggcctcagaatcagcagcctcaccgcgctcagagatcaccacagcaacagcccagccgacttcatagaccacaaaatcaggagcctcagagccagcccactgaaagcttgtattatgattataaacctccatactacgatgtaatgacaacaggcacgactcctgactatcaggaacagaccgacctgcaggttcccccaaccgccgataggttccaggccgaggaatacggggaagggggaacagaccccccagaaggtccctacgattacacgtacggatatggcgacgactatcgcgaagaaaccgaattggggcctgccctgtccgctgaaacagcacatagtggagcagctgcacatggccctcggggtctcaagggcgaaaaaggcgaaccggcagtcctggaacccggaatgctggtggagggacctccaggcccagagggccctgcaggactgattgggccacccggtattcagggcaacccaggaccagtgggcgatccaggcgaacggggacctccaggacgtgcgggacttcctggttccgacggcgctccgggaccaccagggacctctctaatgcttccctttcggttcgggagtggaggcggtgataaaggacctgtcgtagctgcccaggaggcacaagcccaggcaatactacagcaggccagactggccctgagagggcctccagggcctatgggatacaccgggaggcctggtcccctaggtcagcctgggagtcccggtctgaagggcgagtcaggagatctggggcctcagggccctagagggcctcagggacttaccgggcctccgggaaaggctggccgtaggggcagagcaggcgcagatggcgctagaggaatgcccggagaccctggcgtaaagggcgaccgcggatttgacggactgccagggttgccaggcgaaaaagggcatcggggagacactggggctcaggggctccctgggcctcctggtgaagatggagagcgaggggatgatggcgaaatcggtccacggggactcccgggagaatctggtccgcgaggactgcttggacccaagggacctcccggaatcccgggaccacccggagtcagaggaatggatggtccccaggggcctaaaggctccctggggccacagggcgagcctgggccacctgggcaacagggcacgcctggtacgcagggactccccggaccacagggcgcaatcgggccacacggggagaagggtccgcagggaaaacctggcctccctggtatgcccggtagcgacggcccacccggacaccccggtaaggaagggccaccaggcaccaagggcaatcaaggcccaagcggaccccagggtccccttgggtatcccggaccaagaggcgtcaaaggggtcgatggtattcggggattgaaaggccataagggcgagaagggggaagacggattcccaggctttaagggcgatattggcgtaaagggtgatcgaggcgaagtgggggtccccggttctaggggcgaagatggcccagagggtccaaaaggaagaacagggcctaccggagacccgggaccccctgggctgatgggagaaaagggaaaactcggggtcccaggccttccgggttaccccggacggcagggtcctaagggtagtcttggtttcccaggttttccaggtgccagtggtgagaaaggggctagaggcctgtctggtaagagcgggccaagaggggagagagggcctaccgggcctagggggcagcgcggacctcgcggagctaccggcaagtctggcgctaagggcacctccggcggagatggcccacatggaccacctggagagcgcggtctgcctggccctcagggacctaatggtttccctggcccaaagggaccacccggtcccccaggtaaagacggtctgccagggcaccctggccaacggggagaagtgggcttccagggcaaaaccggccctcctggtccacctggcgtcgtggggcctcagggtgccgcaggagagacaggacctatgggggagcggggacacccgggaccgcctggcccacccggagaacagggcctccccggaactgctggcaaagaggggaccaagggggatccaggccctccaggcgctcccggaaaggacggaccggctgggctccgtggattccccggagagagagggctgcctggaacagctgggggtcctggcctgaaagggaacgaggggccaagtggccctcctggacccgctggaagccctggtgagcgcggagctgccggatctggcggacccatcgggcctcccggaaggcctggccctcagggcccacccggtgcagccggagaaaagggggtcccgggtgagaaaggacctatcggccctaccggcagggacggagtgcagggccctgtcggcttgcccggacctgccggtccccctggtgttgcgggtgaggacggcgataaaggagaagtgggcgaccctggacagaagggcacaaagggcaacaaaggagaacacggccctccgggtccacctggacctataggacctgtggggcaaccaggggctgccggtgccgacggtgaaccaggggcacggggacctcaagggcacttcggtgccaaaggcgatgagggcacacgcggatttaatgggccaccgggtcctatcggcctccaaggtctgcctggaccttccggggagaaaggagagactggggacgtcggtcctatgggcccaccgggaccacccggtcccaggggccctgctggacctaacggcgctgatgggccacagggcccaccagggggagtgggcaatctgggcccacccggagaaaagggcgagcctggcgaatcaggcagcccaggaattcagggagaacctggtgtcaaaggccctcgtggagagcgcggtgaaaagggggagagcggccagcctggcgagcccggacctccaggtcccaaaggccctacaggggacgatggtcctaagggaaaccccggtccggtgggtttccctggggaccccggacctcccggagaggggggacctcggggtcaggacggtgccaagggcgacaggggggaggacggcgagcctggacagcctggatcaccagggcctaccggcgagaatggcccacctgggccactcggcaagcgaggtccagcgggtagccctggatctgaaggcagacagggaggtaaaggtgccaagggggatcccggagccatcggcgctcccggaaagacgggcccagtcgggccagccggtccagccggaaagcccggacccgatgggctgcgcggactcccagggagcgtgggccaacaggggcgtccaggggctactggccaggccggaccaccaggccctgtcggccctccgggactcccaggactccgcggagacgccggagctaaaggcgaaaagggccaccccggactaattggcctgatagggcctccgggtgagcagggtgaaaagggagatagagggctcccaggaccccagggttccccaggccagaagggggagatgggtatccccggagccagtggccctattgggccagggggaccgccaggcctcccgggacccgctggccctaaaggggctaagggggcaaccggcccaggcggtcccaaaggcgagaaaggcgtgcaggggccacccggtcaccccggtcccccaggagaggtaatccagcccttacccatacagatgccaaagaagacccggcgatcagttgacgggtctagactgatgcaggaggatgaggccatccctacaggcggagctcctggatcccctggtgggcttgaagaaatctttggtagtctcgattccctccgggaggaaatcgaacagatgcgacggccaaccggaacacaggacagcccggcacggacctgtcaggacctgaaactttgtcatcccgagctgccagacggtgagtattgggtggatccaaatcaaggatgtgcacgagatgctttccgcgtcttttgtaattttacagctggtggggaaacttgtgtaacaccgagagacgacgttacgcagtttagttatgtggatagtgaggggtcaccagttggggtagtgcagctcacctttcttaggcttttgtctgtgagcgctcaccaggatgtaagttacccgtgcagcggcgcagctcgcgatggaccgttgcgactgcggggtgcaaatgaggacgaattgagtcctgagacgagtccttatgttaaggaatttcgtgatggttgccagacgcagcagggcaggacggtcctggaggtcagaactcccgttctcgagcagcttcccgtcctcgacgcttctttttccgacttgggcgctcccccacgccgagggggagtgctgcttggccctgtctgtttcatgggctar

SEQ ID NO: 232628 - DNA, 5147 bp, Artificial Sequence
  derived and/or modified sequence
atggaaaggtgttcccgatgccaccgactcttgctgctgctacccttagttctgggtctgtcagccgcaccaggctgggccggagcccctccagttgatgtgctacgggctttgcgattccctagtttgcccgacggcgtgagaagagctaaaggtatttgtcctgccgatgtggcataccgagtcgctagacccgcacagctgtcagctcccacaaggcaattattccctggcggattccccaaagatttttccctattgactgtagtgagaactcggcctggcctgcaggctccactgcttactctgtattctgcacagggggtgagacaactcgggttggaacttggaccccctgttaggttcctgtatgaggatcagactgggaggcctcagccaccaagtcaaccagtcttcaggggactgagcttagcagacgggaagtggcatcgtgtggctgtcgcagtgaaggggcagtctgtgacactaatcgtagattgtaagaagagagtgactcgccctctcccaagatcagccagacccgtcctagatacacatggcgtgataatcttcggagcgaggatactggatgaggaggtctttgagggtgacgtccaggagctcgccatagtgccgggtgttcaggccgcatacgagagctgcgagcagaaggagttggaatgcgaggggggacagagagaacggcctcagaaccagcagcctcacagagcccagcggagccctcagcagcagccatcacgcctgcaccgccctcagaaccaggaacctcagagccaacccaccgagtctctgtattacgactataagccaccctactatgacgtgatgacaacaggaactacccctgactatcaggagcagacggatctccaggtacctcccaccgctgatagattccaagccgaggagtacggggagggtggcaccgaccctcctgagggcccttacgattatacgtacggctacggggacgattatagagaggagacagagctgggtcccgctcttagtgccgaaacagcgcactctggggctgccgctcacggcccaagggggttgaagggcgaaaaaggagagccagcagtactggagcctgggatgctcgtggaaggacctccagggcctgaaggtcccgcaggactaatcggacccccaggcatccagggcaatcctggcccagttggggacccaggtgaacggggacctcccggaagagctggactgccagggtccgatggggctcccggtccacccggaacctcattgatgctgccttttcgatttgggtctggtgggggtgataaagggcctgtggtggccgcacaggaggctcaggcacaggcaatcctgcagcaggcgcgtctcgcattgcgaggcccacctgggcctatgggctacaccggaaggcccggacctcttggtcaacccggatctccgggtctgaaaggcgagagcggggatctggggcctcagggaccgagggggccacagggtctgacaggtcccccaggcaaagcaggccgaagagggagggcaggggctgacggagctcgagggatgcccggagatccaggcgttaaaggcgacaggggattcgacgggctcccagggctgcccggagagaagggccaccggggagatacgggggctcaggggctgccaggaccccctggagaggatggggaaagaggggatgatggggagattggccctagggggttaccgggagagagtgggccaagagggttgctgggaccaaagggccctccaggaattccaggacccccaggagtacggggaatggacggccctcaaggccctaagggtagcctgggacctcagggtgaaccagggcctccaggacagcaaggtactccagggacacagggtcttccaggaccacaaggtgcaatagggcctcatggcgagaaggggcctcagggcaaacctggcctgcctgggatgccgggaagcgatggaccccctggccaccccggtaaagagggacctcccggaactaaagggaatcagggtccttccggacctcagggacctctcggataccccggacccagaggagtgaagggcgtggacggaataagaggtcttaagggccacaaaggcgaaaagggcgaagacggctttcctggattcaagggggatataggcgtcaagggtgacaggggggaggtaggcgtgcctggcagtcgcggagaggacggcccagagggcccaaagggcagaaccggtccaaccggggacccgggtccacccggattaatgggagagaagggaaagctgggcgtgccaggacttcccggatacccaggtcgccagggccctaaaggatcactgggatttcctggatttcccggagcgtccggagaaaagggtgctcggggactgagtggtaaatccgggccaagaggcgaaagggggccaaccgggcctaggggacagcgtggtcctcggggtgcaaccggcaagtccggggcaaaggggacgtcagggggtgacggacctcacggaccgccaggcgaacgtggtttgcctgggccacagggccctaatggtttcccagggccaaagggtccaccaggcccaccagggaaagacggactgcctggccatcctggtcagaggggggaggtcggtttccaggggaagaccggcccaccaggtccacccggagtcgtggggccacagggcgctgcaggagagaccgggccaatgggcgagagaggacatcccggtcctccaggccctcccggtgagcaagggctgccaggcaccgccggaaaggaggggactaagggcgatcctggtcctcccggagctcccggaaaggatggccctgcagggctccgaggtttccctggggagcggggactgcccggtactgctggaggcccaggtctgaagggtaacgaggggccatcaggcccacccggacctgccggatctcccggagaacgcggagccgcaggctccgggggacccattggccctcccggtagacccggtccgcagggccctcccggtgctgctggcgagaagggtgtccccggagagaaaggccctatcggcccaactggaagagacggggttcaaggccctgtaggattgcccggacctgcagggccacctggcgtagctggcgaggacggcgacaagggcgaagtaggggaccctgggcaaaaggggactaaaggaaacaaaggtgaacatggcccaccaggaccacctggacctattgggccagttggccaaccaggggctgccggagctgacggagagcctggcgctagggggccacagggtcacttcggcgcaaagggtgatgaagggacccggggattcaatggccctcccggtcccatcggacttcaaggtcttccaggtccttccggggaaaagggagagactggggacgtgggaccaatgggccctccagggcctcccggacccaggggcccagctggacccaacggtgcagacggaccccaggggccacccggaggcgtgggcaatctgggacctccaggggagaaaggagaaccaggtgaatccggtagccccggaatccagggagagccaggcgtgaaaggaccaaggggcgaaagaggggaaaagggagagtctggccagcctggcgaaccagggcctcctgggcctaagggcccaaccggggacgacgggccaaaagggaatcctgggccagtgggatttcccggagatccaggacctccaggcgaaggcggaccaagaggacaagatggcgcaaagggggatcgcggtgaggatggtgagcctggacagccaggcagccctgggcctaccggagaaaacggcccacccggaccgctgggaaaaaggggtcccgcaggcagtccaggttctgagggaagacaggggggaaagggtgcgaagggcgaccccggagccatcggagctccaggaaagaccggccctgttggtcccgctggccctgcaggaaagcccggtcccgacggccttcggggtctgccgggttctgtgggacaacaaggtagaccaggagctacaggccaggccggaccacccggacccgttggcccacctggacttcccggtctgcgtggtgacgccggtgccaaaggcgagaagggccatcccggactgatcggccttataggccctccgggtgagcagggggaaaagggcgacagaggattgcctgggcctcagggctccccaggccaaaaaggggaaatggggattccaggcgcaagcggtcctattggtccgggagggccacctgggttacctgggcctgccggtcccaagggtgcaaaaggcgcaacaggccctggcggaccaaagggcgagaagggggtccagggtccccctggccatcccggaccacctggtgaagtcatacagccgctacctattcagatgccaaagaagacgcgacggagcgtggacgggagtaggttaatgcaagaggacgaggctataccgaccggcggagcaccgggatctcctggaggtttggaggaaatatttggcagtctcgactccctccgcgaggaaatagaacagatgcgacggccaacagggactcaagactctccagctcgaacatgtcaagacttgaagctctgccatccggagctcccggacggcgagtactgggtggaccccaatcagggctgcgctagagatgcctttcgcgtgttctgcaattttacagcgggaggagagacctgcgtgacaccacgcgacgacgtgactcagtttagttacgtcgattctgagggtagcccggtgggcgtcgtgcaattgacatttctgaggctgctgagtgtgtcagcccatcaggacgtttcctacccttgttccggggctgcaagagatggtccgcttagattgagaggtgcgaacgaagatgaactgagccctgagacttctccttacgtcaaggaatttcgcgacggttgccagacacagcaaggtcgcaccgtcctggaggtccggacaccagtactggaacagctacccgtcctagacgcttctttcagcgatttgggcgcaccacctcgcaggggaggcgtcctcctgggccctgtctgtttcatgggcta

SEQ ID NO: 232629 - DNA, 5147 bp, Artificial Sequence
  derived and/or modified sequence
atggagcggtgttcccggtgtcatagactgctcctcttgctcccattggttcttggcctttccgccgcaccaggttgggctggggcacctcctgtcgatgttctccgcgcactgcgatttccctccctgccggacggcgtgcgaagggctaagggaatatgtcctgccgacgtggcttatcgggttgctcgcccagcacaactgtccgcacccacacgtcagcttttcccaggcggatttcccaaggacttcagcctgcttactgtggtccgtacacggccaggtttacaggcgcctctactcaccttatactccgcccaaggagtgcggcaactgggtctggagcttggccgacccgtgcggtttctgtatgaggaccagacaggtcgaccccaacctccaagccagccagtcttccggggtctctctctggctgacgggaagtggcatcgtgtagcggtggcagttaaaggacaaagtgtgacccttattgtggactgcaaaaaacgggtgacccgaccccttcccaggagtgctagacctgtcctggatacccatggcgtaattatctttggagctaggatcctcgatgaagaagtgttcgaaggcgatgttcaagagctggcaattgtccctggtgtgcaggcagcgtacgagtcgtgcgaacaaaaggaactggagtgcgagggagggcagagagagcggcctcagaaccagcagcctcacagagcacagagatccccccaacagcaaccctccagattacatcgtccccagaaccaggaaccgcagtctcaacccaccgaatcactatactacgattacaagcctccctattacgatgttatgaccaccggcaccaccccagactaccaagaacagacagatctgcaggtgcccccaacagcagatcgcttccaggccgaggaatatggggagggcggaaccgaccccccagagggcccatatgattacacatatggctatggcgatgactatcgggaggagaccgagcttgggccagcgttgagtgcggagaccgcccactctggtgccgctgcccacggcccacggggactgaaaggtgagaaaggcgaaccagccgtgttggagccaggaatgctggttgagggaccacctggcccagagggaccggcaggtctcatcggtcccccagggatacagggaaatcccggaccggtgggagacccgggtgagcgaggacctccgggtagggcgggattaccgggatctgacggtgctccgggtcctccaggaacctcactgatgttgcctttcagattcggatccggaggcggagataagggccctgtggtggctgcacaggaggcacaggcccaggcaatcctgcagcaggccagactggctcttcgcggacccccaggccctatgggttacactggcagacctggtcctctggggcaacccggatcacccggattaaagggcgagtccggtgatttagggccacaaggtcctcgtggacctcagggattaaccggcccacctgggaaagcaggacggcgtggtcgggcaggcgcagatggagcgagagggatgccgggagatcccggagtgaaaggtgatagagggtttgacgggctgcctgggctccctggcgagaaaggacaccgaggagataccggggctcagggactccctggacctcccggagaggatggagaaaggggagatgacggggagattgggcctcgaggactgccgggagagtcaggtccgagaggtttactgggccctaagggccctcccggtattcctggtcccccaggtgtgaggggaatggatgggccacagggcccaaaggggagtctgggaccccaaggggaacctggtccacctggacagcaagggactcctggtacccagggcttgcccggacctcagggagccattggcccacacggggaaaaagggccacagggtaagcccggactacccggaatgccgggtagtgatggacccccaggccacccaggaaaggaagggccacctggtacaaagggtaatcagggtccgtcgggcccacagggaccactgggctaccccggtccacggggagttaaaggcgtcgatggaattaggggcctgaagggccacaaaggagaaaagggcgaggacggattccccggatttaaaggagatatcggtgttaagggagacagaggggaagtgggtgttcccggtagccgcggagaagatggccctgaaggtcctaaggggaggaccgggcctactggagatcccggtcccccaggcctgatgggtgagaaggggaaactgggcgtcccaggtctgccaggatatcccggacgccaggggcctaaaggttcattgggctttcctgggtttccaggcgcttctggcgagaagggagccaggggactttcaggtaaatctggccctaggggagaacggggacccacaggaccaagagggcagaggggaccgcgtggggcaaccggcaagtccggggctaaaggaacctcaggcggtgacggaccgcacggccctccaggagaaaggggccttcctggtccccagggacccaacggcttccccggtcctaagggcccaccgggacctcctggcaaagacgggctgcctggacacccagggcagagaggagaagtcgggtttcaaggcaaaaccggccctccagggcctccaggtgtcgtgggtccacagggggcagcaggggaaaccgggccaatgggcgagcggggacatcctggtccaccagggccacccggtgagcaagggctcccaggcacggcgggaaaagagggtacaaagggggaccccggaccccctggagccccagggaaagacggacccgcaggacttagggggttccctggagagcgtggcttacccggtaccgccggtggacctggcctgaaaggcaacgaaggtccatcaggacctcccggtcctgccggtagccccggagaaagaggtgccgctgggtctgggggaccgatcggccctcccggaaggcccggacctcagggccctccgggtgcagcaggcgagaaaggagtacccggtgagaagggaccgatcggacctaccgggagggacggcgtgcagggcccagtggggttgccaggccctgctggtccccctggggtcgccggtgaagatggagacaaaggggaggtcggggaccccggacagaaaggcacgaagggaaacaagggtgaacacggacctcctggccctccgggaccaatcgggccagtcggtcagccaggcgctgccggtgctgatggtgagcccggagcacggggtccccagggccatttcggggctaagggggatgagggcacccggggttttaacggaccaccagggccaatcggcctgcagggcctgccaggcccatctggtgagaagggggagaccggcgacgtcggacccatgggccctccagggccacccggacctcgcggaccagctggaccaaacggtgcagatggacctcaggggcctcccggtggtgttggcaacttgggcccacccggtgagaagggggaacctggggagtctgggtctcctggtatccaaggggaacctggggtgaaagggcctagaggcgaacgcggtgagaaaggagagtcaggacagcccggtgagcctgggccaccaggccctaaaggaccaaccggcgatgatgggcctaagggtaaccccggacccgtagggtttccaggagaccctgggccaccaggagaaggcggacccagaggtcaggatggcgctaaaggagatagaggagaagacggagagcccggacagcctggcagccctgggccaacgggagagaatggcccacctgggcctctgggaaagagagggcctgcgggaagccctggaagtgagggaaggcagggtggtaagggggcaaagggtgaccctggcgcaatcggagcgcctgggaagacgggacctgtagggccagccggtccagccggaaagcctggcccagatgggctgcgagggctgcccggatccgttggccagcaggggaggccgggagccaccggacaagctgggccacctggtcccgtaggaccgccaggccttcccggtcttaggggcgacgccggagccaagggcgaaaagggacacccaggtcttattgggctcataggacctcccggagagcagggtgagaaaggggacagaggactccccggaccgcaggggtctcctgggcagaaaggtgaaatgggcattcctggcgcttctggccctatcgggcctgggggacctccgggactgccaggtcctgccggaccaaaaggcgctaagggagctacaggcccaggtggccctaagggcgaaaaaggggtccagggtcctccaggccacccaggccctcccggagaagtcatccagcccctaccaatccagatgcctaaaaagactcgcaggtccgtggatggcagtcgtcttatgcaggaggatgaagctataccaacgggcggagccccaggatcccctgggggactggaagagatttttggctcactggacagcttacgcgaagaaatcgagcagatgcgtagacccactgggacccaggactctccagcccgaacatgccaggatctgaagctttgccaccccgagctcccagacggcgagtactgggtcgatccaaaccaaggttgtgcacgcgacgccttccgggtgttctgcaactttactgcgggaggcgaaacatgtgtcacaccgagagacgacgtgactcagttttcctatgtggattcagaaggctcccctgtgggagtcgtacaactcaccttcctgcgcctgctgagcgtcagtgcacaccaggatgtaagttacccctgctccggagctgctcgggatggacccctgcggctgcggggagccaacgaggacgagctgtctcctgaaacttctccttatgtgaaggagtttagagacggctgccagacccagcagggtcggaccgttctggaagtgcggacccccgtattggaacagctccctgtcctggatgcctcattttccgacctcggtgcacctcccagaagaggcggagttttgctaggaccagtgtgctttatggggta

SEQ ID NO: 232630 - DNA, 5211 bp, Artificial Sequence
  derived and/or modified sequence
atggaacggtgtagtcgctgtcataggctgctcctcctcttgcccttggtccttggactgtccgcagctcctggctgggcaggagcgccccccgtcgacgtgctgcgggccctgcgcttccccagtctccctgatggcgtaagaagagctaaggggatctgtcctgctgacgtggcctaccgggtagcacgacctgcccagctgtccgctcccacaagacagttattccctggtggctttcctaaggatttctctctgctgacggttgtgcgaacacgacctggcctccaagcccccttactgactctatatagcgctcaaggagtgcggcagctgggtctggagctcggaaggcctgtaaggtttctttatgaggaccagacagggagacctcaaccgccctctcaacctgtcttccggggattaagcctggctgatggaaagtggcacagggttgccgtggccgtgaagggccagagtgtcaccctgatcgtggactgtaaaaaacgtgtcacgcgaccactcccaaggtcagctaggcctgttctcgacactcacggtgtgattatcttcggcgccaggatcctcgacgaggaggtttttgaaggcgacgtgcaggagttggcaatcgttcccggcgtgcaggctgcatatgagtcttgcgaacagaaggagcttgagtgcgaggggggtcaacgcgagcgaccacagaaccagcagcctcacagagcccagcggagtccacaacagcagccatcaaggctgcacaggccacaaaatcaagagcctcagagccagcctaccgaatctctctactacgattacgaacccccttattacgacgtgatgacaaccggaacgactcccgactaccaggaccccacgccgggcgaagaagaagagatccttgaaagtagtcttttgccacctttggaggaggaacaaactgacctccaggtgcctccaactgccgaccgctttcaggctgaggaatacggcgagggcggtacagatcctccagaggggccttatgactatacttatggatacggagacgattacagggaagaaacagaactcggcccagcgttgtccgccgagacagcccatagtggcgcagctgcccacggccccagaggcctgaaaggagaaaaaggagagcccgccgtgctggagccagggatgttggtggagggtcctccaggcccagaagggcccgcaggtctcattggccctcctggaatccagggcaatcccggccccgtaggggaccctggagagcgcggcccccccggacgggccggcttacccggatccgatggtgcccctggccctccaggaaccagcctgatgctaccattcagattcggatcaggaggcggagataagggacctgtagttgctgcgcaagaagcccaggctcaggcaatcctccaacaggctaggttagcactgcgaggtcccccaggtccaatgggctataccggacgccctggccccctagggcaaccgggcagcccaggattgaaaggagagtctggtgatctgggaccacagggccctcggggcccccagggccttaccggccccccgggtaaagccggccgtcgaggtcgtgccggggctgatggcgctcgagggatgccaggagacccaggcgtgaagggggaccgaggctttgatggactgcctggtctccctggggaaaagggccaccgtggcgatacaggagcacagggtctgccaggccctccaggggaagatggcgaacgtggcgatgacggggagatcggacctcgcgggttgcctggggaatcggggccacgaggcctactgggacctaaaggtccgccagggatcccagggcccccaggagtccgcggcatggacgggccacaaggacccaagggatctctggggccacagggtgagccaggccccccgggtcaacagggcactccagggacacaaggactgccagggcctcagggagccattggacctcatggagagaaaggtccccaaggcaagcctggactccctggaatgcccggctccgatggaccacctggtcaccccggcaaggaagggcctccaggtacgaaagggaaccagggaccatccggcccacagggaccactgggatatccggggccaaggggggtgaagggggtggacgggatcagaggcctgaaaggccacaaaggcgagaaaggagaggacgggtttccaggattcaagggggatattggggttaagggtgacaggggggaggtgggtgtcccaggaagccgcggcgaagatggccctgaaggacccaaaggaagaaccggacctactggcgacccagggccacctggtcttatgggcgagaagggcaagcttggagttccaggcctgcccgggtatccgggcagacaaggtcccaagggatccctcggatttccgggattcccaggggcatccggagaaaaaggcgctcgcggcctcagcggaaagagcggaccccgtggggaacggggcccaacaggtcctagaggtcagcgcgggccaagaggcgcgacaggaaagtcaggggccaaaggcacatcaggcggggacggtccccacgggccaccaggtgagagagggcttccaggaccccaggggcctaatgggtttccaggacccaaaggaccccctggccctccaggaaaagatgggcttcccggacatcccggacaacgcggggaagttggttttcagggcaagacaggccccccaggcccccccggcgttgtgggaccccagggagctgccggagaaacaggccccatgggggaacgcggtcacccaggcccccctggccctcccggcgaacaaggcctacccgggacagccggcaaggaaggaacaaagggagatccgggaccacctggcgcccctggcaaggacggtcctgccggattgcgaggatttccaggagaaagaggactgcccgggaccgccgggggaccgggactgaaaggcaatgaagggccctctggtccccccgggccagctggctcgcccggcgagcgcggagccgctggtagcgggggtcctatcggaccccccggccgacctggtccacaggggccccccggcgccgctggagagaagggtgtgcctggagagaagggccctatagggccaactgggcgagatggtgtgcagggcccagtgggcctgcctggaccggcaggtccccccggcgtagccggggaggatggggacaaaggcgaagtgggtgaccctggacagaagggcacaaaaggcaacaaaggggaacacgggccaccaggcccacctgggcccattggcccagtcggacagcctggtgctgccggcgctgacggggaacccggtgctcgcggcccacaggggcatttcggtgcaaagggggatgaaggcaccagaggcttcaacggtccccctggccctatcggcctgcagggactccccggcccttcaggcgaaaagggagaaaccggggacgtcggtcccatgggacctcccggaccaccaggaccgcgcggccctgcagggccaaatggagccgatggacctcagggcccccccgggggggttggtaacttgggccccccaggcgaaaaaggcgaacccggggaaagtgggagccctggcatccagggggaacctggtgtgaagggcccacgtggcgaaagaggggaaaaaggagagagtgggcagcccggggaacccgggcccccaggacctaaaggccctactggcgatgatggacccaaagggaatcccggcccggtaggattccccggcgatccgggacccccgggagagggtggcccccgcggacaggacggggcgaaaggagacaggggtgaggatggcgagccagggcaacctggcagcccaggacctacaggagaaaatgggccacccggcccactggggaagagagggcccgccggatcaccaggatcagagggtcgtcagggcggcaagggcgcgaaaggtgacccgggagcgatcggcgctcccggtaaaaccgggccggtaggaccagctggaccagcaggaaagccagggcccgacggcctcaggggcctgcccggaagcgtggggcagcagggaagaccgggagccaccggccaggctggcccacccggacccgtaggtcctcctggcctgcccggcctgagaggtgacgcgggagctaagggcgagaagggccaccccggcctgatcggtctcataggtcctccaggagagcagggagagaaaggagataggggtttacccggcccacagggaagtcctggacaaaaaggggaaatgggcatacccggcgctagcggtcccatcggacccggtggtccacccggtcttccgggcccggcgggaccaaagggagccaagggagcaaccggccccggcgggccaaaaggcgaaaagggggttcaagggcctccaggacatcctggtcctcccggggaagtgatccaaccactgccgatccagatgcccaagaaaacccggcgttccgtagacggcagccgcctgatgcaagaagatgaagcaataccaaccgggggcgcacctggatcgcccggcggattagaggagatcttcgggtctctggatagcctgagagaggaaattgagcagatgcgaagacctacaggaacccaggattcccccgccaggacttgccaggatcttaaactctgccatcccgagctgccggacggcgagtattgggtcgaccccaatcagggctgtgcccgcgacgcctttagagtgttttgtaacttcaccgctggaggcgagacctgcgttacacccagagatgacgtcacacagttctcctatgtagattcagaaggttccccggtgggagtcgtgcaactaacgttcctgagactgctgagtgtgtcagcccaccaggacgtgtcatatccttgttcgggagccgccagagacgggccattgcgcctgcgaggggcaaacgaagatgagttgagtccagagacgtctccttacgtcaaagagttccgagatggatgccagacccagcaaggacgcacggtcctagaagtgaggacgccggtcctggagcaactccccgtgctggacgcctctttctcagatttgggtgcccctccacggcgtggaggcgtgctgctgggacccgtctgctttatgggttag

SEQ ID NO: 232631 - DNA, 5148 bp, Artificial Sequence
  derived and/or modified sequence
atggagaggtgtagcaggtgccatcggctgctgctcttgttgcccctggttttggggctttccgccgcccctggctgggcaggtgctccgcctgttgacgtgctcagagctctccgctttccaagcctgccagacggagttaggcgggctaaaggaatctgtccggccgatgtagcttatagggtcgcccggccagcacagttatccgcaccgactcggcaactcttcccaggaggattccctaaggacttttccttgttgacagtggtacggacacgaccaggactccaggccccactgctcaccctgtattccgcccagggcgtgagacaactgggattggagctgggcaggcctgtgcgctttttatatgaagaccagactggcaggcctcagcccccttctcagccagttttcagagggctgtctttggccgacggaaaatggcatagggtagccgtggcagtcaagggacagtccgttaccctgatagtcgattgcaaaaagagagtcactaggcccctgccacggagcgcccgtcctgttcttgatacccatggcgtgatcatttttggagcacgtatcttggatgaggaggtatttgagggcgatgtgcaggaactggctatcgtgccaggggtgcaggcagcgtacgaatcttgcgagcagaaagagcttgaatgcgaaggaggtcagcgcgaacgcccacagaaccagcaaccccacagggctcagcggagtcctcagcagcagcctagcagactgcatagaccacaaaatcaggagccccagtcccagccaactgagagtctgtactacgactatgaacctccctattacgatgtgatgactacagggaccacacccgattaccaggaacaaacggacctacaggtgccaccaactgcagatcgcttccaagccgaggaatacggcgagggcgggactgacccaccagaaggcccatacgactacacttatggatacggagacgattatcgtgaagaaaccgagttggggcccgcactatctgccgagacagcccattccggtgccgccgcgcacggaccgaggggcctaaagggggagaagggtgaaccggcagtcctggagcctgggatgttggttgagggacctccgggaccagagggtcctgctgggctgattggccctcccgggattcagggcaacccaggtcctgtgggagatcccggagaacgcggccccccgggcagggccggccttcctgggagcgatggagcaccaggacctcccgggacttcactcatgttgccctttcggttcggttcggggggtggggacaaaggacctgttgtagccgcccaggaggcccaggctcaggccatccttcaacaagcgcgcctggctttgcgaggtccccctggccccatggggtatacaggccgccctggcccgctgggtcaacccggcagtcccggactgaaaggtgagtcaggcgatctgggcccacagggcccacgcggcccccagggactgaccggcccgcctggtaaggccgggcgccgcggccgtgctggagctgacggcgcccgaggcatgcctggggaccccggtgtaaaaggcgatcggggctttgacggcctccccggcctcccaggagagaaggggcataggggggataccggagcacagggccttcccggccctccaggggaggacggcgagcggggtgatgatggggagatcggcccgagggggctccctggagagtctggtccccgcggtctcctcggtccaaagggaccacccggaattccaggccctcccggtgtgcggggaatggacggacctcagggacccaagggatcattagggccgcaaggggaaccaggcccccccgggcagcaaggtacacctggcacccaggggctgccaggacctcaaggagctattgggccacatggtgagaagggaccccagggcaagccaggcctgcccggcatgccgggcagcgacggacctcccggacatccaggcaaagagggccctccaggcactaaggggaatcaaggcccgtcagggcctcagggtccactgggatacccagggccgagaggggttaaaggcgtcgacgggatccggggcctgaagggccataagggcgagaagggcgaggacggctttccaggattcaaaggtgacatcggcgtgaaaggcgaccgtggcgaggtaggggtgcccggtagtcggggggaagacggaccagagggaccaaagggcagaacaggccctacgggagatccggggccacccgggctgatgggcgaaaagggaaagctcggggtcccaggcctgcccggctaccctggcagacagggacccaaaggctccctgggctttccaggattccccggtgcctcgggtgaaaagggcgctcgtggattgtctggcaagtcaggaccaaggggagaaagagggcccacaggacccagaggccaacggggaccacggggcgccactggcaaaagcggcgctaaagggacaagcggtggagatggccctcatggaccccctggagagcgcggtctgcccggtccccagggccccaatggctttcctggccctaagggacctcccggtccacccggaaaagacgggctgccagggcaccccggtcagcggggcgaggtcggatttcaggggaaaacaggccctcctggtccccctggcgtagttggtcctcagggtgccgccggggagacgggccccatgggtgagagggggcaccccggaccacctggacctcctggagaacagggcctccctggtactgctggcaaagagggcactaaaggcgatccagggccaccgggagcgcccggcaaggatggcccagctggtcttagagggttccctggagaacggggcctgccaggcaccgcaggggggcctggcttaaagggaaatgaggggccctctggaccaccaggacccgctggctcgcctggcgagaggggtgccgcaggaagtggagggcccatcggtccacccgggagacccgggccccagggacctcccggagccgccggtgaaaagggcgttcctggagagaaaggccccatcggtcctacagggcgcgatggcgttcagggacctgtggggcttcctgggccggcgggcccccccggggtagcaggtgaagacggtgataagggagaggtgggagatccagggcagaaaggcaccaaagggaacaagggtgagcacggaccgcccggaccgcctggaccaatcgggcccgttgggcagccaggcgcagccggcgccgacggggaacccggcgctcgcggcccgcaggggcacttcggtgcgaagggcgacgagggaacgagaggattcaacggcccaccagggccgatagggctccagggtctgccaggaccaagtggggagaagggggaaaccggcgatgtcgggcccatgggccctccgggccctccagggcctcgtggccccgccggtcctaacggagctgacggtccccaggggccgcccggaggagtgggtaacctgggcccccccggcgagaaaggcgagccaggagagtctggatctcctggcatccaaggcgaacctggggtgaaaggtccgagaggtgaaagaggggagaagggtgagagcgggcagccaggggagccaggacccccaggacccaaaggacccactggagatgacggcccaaagggaaacccaggaccagtggggttccctggagaccctggcccccccggagaaggcggcccgcggggacaggacggagcaaagggagaccgcggggaagacggggagcctggacagcccggaagccctggcccaaccggcgaaaatggcccccctggacccctggggaagaggggccctgccggctcacctggcagtgaggggcgccaaggagggaaaggtgccaagggcgatcccggcgccattggtgcacctgggaagactggccccgttggacccgcaggccccgctgggaaacccggccctgacggactccgcggactccctgggtccgtgggacagcaggggaggccaggtgccaccgggcaagccggcccccctggccctgtaggtcctcctggtcttcccggcttaaggggtgatgctggcgccaaaggcgaaaagggccatcctggccttatcgggctcatcggtcctcccggcgagcagggtgaaaagggtgacaggggcctgcccggccctcaaggctctcccggacagaagggcgagatgggcattccgggcgcatcaggacctattggaccgggcggaccgcctggcctccccgggcccgctggaccgaagggggctaagggtgctaccgggcccggcggtcctaagggagagaaaggcgtgcaggggccacctggacatcccggtccacctggagaggtgattcagcctctgcccatacaaatgcctaaaaagacgagacgatcagtcgatggaagcaggctcatgcaggaagatgaggccattcccactggcggtgctccagggagccccggaggactggaggaaatcttcgggagcttagattccctgcgtgaggaaatagagcagatgcgaaggccgactggcactcaggatagtcctgcacgtacttgtcaggatctgaagctctgtcacccggaactgccagatggcgagtattgggtggatccaaaccaaggatgcgcaagagatgccttcagggtcttctgtaattttacagcagggggtgagacctgtgtgacgcccagagacgacgtcacccaatttagctacgtggatagcgaaggctctcctgtcggtgtggtgcagcttaccttcctaagacttctaagtgtgagtgctcaccaggacgtgtcctatccttgcagcggggctgctagggacggcccccttagactgagaggagccaacgaagatgaactgtctccagaaacttcaccctacgtgaaggagtttagagatggttgtcaaacccagcaaggtcggactgtgctggaagtgagaacccctgttttagagcaacttccagtgttagacgcctcttttagtgatctgggagcccccccaaggagaggaggcgtgttgctcggtcccgtgtgctttatgggctag

SEQ ID NO: 232632 - DNA, 5070 bp, Artificial Sequence
  derived and/or modified sequence
atggaaagatgctccagatgccaccgcctcctgctgcttctgcccttggtactgggcctctccgcagctcccggctgggctggcgcacccccagtcgacgtcctgcgtgccttgcggtttcccagtttgcccgatggagtaagaagagcaaaggggatttgtcctgccgatgtagcgtaccgggtggctcggcccgcccaactgtctgctccaaccaggcaattgttccccggaggcttccccaaggatttttcactgctgacggtagtacgaacacgtccaggcctgcaggcacctcttctgactttgtactcagcccaaggggtacgtcaactgggactcgagctgggtagaccggtcagatttctgtatgaagaccagacaggcaggccccagcctccaagtcagcccgtctttcgcggtctttctcttgcagatgggaaatggcaccgcgtggctgtggctgtgaagggccaatctgtgacacttatcgttgactgtaaaaagcgtgtcactagaccattaccacgatccgcccgacccgttttggatacacatggagtcattatctttggcgcccgcattttagatgaggaggtgtttgaaggtgacgtccaggagctggcaattgtgccaggcgtgcaggccgcttatgagtcgtgtgaacagaaagaactggagtgcgagggaggacagcgagagaggccacagaatcaacaaccacatcgagctcaacgatccccgcaacaacagcctagcagattgcaccgaccccaaaatcaggagcctcaatcacaggaacaaactgacctgcaggtgccgccaaccgcagacagatttcaggcagaggagtatggtgaaggcggaaccgatccacccgaaggcccttacgattatacctatggctacggcgacgactaccgtgaggaaaccgagttgggtcccgctctatcagcagagacagcacactcaggtgccgccgcccacggccctaggggactgaagggtgaaaagggcgagcctgctgtgttggaacccggaatgttggtggagggtcctcctggcccagagggaccggccggcctcatcggcccacccggcatccagggaaaccctggtcccgtgggcgacccaggagaaagggggccccctgggcgggctggtcttcctggatcagacggcgctcctggacctccagggaccagcctcatgctgccctttagattcggcagtggaggcggagataagggtcctgtcgtcgccgctcaggaggcccaggcacaggctatcttgcaacaggcacggctggcactccgggggcctcccgggcccatgggatacaccgggcgtccagggcctctcggtcagccaggcagtcctggccttaagggggagtcgggcgatctgggcccccagggtccccgaggccctcaagggttgactgggccccctggcaaggctggacgtaggggcagagctggagccgacggagcacggggcatgccaggggaccctggcgtcaagggagacagagggttcgacggtttaccaggattaccaggcgaaaaaggtcatcgcggagacacaggcgctcaggggctgcccggcccccccggcgaagatggagagagaggagacgacggggagatcgggcccagaggtctgccaggcgagagtggtcccaggggtctgttgggaccaaagggccccccaggaatccccgggcctcccggggtacggggaatggatgggccacagggccccaaaggttccctgggacctcagggagaacctgggcccccgggacagcaaggcacacccgggactcaaggcttgccggggccccagggcgcgatcggacctcatggggaaaaaggccctcagggcaagccaggtctgccaggcatgcctggttccgatgggccacccggccatcctggcaaagaaggcccgcctggcaccaagggaaatcagggtcccagcgggccgcagggtccgctggggtatcctggaccccgtggtgtgaaaggcgtagatggtataagagggttgaaggggcacaaaggggagaaaggtgaggacggatttcccgggtttaagggtgatatcggagtgaaaggagacaggggtgaagtgggcgtccctggctctaggggggaagacggccccgaaggcccaaaaggacgcaccggccctaccggagaccctggcccgcccggtctcatgggcgagaaaggtaaactcggagttccgggactacccgggtaccccggaaggcagggccccaaagggtctcttggattccctgggttcccgggtgcctcaggtgaaaaaggagcgcggggacttagcggcaagagcggaccaagaggcgaacggggaccaaccggccctcgaggtcagcgcgggcctcggggggcaaccggcaagtccggcgcgaaaggtactagcggcggcgacggtcctcacggtcctcccggggaaagagggctccccggacctcagggtcccaacggttttcctggaccaaaaggacccccgggcccacctggcaaggacgggttgccaggtcacccaggtcaacgcggggaggtcggattccaggggaagaccggcccacctggaccacccggcgtagttgggccccaaggagccgcaggagagacagggcccatgggggaaagggggcatcccggacctccagggccaccaggagagcagggcttgccggggacggcaggtaaagaaggcactaaaggtgaccctggaccacctggcgcccccggaaaggacggccccgccgggctgagggggtttcctggagagaggggactacccgggactgcaggcggcccagggcttaaaggcaacgagggaccatctggcccccccggacccgccggatctcccggagagagaggggcagccggatccggagggcccatcggacccccaggacgccctggacctcaaggacctccaggggccgcaggagagaagggagtcccaggcgaaaaagggcctatcggtccaaccgggcgtgatggggtccaaggcccagtgggacttcctggtccagcaggacctcccggtgtggcaggcgaggacggcgacaaaggcgaagtgggagacccaggtcaaaaaggaacaaaaggcaataagggggagcacggccccccagggccccccgggcctataggacctgtcggacaacccggcgccgctggagcggatggcgaaccaggcgcccggggcccgcagggacactttggagccaaaggagacgagggcacccgcggatttaatggaccccccgggcctatcggcttgcagggtctgcccgggccctctggcgagaagggtgagactggggatgtaggcccgatgggtccgcctgggccacccggtccccggggaccagcaggtcctaacggagccgatgggcctcagggaccaccaggcggcgtcgggaacctgggcccaccgggagaaaagggagagccaggggagagcgggagccctgggattcaaggtgaacctggggtgaaaggccctagaggcgagcggggagaaaagggggagagtggccagcccggcgaaccgggtccacccggacctaaaggtcccactggggacgatgggcccaaaggtaacccaggcccggtgggcttcccgggcgaccccggtccccccggggaaggtggccccaggggacaggatggagctaagggcgacagaggcgaagatggagagccaggccaacctggatctcctggcccaacgggtgagaatgggcctccaggtcctctggggaagcgaggtcccgccggtagccctggtagcgaaggacggcaggggggaaaaggagccaagggcgaccctggcgctatcggtgctcctgggaagactggccccgtgggacccgccggaccagcgggtaaacccgggcccgacggtttgaggggcttgccaggctcagtggggcagcagggcagacccggagctactgggcaagcggggccgcctggccccgtgggcccgcctggcctgcccggattgcggggagatgcaggcgccaaaggcgaaaaaggtcatcctggtctcattgggctgatcgggcccccaggagaacaaggcgagaaaggcgacagaggtctgcccggacctcagggctcccctggccagaaaggggaaatggggattcccggggcaagcggcccaatcggtcccggcggccccccgggtctccccggacccgcaggccctaagggggccaaaggagctacgggaccaggaggccctaaaggtgagaagggggtacagggccctcccgggcacccaggcccgcctggagaggttatccagcctttacccatacagatgccaaaaaagacaaggagatccgtggatggatcacggctcatgcaagaggatgaggcgatcccaaccggaggggcccctggatcacctggaggccttgaggaaatcttcggttcactcgattctctgcgggaggagattgaacaaatgagacgcccaactggaacgcaggactccccagctaggacctgtcaggacttaaaactgtgtcatcctgagctgccagatggcgaatactgggtggaccctaatcagggttgcgctcgcgatgccttcagagttttctgtaattttaccgccggtggcgagacttgcgtgacccctagagatgatgttacgcaattttcatacgtggattcggagggaagccctgtcggcgtcgttcagcttaccttcctgcgactgttgagtgtgagtgcccatcaggacgtatcttacccctgctctggggcggcaagggacggtcccctgcgactgagaggagcaaatgaagatgagctgagtcctgagacaagcccatacgtgaaagaatttcgagatggatgccagacacagcagggaagaaccgtgttggaggtgagaacaccagtgctcgagcagctgcccgtgctggatgcgtctttcagtgatctgggcgccccacctcgccgcggaggcgttctgttgggacccgtctgcttcatgggctag

SEQ ID NO: 232633 - DNA, 5133 bp, Artificial Sequence
  derived and/or modified sequence
atggaaaggtgtagcaggtgtcacaggctgctattgctgctgccccttgtcctgggcttgagcgcagcacctggatgggccggagcacccccagttgatgttctgcgcgccctgcgcttcccttccctgccggacggtgtaaggcgcgccaaggggatttgccccgctgatgtcgcttaccgagttgcgcgaccagctcagttaagtgcacctacaagacaactgttccctggcggctttcccaaggatttttccctgcttacagttgtgcgcacgagaccaggcctgcaagcgcccctactgacattgtactctgcccagggggtccggcagctgggtcttgaattgggcaggcccgttcgtttcctctatgaggaccagaccggtcgcccacagcctccctctcaaccggtctttaggggcctatctctggccgacggcaagtggcatcgagtcgctgtggctgtgaagggtcagtcggtcaccctgatcgtggattgtaaaaaacgggtgaccaggcccctgcccaggtcagcccgccccgtactggatacccatggtgtaattatcttcggcgcccgcatccttgacgaggaggtgttcgaaggggatgtgcaggaactagcgattgtccctggagtgcaagccgcatacgaaagctgtgaacagaaggagcttgaatgtgagggcggacagagagaacggccacaaaaccagcaaccccaccgggcacaaaggagccctcagcagcagccttctcgtctccaccggcctcagaaccaggagccccaaagtcaggaccccacccccggcgaggaagaggagatcttagaatcctccctcctgccaccccttgaggaggaacagaccgacctgcaggtgccacccacagcagaccggtttcaagcggaggaatatggggagggtggcactgatccccccgagggtccttatgactacacctatggatatggcgacgactaccgcgaagagactgaactgggacccgctctctcagcggagacagctcactccggagccgcagctcacggccctagaggactcaagggggagaaaggcgagcctgctgttttagagcccggaatgctggttgagggcccaccaggccctgagggtccagcaggccttataggacctccgggcattcaggggaatcctggccctgttggcgacccaggcgaacgtggcccacccgggcgagccgggttgccagggtccgatggcgcccccgggccacccgggacttcactgatgctgcctttccgattcggttcaggggggggcgataagggacccgtggtggctgcacaagaggcccaagcccaggccatccttcaacaggcacggctggccttacgcggaccgcccggacctatgggctacacaggccggccaggcccactgggacaacctggcagccctggcctgaaaggggagagtggtgatcttggaccacagggccccagggggccccaaggcctgaccggaccccccggcaaagcgggaagacgaggcagagctggggccgatggggcacgcgggatgccaggagacccgggagtgaaaggagaccgaggcttcgacggcctgcccgggcttccaggtgagaaaggtcaccggggcgacactggcgcgcagggactgcctggcccacccggggaagacggagaacggggagacgacggagagattggccctcgcggactgcccggtgaatcaggaccacggggactcctggggccaaaagggcctccaggtatacctggtccacctggggtccgtggcatggatggaccacaaggtcctaaggggtcgctcggcccgcaaggagaaccaggccctcccgggcaacagggtactcccggcactcagggcctgccaggaccacagggcgccattgggccacacggggagaagggcccccaaggcaagccaggtcttccaggaatgccaggtagcgatggcccaccgggccatcccggaaaagagggcccacccggcacaaaaggcaaccagggcccctcagggccacagggaccactgggatatccaggcccccgaggagtgaagggcgtggacggcatcagaggactcaagggccataagggggagaagggtgaagatggattccccggattcaaaggcgatattggagtcaagggcgacaggggcgaagtgggcgttcccggttcccgaggggaggacggccctgaggggccgaaggggcggactggcccaacaggggatcccgggcccccaggtctgatgggcgaaaaggggaagctcggtgtgccaggattgcctggttaccccgggcgtcaaggccccaagggcagtttagggttccccggatttcctggagccagtggtgagaaaggggcccgcggcttgtcaggcaaatctggaccccggggggaaaggggcccgaccgggccgcgcgggcagagaggacccaggggcgcaaccggaaagtctggagcaaaaggtacaagtggcggcgatggaccacacggcccccctggtgagcgtgggcttccagggccccaggggcccaatggcttccctgggcccaaaggacctcctggaccacccggcaaagatgggctacccgggcatcctggacaacgcggcgaggtgggattccagggtaaaaccggtccgcctggtcccccaggcgtcgtcggccctcaaggggccgcaggagagacagggcctatgggcgagcggggacaccccggtccgcctgggcccccaggtgaacaaggcttgccaggaactgcaggcaaagagggcacaaaaggcgatcccgggccccccggggctccagggaaggatggacccgctgggctgcgtggttttccaggcgaacggggtctgccgggcacggctggcggacctggtctaaaagggaacgagggaccaagtggaccgcccggacccgcgggctcacccggggagagaggcgctgcgggatccggaggtcctattggacctccaggacgaccaggcccacagggacccccaggagccgctggcgagaagggagttccaggggagaagggccccataggccctactggccgagatggagtccagggcccagtgggactgccaggccccgccggtccacctggagtcgcgggggaagatggtgataaaggagaggttggcgaccccggccagaagggaaccaaagggaacaaaggagagcatgggcctcctggtccgccagggccaataggtcccgtgggccaacctggcgctgctggcgccgacggcgaacctggcgccagaggtccacaggggcatttcggggccaagggagacgagggaacccggggctttaacggcccccctggcccaattggcctccagggattaccaggaccaagcggagagaagggcgaaacgggagatgttgggcccatgggccctccgggtccaccaggcccccgcgggcccgcaggacccaatggcgccgacggtccccagggcccccctggtggcgtgggcaacctcgggcctccaggcgaaaaaggagaacctggagagagtggatcccccggtatccaaggagaaccaggcgtcaagggtcctaggggcgaaaggggcgaaaagggggagagcggccagccaggcgagcctggccccccggggccgaagggacccactggcgacgatggtcccaagggcaacccaggcccggtcgggtttccaggtgaccctggaccaccaggggagggcggacctagagggcaggatggtgcgaaaggcgacaggggcgaggacggcgagccgggtcagccagggagccctggacctaccggagagaatggcccccctggaccgcttggcaaaagaggccctgctggtagtccaggcagcgaggggagacagggaggcaaaggagccaagggagacccgggcgcaataggggctcccggaaagacaggcccagtggggcccgcaggaccggcaggcaaaccgggccccgacggactccgcggactgccgggcagcgtgggccaacagggtaggcctggcgctacgggtcaagccggacctcctggccctgtgggtcctccgggactgccaggactgagaggggacgccggagcaaagggggaaaaaggccatcccggattaattggtctgatcggcccaccgggagagcagggagaaaagggcgaccgcggtttgccagggccacagggctcacctggtcaaaaaggcgaaatgggcatcccaggggcctcaggtcctattggccccggcggcccacccgggctgcccggcccagcaggacccaaaggggcaaagggtgcgactgggcctggaggccccaaaggagaaaaaggagtccaaggaccccccggtcacccaggtcctcctggcgaagtaatccaacctctacccatccagatgcccaaaaagacgcgaaggtctgtggacggcagccgtctaatgcaggaagatgaggccattcccacaggcggcgctccaggctctccgggcggccttgaggaaatttttggtagtctcgatagcttacgcgaggaaatcgagcagatgcggcggccaacagggacacaggactcgcccgccagaacatgtcaggatctgaaattgtgccacccggagctgccagacggcgagtactgggtcgatcctaatcagggttgcgcaagagacgcctttagggtcttctgtaattttacagcaggcggagaaacttgcgtgactccccgtgatgatgtaacgcaattttcatacgtggactccgagggctctccggtaggcgtggtgcagttaacctttctccgactgttaagcgtgtctgctcaccaggatgtgtcctacccctgctctggcgctgcgagggacggccctttaagacttcgcggcgctaacgaggacgaacttagtcccgaaactagcccttacgtgaaggagttccgcgacggatgccagactcagcaaggccggacggtgctggaggtgagaacacccgtgctggagcagctgcccgtcctggacgccagcttttcagaccttggtgcaccaccaagaaggggaggcgtcctgttgggccccgtgtgtttcatgggatag

SEQ ID NO: 232634 - DNA, 1875 bp, Artificial Sequence
  derived and/or modified sequence
atggagcgctgcagccggtgtcaccgactcctccttctgttacccctcgtgctgggcttatctgccgcccccggctgggccggagctccaccagttgatgtcttgagagcactgaggtttcccagcttacctgacggggtccgacgggcaaaggggatctgtccagccgacgtagcgtaccgcgtggcgagaccagcccagttatcggctcctacccgtcagttgttccccggtgggttccccaaagacttctctctcttaacggtggttcggacccgacctggactccaggccccccttctgacactctattccgcacagggggttaggcaactgggcctagagctcgggcgcccagtcaggttcttgtatgaagatcagaccggcaggcctcagccaccatcccaaccagttttccgcgggttatccctggccgacggcaagtggcaccgcgttgcagtcgctgtgaaaggccagtccgtcacactcattgtagattgtaaaaaaagagtgacccggccgttacctagatccgcccgccccgtacttgacactcacggagttattattttcggtgccaggatcctcgacgaggaggtctttgagggcgatgtacaagagttggctatagtacccggcgtccaagctgcatacgagtcttgtgagcagaaggaactcgagtgtgaaggcggccagcgcgagcgaccacagaatcagcaaccgcatcgcgcccagcgaagtcctcaacagcagccctccagattgcacagaccccagaatcaggagccacaatcccagccaactgaaagtctatactacgattataagcccccctattacgatgtgatgaccacaggcaccactcctgattatcaggatccaactcctggcgaagaggaagagattcttgagagttccctgctgccgccgctggaagaagagcagaccgacttacaggttccaccaaccgcagaccgattccaggcggaagagtatggcgagggcggcacagatccaccagagggcccctatgactacacctatggatatggggacgattatagggaagagacagaactgggaccagcattatcagcagaaaccgcacactccggagctgcagcccatggaccccgcggcctgaagggagagaagggcgaaccagctgtgctagaaccaggaatgctcgtcgagggacctcctggtcctgaaggaccagccgggcttattggtccacctggaattcaggggaatccaggccccgtcggagaccctggggaacgagggcctccagggcgcgccggtctgcccggcagcgacggtgccccagggcccccaggaaccagtcttatgcttccattccgctttggttcaggcgggggggacaagggacctgtggttgccgcccaggaagcccaagcccaggctattctccagcaggcccgtctggcgcttagagggcctcccgggcctatgggctatactggtagaccaggcccccttgggcaaccgggatctccagggttgaaaggggagagtggtgatctcggacctcagggcccacggggcccacagggccttacagggcctcctggcaaggcagggcgccgggggcgcgctggggccgacggggcacggggtatgccaggcgaccctggcgtaaagggtgacagaggattcgacggtttgcccggcttgccgggagagaaaggccaccgaggcgatacaggggcccagggcctgccagggcctccaggcgaggacggtgagagaggggatgatggggagattggccctcgggggctgccgggcgaaagtggcccacgcggcctcctaggtccaaaggggcccccagggattccaggcccaccctag

SEQ ID NO: 232635 - DNA, 1875 bp, Artificial Sequence
  derived and/or modified sequence
atggagagatgttctagatgccacaggctccttctgttgctgccactggtactgggcctgtcagcggccccaggctgggccggggcacctccagtagatgtgcttagggccctccggttcccctctctcccagatggagtgcgccgagcaaaggggatctgtcccgctgacgttgcgtatcgcgtcgctaggcctgcacagttaagcgccccaactcgccagctctttcctggcggcttccctaaggatttttcactgctcacagtcgtcagaacccggcctggtcttcaggcccctctgctcaccctctatagcgctcagggggtgcgccagctcggattggaacttggcaggcccgttaggttcctgtatgaggatcagacaggcaggccccagccgccctctcaacccgtatttcgtggcctgtccttggctgatggtaaatggcacagggtcgccgtggcagtaaaaggtcagtctgtcactttaattgtggattgtaagaagcgcgttactcgccccctgcccagatctgctaggccggttctggatacccacggcgtaattatctttggtgctagaatcttagacgaggaggtctttgaaggtgatgttcaagagctagctatcgtcccaggcgtccaggccgcatatgaatcttgcgaacaaaaggaactggaatgcgaaggcggccagagagagagaccacaaaatcagcaacctcacagggctcagcgcagcccacagcaacagccttccaggttgcatagaccccagaaccaagaaccgcagtctcagcccactgagtccctgtactacgattatgagccgccttactatgacgtgatgactacagggacgacccccgactaccaagacccaacacccggggaagaggaagagattctcgagagctccttattacccccgttagaggaagaacagacggaccttcaggtgccccctactgctgacagatttcaagcggaggagtacggtgaaggtgggacagacccgccagaagggccatacgattatacctacggctacggagatgactatagagaggagacagaactgggccctgcccttagtgcggagacagcccatagtggagccgcagctcacggccctcgcggactgaaaggcgaaaagggggagcccgctgtcctggaacctggtatgctggtagaaggacccccgggcccggagggcccagcgggactgatcggacctcctggaattcagggtaaccctgggcccgtcggcgacccaggtgagaggggtccgcccggcagagccgggttgccgggaagtgatggagcaccagggccccccgggaccagtcttatgctaccctttaggtttggatcaggtggtggagacaaggggcccgtggttgccgcacaggaagcccaggcccaggcaatcctgcagcaggcgcgcctggcccttcggggacctccagggccgatgggctacaccggtcgtccaggtcctcttggacagccaggcagtcctggtttgaaaggcgagtctggagacctgggcccacaggggcctcggggtccgcaggggcttactggtcccccgggtaaggcagggcggagagggagagctggcgccgacggcgctaggggtatgcctggggacccaggtgtcaagggagatcgaggcttcgatgggctgcctggcttgcctggcgagaaggggcacaggggagacacaggagcccagggcttgccaggtcctccaggcgaggacggagaacgtggtgacgatggcgaaataggtccgcgcggcctgcccggtgaaagcggaccaagaggcttgttaggaccgaaaggaccccctggcatacctgggccgccttag

SEQ ID NO: 232636 - DNA, 5133 bp, Artificial Sequence
  derived and/or modified sequence
atggagcggtgcagcaggtgccacagattgttgttgttgctgccacttgtgctgggcctgtctgccgctcccgggtgggcaggggccccgcccgttgacgtcctgcgcgctctgagatttccttcactaccggacggtgtccggcgggctaaaggaatctgtccagcagacgtggcttatcgcgttgcccgacctgcacaattatccgcccctacacggcagctgtttcccgggggcttccccaaggatttttcactactcacggtggtgagaacacgccccggacttcaagcccccctactcacactgtactctgcacagggagtgagacagctgggattggagttgggccgccccgtgaggtttctctacgaggaccagaccggcagaccccaaccccctagtcagcccgtgtttcgaggcctctcccttgccgatggaaagtggcaccgcgttgcagtcgccgtgaaaggtcagtcagtcacgttgatcgtagattgcaagaaaagagtcacaaggcccctcccaaggtccgcaaggccggttcttgatacacacggcgtgatcatctttggagcacgcatcctcgatgaggaagtttttgaaggcgatgtgcaagagctggctattgtcccaggcgtgcaggctgcctacgaaagctgcgaacagaaagagctagagtgcgaaggcggacagcgagaacggccacaaaaccagcagccccatagagcccagagatccccccaacagcagcctagtcgtcttcacagaccccaaaatcaggaaccccaaagtcaggatccaacccccggcgaagaggaagagattcttgagtccagtctgctgccaccactggaggaagagcagactgacctgcaggtaccccccacggccgacagatttcaggcagaggagtacggcgagggagggaccgacccacccgaaggcccctacgactatacatacggatacggcgatgattatcgagaggagacggagttagggccggcccttagcgctgagacagcacatagcggggcagctgcacacggtcctcgaggtcttaaaggtgaaaagggcgaacccgccgtgctggaaccgggtatgctagtggaaggacctcccggacctgagggtccggctgggcttatcggacctccaggaatccagggcaatcccggacctgtgggcgacccaggggagcggggcccccctgggagagccggtctgccagggagcgatggggccccaggacctcccggaacctcactgatgctcccctttagatttggaagcggaggtggtgataagggacccgtggtggcggcacaggaggcccaggcacaggccatcctgcagcaggccagactcgctctgaggggcccccccggccccatggggtatacagggcgcccgggcccactggggcaaccaggttcgcccggcttgaagggggaaagcggtgacttgggcccacaaggaccccgcggtcctcaaggcttgaccgggccacccggcaaggcagggagacgaggtagggccggcgcggacggcgcaagagggatgccaggtgatcccggcgtcaaaggagatcgcggttttgatggcttgccagggctgcctggagagaagggacacagaggtgacacaggtgcgcagggactcccaggaccccccggcgaggatggggagcgtggcgatgacggcgagattgggcccaggggtctgcccggcgagagcggcccccggggcttgctgggcccaaaaggccctcccggcatacccggccctcccggagttcgcgggatggacggtccacagggccccaaaggaagcctcggcccgcagggggagccgggaccccccggacagcagggaactccaggaacccagggcctgcccgggccacaaggtgccatcggtccgcatggagaaaaaggacctcagggaaagcctggtctgccaggtatgcctggttccgacgggcctcctgggcatccaggaaaggaaggcccgcctggcacaaaaggaaatcaaggcccaagcggtccgcagggaccactggggtatccaggaccgcggggggtgaagggggtggacggtatcagggggctgaaaggtcataagggagagaagggagaggatggattcccaggattcaagggcgatatcggggtaaagggagatcgaggcgaggttggggtgccaggcagccggggtgaagacggtcccgaaggccctaagggacggacgggccccactggcgatccagggccgcccgggttaatgggggaaaaagggaaactgggagttccagggcttccgggatatcctggacggcaaggtcctaagggcagtctcggatttccaggtttccccggggcatctggtgaaaagggcgctcgagggctttcaggaaagtccggtcctagaggtgaacgcggaccaacgggccctcgcgggcagcgaggcccccgtggagcaactggcaagagcggcgcaaagggtacctctggcggagacggcccacacggaccccccggagaaagaggcctccccggtccacaagggcccaacgggttccctggaccaaaggggccaccgggtccccccggcaaagatggactgcccgggcatcccggacaacgcggtgaagtaggctttcaaggcaagacagggccgccgggccctcccggagtcgtgggcccccagggggccgccggtgaaacagggccgatgggcgagagaggccaccctggcccgcccggaccacccggtgaacaggggctgccagggaccgctggaaaggaggggacaaaaggcgaccctgggcccccgggcgctcctggcaaggacggccccgccggcttaagagggttccccggggagcgcgggttacccgggaccgccggagggccagggctgaaaggcaacgagggtccctccggaccacccggtcccgcaggctcgcccggtgaacgcggggctgcaggaagcgggggccccatagggcctcccggcaggccggggccacaagggcccccaggtgctgctggcgagaaaggggttcccggcgagaaaggccctatcgggccaacaggacgggacggcgttcaagggcctgttggcctcccaggaccggccggtccacccggcgtggccggggaggatggtgataaaggggaggtgggggaccctggccaaaaaggcactaaggggaataagggtgagcacggacccccgggcccccccgggcctattggcccagtgggtcaacccggggccgctggagcagatggcgaaccaggcgctcgcggcccccagggccattttggagccaaaggcgacgaggggaccagaggcttcaacggaccccctggaccgattgggcttcaaggactgcccgggccaagcggggagaagggagagactggcgatgtgggccccatgggaccccctggtccccctggaccgaggggacccgctggccccaacggcgcagatggcccacaagggccacccggtggcgtgggcaatctgggtccaccaggagaaaagggcgagccaggggaatctggctcccccggcatacagggtgaacccggggttaagggtccaagaggagaacgcggagagaagggcgagagcggccagcccggcgaaccagggccccccggcccaaagggacctacaggagatgatggccctaaggggaaccctggaccggtgggctttccaggagacccgggtcctcctggcgagggggggccaagaggccaggacggcgcaaaaggcgacagaggggaggatggcgaacctggtcagccgggcagtcccggaccaacaggtgagaacggccctcctggtcctctgggaaagagaggtcccgccggttctccaggaagtgaaggtcggcagggggggaaaggagccaagggcgatcccggagcaattggggcacccggtaaaaccggtcccgtagggccagccggacctgctggcaaacctggtccagatggcctgaggggactgcctggcagtgtgggccagcagggcagaccaggggccaccggacaggcaggacctcctggcccagtggggccacctggcctgccgggactgaggggagacgccggagcaaagggtgagaagggccatcctggacttattggacttatcggacccccaggcgaacagggggaaaagggggatcggggcctgccggggccccaggggtcacccggtcagaaaggagagatgggaatcccgggggctagcggtcccatcgggccgggtggaccacccggactgccaggcccggcaggcccgaaaggagccaaaggcgcaaccggaccagggggacctaaaggcgagaaaggcgtccaggggccccctggtcatcccggcccacccggggaggtgattcagccgctcccaattcaaatgccaaaaaagactcgcagatcagtcgatggtagtcgtttaatgcaagaagatgaagcaatccccacagggggtgccccaggttcacccggcggcctggaggaaatcttcggaagtttggacagtttacgggaagagatagagcagatgaggagacccaccggcacccaagattcgcctgcccggacatgccaggatcttaaactatgtcacccggagcttcccgatggggaatattgggttgatcccaatcaggggtgcgctagagatgcattccgagttttctgtaactttactgccggtggcgagacttgtgtcacgcctagagacgacgttacccaattctcatatgtggactcagagggatcacctgttggcgttgttcagttgactttcctaagactcctctccgtctcagcccaccaagatgtgtcttacccctgttccggagctgcccgggacggcccactgcgactgagaggtgccaatgaggacgagctatcacccgagacgtcaccatacgttaaagagtttcgggatggatgccagacacagcagggccgtacagtgctggaggtgcggactcccgttttggagcagctacccgtgctggacgcctccttctcagacctcggggcccctcccagaaggggaggagtcttgctcggcccagtgtgcttcatgggctag

SEQ ID NO: 232637 - DNA, 5211 bp, Artificial Sequence
  derived and/or modified sequence
atggaaagatgctcaaggtgtcacagactgctcctgctgctccctctggtccttggcctaagtgccgccccaggatgggccggtgcaccccctgtcgatgtcttacgagccctccgctttccttcactccctgacggtgtgaggcgcgcgaaggggatctgccccgccgatgtcgcttatagggttgctcgacccgcccagctgtctgccccaacgaggcagctttttcctggcggttttccaaaggatttttctctgcttaccgtcgtccgtactcggccggggctgcaagcacctctgctcactctgtatagtgctcagggggttcggcaactggggttggaactaggccgccccgtccgcttcttgtatgaggatcagaccggtcgaccccagcccccgtcacaacctgtctttcggggtctgagtctggcagacggcaaatggcaccgagtggcggtggctgttaaagggcagtctgtaacactgatcgtggattgtaagaaacgcgtcaccaggcccctcccccgctctgctcgtccagtgctggacacacacggcgtaattatctttggagcccgcatcctcgatgaagaggtattcgaaggagacgtacaggagctagcaatagtccccggcgttcaggcagcctatgaatcctgcgagcaaaaagaattggagtgcgaaggggggcagagggagcggcctcagaaccagcagccgcaccgggcccagaggtcgcctcagcaacagccgtcaaggctccacaggcctcagaaccaagagcctcagtcccagcccacagaatcactctactacgattataagcctccatactacgacgtcatgacaaccggcaccaccccagactaccaagatccaactcccggggaggaagaggagattctggagtctagtctcctgcctcccctcgaggaagagcagactgatctccaggtgcctcctacggccgaccggttccaggctgaggaatacggtgaaggcggaacagaccctcctgaagggccttacgactacacatacgggtacggtgatgattacagagaggagacagagttgggcccggccctttcggccgaaacagctcacagcggagcagccgcgcacggcccgagggggttgaaaggggagaagggggaacctgcagtactcgagcccgggatgctcgtcgagggtccacccggacctgagggaccagccgggctgatcggaccaccaggaattcagggcaaccccggtcccgttggtgatcctggcgagcgaggccccccaggccgcgctggtctcccagggagcgatggagcacccgggcccccggggacatctctgatgctcccatttcggtttggatccggtgggggagataagggaccagttgtggccgcacaagaggcacaagcccaggccatcctgcagcaagctcgccttgcgttgcgggggcctcctggaccaatgggatacactggaagacccggacctctgggccagccaggcagccccggcctcaagggagagagcggcgaccttgggcctcagggacctcgcggcccccagggcttgacaggtccccccgggaaagctggccggaggggccgagccggggccgatggagcccgaggcatgccgggcgatccaggggtaaaaggcgacaggggatttgatggactcccaggactgccaggagagaaaggccatcggggcgacacaggagctcaaggtctgcccggacccccgggggaagatggagagagaggcgacgatggtgagattgggcctcggggactgccaggagaatctgggcctcggggattacttggtcctaagggcccaccggggatccctggaccaccaggagtacgcggcatggacggaccgcaggggccaaaggggagccttggcccccaaggtgaaccaggcccgcccggacagcaggggactccgggaactcaggggctgccaggacctcagggagctattgggccccacggggagaaaggaccccagggcaagcccggactgcctggaatgccgggatccgatggtccaccagggcatccgggtaaggaaggaccccccgggactaaggggaatcagggaccgtctggaccacaagggccacttggataccctggtccccgaggcgtgaaaggtgtggacggaatcaggggactgaagggacacaagggggagaaaggggaggacgggtttcccggattcaagggcgatattggtgtaaaaggagacaggggggaggtgggcgttccgggtagccgcggagaggacggcccagaaggacctaagggaagaactgggcccacgggagatccaggccctcctggtttgatgggagagaaggggaaactcggagtccccgggctgcccggatacccaggtcgccaaggtcccaagggctccttgggatttcccggctttcccggggccagcggtgaaaaaggagctcggggcctgagcggaaagtctgggcctaggggcgagcggggtcccaccggccctagaggacaaagagggcctcggggcgccacaggcaaatctggcgcgaaaggtacctcgggtggcgatggcccacacggaccgcctggagagagagggcttccgggacctcagggccccaacggattccctggcccaaaaggccccccaggaccccctggcaaggatggcttaccaggacacccagggcagcgaggcgaagtaggctttcaagggaagacgggccctccgggacctcctggcgtagttgggccccagggcgcggccggagagaccggacctatgggggaacgaggccacccaggcccaccgggcccgcccggggagcagggcctgcctgggactgccgggaaagagggtacgaagggggaccccgggccacccggcgccccaggaaaggacggtccagccggactacgagggttcccgggagaaaggggcctgccaggtactgccggcggaccaggactgaagggaaacgaaggccccagtggaccacctggacccgccggatctcccggagagcgcggggccgctggttccggggggccaatcgggcccccaggcagaccgggcccccagggcccccccggtgccgcaggagagaagggcgtgccaggggagaaaggccctattggccctaccgggcgtgacggtgtccagggtcctgtgggcctgccgggacccgcaggcccaccaggcgtggccggcgaagacggagataagggagaggtgggagaccctggccagaagggtactaaaggcaataaaggagagcacggccccccaggccctcctggtccaattggccctgtcgggcagccaggggccgccggggcggatggcgagccgggagcacgcggcccacaggggcactttggggcaaaaggcgacgagggaactagaggttttaatgggcctcccgggcctattgggttacaaggtctacctggaccatcaggggaaaagggagagacaggcgatgtcggccccatggggcctccagggccccccggcccgcgcgggccagccggtccaaatggcgcagatggcccacagggaccccctgggggcgttggtaacctggggccaccaggcgagaagggcgaacctggcgaaagcggctcccctgggattcagggagagcctggcgttaaagggcctcggggggagagaggcgaaaagggcgaaagcggtcaacccggcgaacccggtccacccggcccgaagggacccacaggtgatgacggtccaaagggaaaccctggcccggtgggttttcctggtgaccctggaccccccggtgagggggggcccagaggacaggacggagccaagggcgatagaggagaggacggagagcccggtcagcccggcagtccagggcctacaggggaaaacggaccacctgggccacttggtaagaggggccccgctgggagtccaggctcagaaggacgacaaggcggcaagggtgctaaaggtgatccaggggcgattggagcccccggcaagacagggcctgtcgggccggccgggcctgccggcaagcccggtcctgatggcttaagaggtctgcctggaagtgttggccagcaaggtaggcccggcgcaactgggcaggccggccctcctgggcccgtggggccgccgggattaccaggcttgcgcggtgacgcaggcgcgaagggcgagaagggacatcctggtctgatcgggcttataggaccgcccggagagcagggagagaaaggcgatcggggactacccgggccacagggtagccccggccaaaagggcgagatggggatccctggtgcttccgggcctattggccctggtggacctcctgggctaccaggcccagccgggccaaaaggcgcaaagggtgcaaccggccccggtgggcctaaaggcgagaagggagtgcagggacccccgggacatccaggcccacctggcgaggtgatccaacccctgccaattcagatgccgaagaaaacacggagaagcgttgacggcagccggctgatgcaggaggacgaagccattccgactggaggagcccccggtagtcctggggggttggaggaaatcttcgggagcctggattctctgcgcgaagagatcgagcagatgcgacgccccacaggcacccaggattcaccagcgagaacatgccaggatctgaagctgtgccacccagaactgcccgatggagaatactgggtcgaccctaaccagggctgtgctcgcgatgccttccgtgttttctgcaattttacagctggtggggaaacatgcgttacaccacgggacgatgtgacgcagttttcatacgtggactcagaagggagtcctgtgggagtcgtgcaactgacattcctaagactgttgtcagtctcggcacatcaagacgtgtcatatccttgcagtggtgccgctcgagatggacccctgcgattgagaggggccaatgaggatgaactgtcgccggagacttccccctatgttaaggagtttagggacggatgccagactcagcagggtagaactgttcttgaggtcaggaccccagtgttggaacagctccctgtcctggacgcatctttttctgatctgggcgcccccccaagacggggaggggttttactgggtccggtttgtttcatgggctag

SEQ ID NO: 232638 - DNA, 5070 bp, Artificial Sequence
  derived and/or modified sequence
atggagagatgttctagatgtcatagacttctgcttttgcttcctttggttctcgggttgtctgccgcgcctggatgggcgggcgctcctccagtggatgtcctgagagcgctccgcttcccttccctgcctgacggcgtgagaagggcgaaggggatctgcccagccgatgtggcctaccgggtagcacgcccagcgcagcttagtgcccccactcgacaactgtttcccggaggattccctaaggatttctccctcctaacagtggtgcgcacgaggcccggcctgcaggctccgctgctgaccctgtactctgcgcagggtgtgaggcagctcggtctggaacttggtcgtcctgtaaggtttctctacgaggaccagactggcagaccacagcctccatctcagccagtgttcagaggtttaagccttgccgatggaaaatggcaccgcgtggcggtggccgtcaagggccaaagcgtcacgttgatcgtggactgtaaaaagcgggtgactcgtcctttgccccgctctgcccgtcccgtgttggacacgcacggtgtaatcatcttcggcgcccggatccttgacgaggaggtgttcgagggagacgtccaagaactcgccattgttcccggagtgcaggccgcctacgagagctgtgaacagaaagaattggagtgcgaaggtggccagagggagcggccgcagaaccaacaaccgcaccgcgcccagcgctccccacagcagcagccatcgagactgcatagaccgcaaaatcaagaaccacagtctcaggagcagacggacctgcaggttccacccacagccgaccggtttcaagccgaagagtacggggaaggtggaaccgatccacccgagggaccttacgactacacttacggatacggagatgactatcgggaggaaaccgagctgggtcccgccctttctgcagagacagctcactctggggcggccgcccatggacctaggggtttgaaaggtgagaagggggagcctgccgtgcttgagcctggtatgctcgtcgagggccctcccggacctgaggggccagctggcttgatcggaccccccggaattcaaggcaaccctgggcccgttggagacccaggagaaaggggccctcctggtagggctgggctgcctggctccgacggcgctcccggaccacccggaacatccttgatgctaccttttagatttgggtcgggcggtggtgataagggccccgtggtcgccgcccaggaagcccaggcccaggcaattctccagcaggccaggctcgcactgcgcgggcctccagggcccatgggatataccggtcggcccgggcccctgggccagcctggctcccccggcctgaaaggggagtcaggcgacctggggcctcagggcccaaggggccctcagggtttgacaggcccccctggaaaggcgggacggaggggacgggctggcgcagatggcgcacgggggatgcccggggatcctggcgtgaaaggagataggggctttgacggactgcccggattgcccggcgaaaagggccacaggggtgataccggtgcacaaggtctaccggggccccccggcgaggatggcgagcgtggcgatgacggcgaaataggaccacggggactcccaggcgagtctggccctcgcggactgctgggaccaaaggggcctcccgggatccccggcccccctggcgtgcgtggcatggacggccctcaagggcccaagggcagcctggggccacaaggagagccagggcctcctggtcagcagggaacaccaggcactcaagggctgcccggtccacaaggagcaataggaccccacggcgaaaaaggccctcaggggaaacccggactccccggaatgcctgggtcagacggcccccccggtcaccccggcaaagaagggccaccgggcaccaaagggaaccaggggccatcagggccgcagggcccgcttggatatccagggccccgtggggtgaagggggtggatggtatacgcggcctcaaagggcataagggcgagaaaggagaagatggatttcctggcttcaaaggggacattggggttaagggggaccgtggcgaggtgggagtgccaggcagtcgcggtgaggatggccctgagggtcctaagggcagaaccggaccgaccggggacccgggcccgccggggttgatgggcgagaaagggaagctgggtgtccctgggctgccaggctatccaggtagacagggacctaagggcagtcttgggtttccaggctttcccggcgctagcggagagaagggcgcacgtggattaagcgggaaatccggtccaaggggtgagcgcgggccaacggggccccgcggacagcgtggcccacgtggagctacaggcaagtcaggggcaaaaggaactagcgggggcgatggcccacacggaccacccggtgagcgcggtcttccaggcccccaaggtcccaacggctttccagggccaaagggtcctccgggtcctccagggaaagatggtctaccagggcacccaggccagcggggcgaagttggttttcaaggcaaaaccggccctccaggccctccaggagtggttggaccacagggggctgctggtgaaactggcccaatgggagagcgcggccacccaggccccccagggcctccaggcgaacagggcctcccgggcactgctggcaaagaaggaaccaaaggagaccctgggccccctggcgctcccggaaaagacggccctgccggactccgtggcttccccggggaaagaggtctgcctggcactgctgggggaccaggtctcaagggtaatgaaggtccttctggacctcccggtcctgctggcagtcccggtgagcgaggggccgcgggtagtggcggccctatcggtcctcccggacgtcccgggccccagggtcctcccggcgctgctggcgagaagggcgtgcctggggagaagggaccaattggacccacaggccgcgacggcgtgcagggacccgtcggcctgccaggaccggccggacctcccggtgtcgctggggaggatggagacaagggtgaggttggtgatccgggacagaaagggaccaagggcaacaaaggagagcacgggccaccaggcccgcctggacccattgggcctgtggggcagcctggagcggccggggcggacggagaaccaggggcaagagggccccagggccacttcggagccaagggggatgaaggaacccgaggatttaatggccccccggggcccatcgggctgcaggggttgcccggccctagtggagagaaaggagaaactggcgatgtaggtccgatggggcctcctggtccaccgggcccacgggggcccgccggacccaacggagctgacgggccacagggacctcccggtggagtcggcaatttgggcccccctggtgagaagggcgagcccggggaaagtggttccccaggcattcagggtgaacccggggtgaagggtccaaggggcgagcggggagagaagggagagtccggacaacctggcgaacccggacctccgggaccaaaggggcctacaggggatgacggacctaagggcaatccaggacccgtcgggttccccggagatcccggcccaccaggagagggtggtcctaggggtcaagacggagccaaaggagatcggggtgaagacggcgaacctgggcagcctggatctcctggcccgactggtgagaatggcccgcctggccctctgggcaagcgagggccagcagggagccctggaagtgagggtcgtcaaggcggaaaaggcgcgaagggtgaccccggggctattggggcgcccggaaaaactggtcccgtaggccctgccggacccgccggaaagccaggccccgatggactgagaggattgcccgggtctgtcggacagcaaggaagacccggtgcaacaggccaagccggtcccccaggaccagtgggcccaccaggactccctggactgcgcggagacgctggtgctaagggcgagaagggtcacccagggttaatcgggctcatcgggccacctggagaacaaggggaaaaaggagatcgagggctgccaggaccacagggatccccaggccaaaagggtgagatgggtatcccgggggcaagcggacctatcggtcctggcggccctccgggcctcccggggcccgcaggaccgaaaggcgctaagggtgcaaccggcccaggcgggccaaagggcgagaagggcgtccagggtccaccaggacacccaggcccacctggcgaggtcatccaacccctacctatccaaatgccaaagaaaacgcgccgctctgtagacggctctcgccttatgcaggaggacgaagccatccctactggtggggctcccggaagtccaggaggccttgaagagatctttgggagtctcgactccttaagagaggagattgagcagatgaggagacctactggaactcaggattcaccagcacgtacttgtcaggacctaaagctttgtcacccagaattacccgacggagagtattgggtggaccctaatcagggatgtgcccgagacgccttccgggtcttttgcaattttaccgctgggggggagacatgcgtaactcctagagacgatgttactcagttttcttacgtcgactcagagggaagccctgtgggagtcgtacagctgacattccttaggctgctgtccgtcagcgcccaccaggatgtttcctacccctgcagcggtgccgcaagggatgggcctttgaggctgcggggagccaacgaagacgagctgtccccagagacatccccctatgtaaaggaattcagagatgggtgccagacacagcagggaagaaccgttttagaagtgaggacgccagttcttgagcaattgcctgtgctcgacgcgagcttttccgatctgggggcccctccaaggcgaggaggtgtgttgctcggccctgtctgctttatggggtag

SEQ ID NO: 232639 - DNA, 5148 bp, Artificial Sequence
  derived and/or modified sequence
atggagaggtgtagtcgttgccacagactgctccttctactgcccttagttctcggactctctgcggcccctgggtgggctggcgcacccccagtcgatgttctgagggccctgaggtttccatccctacccgatggggttagacgggccaaaggaatctgtcccgcagatgtggcatatagggtcgctagaccagctcagctaagcgctccaacacggcagcttttccccggcggtttccctaaggacttttctctactgacagtggtgcgaaccagaccaggtctgcaggctccactgctaacgctctattccgctcagggagtgagacagttgggcctagagctgggtagaccggtgcgttttctatacgaggatcagacaggaaggccacaaccccccagccagcctgtgttccgagggctgagcttagcagacggaaaatggcaccgagtggcagttgctgtgaaaggccagtctgttaccttgattgtcgactgcaaaaagagagtcactcgaccccttcctaggtcagccagacccgtgctcgatacacatggagttatcatatttggcgccagaatcctggacgaggaggtttttgagggcgatgtgcaggaattggccattgtgcctggcgtccaagcagcctatgagtcatgtgagcagaaggaattagagtgtgagggcggacagcgcgagaggccacaaaaccagcagccacatcgggcacagcggagcccacagcagcagccaagccggctgcaccgacctcaaaaccaagaacctcagtctcaacccacggaaagtctctactatgactacaagcccccctattacgatgttatgacgaccggaactactccagattatcaggaacaaactgacctccaggtacctccgacagcagacaggttccaggcggaagagtacggtgaaggcgggaccgatccacccgagggaccctatgattacacctacgggtatggcgatgattaccgtgaggaaacggaactcgggcccgctttgagcgctgagacagcccacagtggagcagcagcacatgggccgcgtggtctgaagggagagaagggagagcccgcagtgctggagcctgggatgctcgtggagggacccccaggacccgaagggccagccgggctgatcgggccgcccggcattcaaggtaatcccggcccagtcggcgatcctggcgaaagaggtcctcctggcagggctggcctcccaggcagcgatggcgcgcccggccccccaggtaccagccttatgctgccctttcggtttgggtctggggggggagacaagggaccagtggtggccgcccaagaggcccaggctcaggcaattctgcaacaagctcggctcgccctccggggtccacccggaccaatggggtatacagggagacctggccctctggggcagccaggttctcctgggctgaagggagagtccggagatcttggccctcagggaccgcgtggaccacaggggctgacgggtcctccaggaaaggcggggcgccggggccgggccggtgctgacggtgctcggggaatgccgggagatccaggcgtgaagggcgatcggggatttgatggactgccagggctgccaggcgaaaaaggacacaggggagataccggggcccagggactaccaggcccccccggtgaggacggcgaacgaggcgatgatggtgagatagggccacgcggtctcccaggggaatccggccctagaggacttcttgggccaaagggacctcctggaatccccggcccccccggcgtgcgcggcatggatggcccccaaggcccaaagggcagcttaggacctcagggtgagcccggcccacctggtcaacagggcacacctgggacgcaggggctgccaggtccccagggggccatcggaccccatggcgagaaggggccccagggaaagcccgggttgcctggcatgcctggatctgatggaccccctggccatccagggaaggaggggcccccaggcacgaaaggcaaccaaggcccttccggaccacagggtccactgggctatcctgggcctcgaggagtgaaaggggtagatggcatcagaggcctgaagggccacaagggagagaagggcgaagacggttttccaggctttaaaggggatattggagtgaagggggaccggggggaggtgggtgttccaggatcccggggcgaagatggacctgagggccctaaaggccgcacgggaccaactggggacccaggccccccagggctgatgggcgaaaaagggaagcttggtgtgcctggtctgccaggctatccaggtagacagggtcccaaggggtccttggggttcccagggttccctggcgctagtggagaaaagggagcgaggggcttgtcaggcaagagtggtccaaggggagaaagaggcccaaccggccctagaggccagagaggtcctcggggggccaccgggaaatctggagcgaaaggcactagcggcggagatggcccacacggaccaccgggtgagaggggtttacctgggcctcaaggccctaatggatttcccggaccaaaaggcccgccgggccctcctggcaaagacggcttaccagggcatcccggtcagcgcggagaagtcggcttccagggcaaaactgggccccctgggccccccggcgtagtaggacctcagggtgctgcaggagaaacaggccctatgggtgagcgcggccaccctggcccgcccggaccacccggtgaacaagggctgccaggcacggccggcaaagagggcactaagggcgatcccgggcctccgggggcacctggaaaggatggaccggccggactgcgcggattccccggagagcgcggcctgccagggaccgcagggggtcccgggcttaaaggaaatgaaggccccagcggccctcccggcccagcaggaagcccaggggaaagaggcgccgccgggagtggtgggccaattggacctcctgggcgaccaggtcctcagggcccgcctggcgccgcaggcgagaaaggggtcccaggtgaaaaaggacccatcggaccgaccggacgcgacggggtgcaggggcctgtgggcctgcccggccccgctggccccccgggtgtggctggggaggatggagacaaaggagaagtgggcgaccctggccagaaaggcaccaagggcaacaagggagaacatggcccgccagggcccccagggccaatcggtccagtgggacaacctggggctgccggagcagacggggagccaggtgcacgaggcccgcaaggccactttggcgccaagggtgacgagggcacaaggggcttcaacggaccccctggccccatcggtctccagggcctgccgggccccagtggcgagaaaggagagacaggagatgtgggtccaatgggaccacctggaccaccaggtccaagaggccccgccggcccgaatggcgccgacggtccgcaaggaccacctggcggagtgggaaatctggggccacctggcgaaaagggagagccaggggaatccggcagcccgggaattcagggcgaaccaggggtcaaaggacctcggggagaacgcggggagaagggcgagagcggccagcctggggagcctggaccacccggacccaaaggccccacaggcgacgacggacctaagggtaaccccggtcctgttggtttccctggagatccggggccacccggggaaggtggacctcggggacaagatggtgcgaaaggcgatcggggcgaagatggagagcctggccagcccggaagtcctggtccgacgggcgaaaatggccctccagggcctctggggaagagaggcccggccggtagccccggatcagagggccggcagggaggcaagggcgctaagggtgaccccggcgctataggcgccccaggcaaaaccggccctgtagggcctgctggcccagccggaaaacctggtcctgatggtctgaggggactgcctgggtcagttggccagcaggggaggcctggggccaccggccaggcaggcccccccgggccagtggggcctcctggacttcccggattgcggggggacgcaggtgctaagggagagaaaggccaccccgggctaattggcctgattggcccgcctggggagcagggcgaaaagggcgataggggtttgcccgggcctcaaggctccccaggtcagaaaggtgaaatgggcatcccaggagcgagtggtcccatcggacccggtggacctcctggcctgcccggcccagcagggccaaaaggcgcaaaaggagccacggggcctggcgggcccaaaggggagaaaggggtgcaagggcctccgggccatccagggccacccggcgaagtgattcagcccctccctatccaaatgcccaaaaagactcgcagatctgtagacggatcccgcttgatgcaggaagacgaggctatccctacaggcggtgctccggggtcccccgggggattagaggagatatttggctctctcgactccttgcgtgaagagattgagcagatgcgccgtcctacaggaacacaggacagcccagcccggacttgccaggacctgaagctgtgccaccccgaattaccggacggagagtattgggtcgacccgaaccaaggttgcgccagggatgcctttcgggtgttttgtaattttactgcaggcggggaaacctgtgtgacccccagggatgacgttactcaattttcctatgtcgactccgaaggctctcccgttggtgtggtgcagctgacctttttgagactgctttccgtgagcgcacatcaggatgtctcatacccttgctcaggagcagctcgcgacggccccctacggttgcgcggcgcaaatgaagacgagctcagcccagaaacctccccatatgtcaaggaattcagagatgggtgtcagacccaacagggtagaactgtgctcgaggtccgtacacccgtgcttgagcagctgcccgtcctagatgcatccttctcagatctaggcgctccaccccgcagaggaggtgttttgcttgggcctgtgtgctttatgggctag

SEQ ID NO: 232640 - DNA, 5211 bp, Artificial Sequence
  derived and/or modified sequence
atggaaagatgcagccgctgtcaccgccttctactgcttctccctctcgtcctgggacttagcgccgcacctggctgggctggagcaccgcctgtcgacgtgctgcgagccttaagatttccgtccctccccgatggcgtgcggcgcgcaaagggcatttgtcccgccgacgtcgcataccgggttgccaggcctgcccaattatcagctcctacaaggcaactgttccctggggggtttcccaaagacttttcgttattgactgtggttagaactagacccggactgcaagcccctctactcaccctctactcagcccagggagtgaggcagctaggtcttgagctcggacgaccagtgagattcctctacgaagatcagacgggaaggccacaacccccctcacaacccgtgttccgcggcttgagtctcgcagacggtaagtggcacagggttgccgttgcagtgaaaggacaatccgtcactcttatagttgactgcaaaaagcgagtgaccaggccccttcctcggagcgcgcgacccgtgctggacacacacggcgtgattatcttcggcgctagaatcctggacgaagaagtctttgagggtgatgtacaagagctcgctattgttccaggagtccaggctgcgtacgagtcatgcgagcaaaaagaattagagtgtgaaggaggacaaagagagaggcctcagaaccagcagccccaccgggcacagcggtccccccagcaacagcctagtagacttcacaggccccaaaaccaagagccacaaagccagccaaccgagtccctgtattacgactatgagcctccttactatgatgtcatgaccacgggcacaacacccgactaccaagatccaaccccgggcgaagaggaggaaatactcgagagctctttattgccgcctctggaggaagagcagaccgatctccaagtgccccccaccgccgatagattccaggcagaggagtatggcgagggtgggacagatccacctgagggaccttatgactatacctacggatacggcgacgactacagagaagagaccgaattaggtcctgccctgtcagctgagaccgcacattcaggagccgctgcccacggccccaggggcctgaaaggagagaagggcgaaccagcagtactggaacccgggatgttagtggagggaccgccagggccggaaggacccgctggactgattggacctccaggaattcagggtaaccctggcccggtgggcgatcccggagagcggggtcccccaggcagagccggtttgccaggcagcgatggcgctcccggtcccccaggaacctcccttatgttaccgtttagattcggctccggcggaggcgataaaggtccggtcgtcgcagctcaagaggcacaggctcaggccatcttgcagcaggcaagattggcattacgcggacctccagggcccatgggctacacaggacgaccaggtcctctagggcagcctggctcgccaggtctaaagggggaaagtggcgatctgggcccacagggtcctcggggaccacagggactgacaggcccgccaggaaaggccggcaggagaggtagggcaggtgccgacggggcccgcggaatgcccggcgatcctggggtgaagggcgatagagggtttgacggactgccaggccttcctggtgagaagggtcacaggggcgacaccggcgcacaaggactgcccgggcccccaggggaagatggagaacgcggcgatgatggagagatcggaccacgagggttgccaggcgagtcagggccacgtgggctgctgggccccaaaggaccacctggaatacccggcccacctggagtcagaggaatggatggaccacagggcccaaaaggaagccttgggccccaaggggagcctggtccccccggccagcaaggcacccccggcacccagggccttcccggacctcagggagcaatcggacctcacggcgagaaaggccctcaggggaaaccaggactaccagggatgccgggaagcgacggcccaccaggacaccccggcaaggaaggacccccaggcacaaagggcaatcagggaccatcagggccgcagggacctcttggctacccaggtccccgtggggttaagggggtggacggcattcggggtctgaaaggccacaaaggtgagaaaggcgaggatgggtttccagggtttaagggcgatattggagtgaagggagatagaggcgaggtgggagtgcccggtagtagaggggaggacggaccagagggacccaagggacggaccggaccaacgggagatcctgggccacccggtctgatgggtgagaagggcaagctgggtgttccgggactccctggctaccccgggcgccaggggcccaaagggagtcttggattccctggttttcctggagcgtccggtgaaaaaggggcccgtggactctcaggcaagagtggaccccgaggtgagagaggacctacaggcccaaggggacagcgcggaccacgaggggccaccggcaagagtggagccaaaggcacgtccggaggcgacggtccccatggacccccgggagaaagaggtctcccaggaccgcaggggcctaacggctttcccggccccaaaggaccacccggacctcctggcaaagatgggctacctggccatcctggtcagcggggggaggtcggatttcagggaaagaccggaccacctggaccacccggggttgtcggaccacagggcgctgctggagagaccggtcctatgggagagagagggcatcccgggcccccaggtcccccgggagaacaaggattacctgggaccgctgggaaggaaggcactaagggcgacccagggccaccaggagcccctggcaaggacggtcctgctggactgcggggttttcccggggagcgagggttgccaggcaccgccggaggacctggtttgaaggggaacgagggaccctctggcccgcccggtccggctggtagcccgggcgagagaggcgcagctggctccggcggacccatcgggccacctgggcgtcctggccctcagggtccaccaggagctgccggagaaaaaggggttccaggcgagaaaggaccaattggtcccactggaagggatggggtgcaaggcccagttggattacccgggcccgcagggccgcctggagtagccggggaagatggcgacaagggcgaggtgggcgatcctggacagaaagggacgaaagggaacaaaggtgagcatggaccccccggaccacctggccctatcggtcccgtgggacaaccgggggctgccggcgcagatggcgagcctggcgctagagggcctcagggacactttggcgctaagggggacgaaggtacacgaggcttcaatggcccccccgggccaatcgggctccagggactcccagggcctagcggcgagaagggcgaaactggggatgttggtcctatggggccccccggcccccctggacctcgagggcctgccggccccaacggcgctgacggaccccaaggaccacccgggggggtgggaaatttgggaccacccggggagaagggagaaccaggagaatccggcagcccaggcatacaaggagaacccggagtgaaaggaccaagaggcgagcgcggcgaaaagggtgagtctggtcaacccggtgagccaggtccacccggaccaaaagggccaactggcgacgatgggccaaagggaaatccaggtcccgtcggatttcccggagaccctggacctccaggtgagggcgggcccagagggcaggacggtgctaaaggcgatcgtggtgaggacggggaaccaggacaacctggttctccaggccctacaggggagaatgggccacccggccccctcggaaaacgcggccccgccgggtcccccggtagtgaaggcaggcaaggcggaaagggcgcaaaaggggaccctggggctattggcgcacccggcaagacagggcctgtaggtccagccggacctgccggtaaaccaggaccagacggtctacgcggtctgcctgggtcagtcggacagcagggacggcccggagccacaggacaagccgggccacccggtcccgttggccctcccggcctcccaggtttgaggggagacgcgggagctaagggcgaaaagggtcatccaggacttatcggactgatcggcccacccggtgaacaaggagaaaagggcgacagaggtttgcctggcccccaaggctcaccgggccagaaaggagagatgggcatccccggggcatcgggtcccataggtccagggggccctcccggtctacccggtcctgctggacctaagggagcaaagggcgcgactggacccggcggacctaaaggggaaaagggagtacagggacctccaggccatcccggaccacctggcgaagttatccagcccttgccaatccaaatgccaaagaagaccagaaggtctgttgacggatccaggctgatgcaagaagacgaggcaatccctaccggtggtgcacctggttccccaggcggactggaagaaatcttcggtagtcttgacagccttagagaggaaatcgaacagatgaggcgcccaaccggaacacaggactcaccagctcgcacctgccaagacctcaaactttgtcatcccgaactgcccgacggggaatattgggtcgaccccaaccagggttgtgccagagacgcgttccgcgtgttctgtaacttcacagccggaggagagacctgcgttacccctagagacgatgttactcagttcagctacgtagattctgagggttcccccgttggcgttgtccaactgacctttttacggctccttagcgtatctgctcatcaagacgtgagctatccctgctccggtgccgcacgagatggccccctgagacttcgcggcgccaatgaagacgagctcagtcctgaaacaagtccatatgtgaaggaattcagggatggctgccagacccagcaggggaggactgtgttagaagtccgtactccggttctggaacagctgcccgtgcttgatgcaagtttctccgacctgggcgccccccccagacgaggaggcgtgctacttggccctgtgtgctttatgggatag

SEQ ID NO: 232641 - DNA, 5148 bp, Artificial Sequence
  derived and/or modified sequence
atggaacgctgctctaggtgccatcggctccttttgttgctaccgttagtattaggcttatctgccgctcctgggtgggccggagcacctcccgtggacgtccttcgtgccctccggttcccatctctcccagatggagtaagaagggccaaaggcatttgtcccgccgacgtggcctaccgagtagcgagaccagcccagctgagcgctccaacccgccaactgttccctggcggttttccaaaggacttctcattgttaactgtggttcgcacgcgcccaggtctgcaagcccccttactcacattgtacagcgcacagggtgtccggcaacttggtctggagttaggacgtcccgtaagatttctgtatgaagaccaaacgggaagaccccagcctccatctcagcccgtctttcgcggactttctctggcagatgggaagtggcaccgagtcgccgtggctgtgaaaggccagagtgtgactctcatagtcgattgcaagaaaagagttacacgcccactacctcgaagcgcccggcctgtcctggatactcacggtgtgatcatatttggagcaaggattctagacgaagaggtgttcgaaggggatgtgcaagagctggcaatagttcccggggtccaggccgcatatgaatcatgcgagcaaaaagaattagagtgtgagggtgggcagcgcgaacgaccccagaatcaacagccacatcgcgcccagcgatcccctcagcaacagccttcccgactgcatcggccgcagaaccaggaacctcagtcacagccaaccgagtcactatactacgattacgagcctccttactacgatgtcatgacaacaggcactacccccgattatcaagaacaaacagatttgcaagtgcccccaaccgccgacagatttcaggcagaggaatatggagaagggggcaccgacccgcctgaagggccttatgactatacctatggctacggcgatgactaccgagaggaaacagagcttggtccggctctgagtgccgagaccgctcacagtggagccgctgcacacggaccccgtgggctgaaaggtgagaaaggagaacctgctgtccttgaacctgggatgctcgtggaaggaccccctggtcccgaaggccccgcaggcctgattggtcctcccggaatacaaggcaacccagggccagtgggtgatccaggtgaaagaggtccgcctggccgagcagggctacccggcagcgatggtgcacctggcccacctggcacaagcctcatgctgccattccgctttggctcaggtggcggtgataaggggcccgttgtggccgcacaagaggcacaggctcaggctatcctgcaacaagcacggctggcgttaagaggccctccaggcccaatgggatacacaggcagacctggtccgcttggtcagcccggctctcccggtctaaagggtgaatctggtgacctggggccacaaggcccccgcgggccgcaggggctcactggtccacctggaaaagcgggcagaagagggcgcgccggcgcagatggagcacgcggaatgccaggagatcctggggttaaaggggacagagggtttgacggactacctgggttgcccggagaaaaggggcataggggcgacacaggcgctcagggccttccaggaccacctggcgaagacggagagcggggcgatgatggcgagatcgggccacgcggactgcctggtgaatcaggtcctagaggccttctcgggccaaaaggccctcccgggattcctggtccacccggcgtcaggggtatggatggtccacagggtcccaagggaagccttggccctcagggagaaccaggtcccccgggtcagcaggggacgccaggcacacagggactccctggcccacaaggcgccatcgggcctcacggagagaaaggaccacaaggaaaacccggcctgcccggtatgccagggagtgacggcccgcctggtcaccccggcaaggaaggtccaccaggtaccaaaggaaatcagggtccaagtggccctcagggcccgttaggttatccaggccctagaggcgttaagggtgttgatggtatccgtgggctgaagggccacaaaggcgaaaagggagaagatgggttcccaggatttaaaggcgacattggcgttaaaggtgatcggggggaagtaggagtgcccggatcccggggagaggacggacccgaggggccgaaaggtaggacaggaccaacaggcgatcccggcccacctggcttgatgggagaaaaaggcaagctcggggtgccaggtctaccaggttatccaggacgtcagggccccaaagggagtctgggatttcctggctttcccggtgcatctggtgagaagggagccagaggtctcagcggaaagagcggcccgagaggtgaacgcggaccaactggacccagaggccaacgcggaccaagaggcgcaacaggcaagagcggtgcaaaaggtacctctggaggggacgggccgcatggccctcctggagagcggggattgcctgggccccaaggacctaatggttttcccgggcccaagggaccacccggaccccctggtaaagacggactacctggccatcccggacaacggggtgaagttggttttcagggtaaaacaggcccgccaggaccacccggagtcgttgggccccaaggcgccgctggtgagacgggaccaatgggcgaaagaggacacccagggcctcccggtccccccggggagcagggattgcctggaacggctggaaaagaaggtacgaagggggacccaggcccgccaggtgccccaggtaaggatggtcctgccgggctgcggggcttcccaggcgaaagaggattaccaggaacagctggcggacctggcctaaagggaaacgaaggaccctcaggacctccaggacccgccggaagcccaggggagcgcggggccgctggctccggcggccccattggacctcccggaaggcccggaccccaaggtccaccgggtgccgcgggggagaagggtgtgcccggcgaaaagggccccatcggaccaacaggtcgtgacggcgttcagggcccagtaggactcccaggaccagccggaccccccggagttgctggtgaagatggcgataaaggagaagtgggcgaccctggacagaaggggacaaagggcaacaaaggcgaacacggccctcccgggccaccaggtcctatcggtccagtcggacagcctggagctgcaggagcagacggagaaccaggcgccaggggtcctcagggccacttcggggcaaagggagacgagggaaccaggggctttaacggcccccccggtccaatcgggttacaagggttgccagggcccagcggagaaaagggtgagactggtgatgttggaccgatggggccaccaggacccccaggccccagaggtcccgccggaccaaacggtgccgacggcccccagggacctcccggaggcgtggggaatctgggcccacccggggagaagggagaaccaggtgagagcggcagcccaggaatccagggagaaccaggcgtgaaagggccccgcggtgagcgtggggagaaaggagaaagcggacaaccaggggaaccaggcccaccaggacctaagggacccacaggtgatgacgggcccaaaggcaaccctggaccggtggggttcccgggcgacccgggaccaccgggcgaaggaggtcctagaggacaagatggtgccaagggtgacaggggggaagacggcgagcccggtcagccaggatcaccaggaccaacaggcgagaacggaccccccgggccccttggaaaaagaggaccagccgggagcccaggtagtgagggaaggcagggcggaaagggagcaaagggcgacccaggggcaattggggcaccaggtaagacaggacccgtaggtccagcagggccggccggaaagcctggaccagacggacttcgcgggctgcccggttccgtgggacagcagggcaggccaggagccaccgggcaagctggcccccccggccctgtcggcccaccagggttgccaggcctgaggggcgatgcgggcgctaaaggggaaaagggacacccaggattgatcgggctgatcggtccgcccggcgaacaaggggaaaagggtgacaggggactccctggccctcagggcagccctggccagaaaggagaaatgggtattccaggagcttcaggacctattggccccgggggcccccctggtttgccagggcccgccggccccaaaggtgcaaagggcgctaccggacccggaggacccaaaggcgaaaagggagtgcaggggcctcccggccatccgggcccaccaggggaagttatccagcctctgccgatccagatgcctaagaaaacacgcagaagcgtcgacggatcccggttgatgcaagaggatgaggccataccaacaggcggagcaccaggctcaccaggcggacttgaagaaatatttggctccctcgactcactgcgagaggaaatcgaacaaatgcgaagacccaccggtacacaggactcccctgcacggacttgtcaggacctaaagctatgtcatcctgaacttccagatggtgaatattgggtggaccccaaccaggggtgcgcacgagatgcttttcgagtgttctgtaacttcaccgcaggaggtgaaacatgcgttacgcccagggatgatgtgacacaatttagctatgtggacagtgaaggctcccctgtgggggtggtccagttaacattcctgcgacttttgtcagtgtccgctcatcaggatgtgtcatacccatgtagtggtgcggctcgggacggacccctccgcctccgtggtgccaacgaggacgaattgtctccagaaaccagcccctatgtaaaagaattccgcgacggatgccagactcaacaaggacgcaccgttctcgaggtgagaactcccgtcttagaacaattacccgttctggacgcctcattctcagacctgggtgccccaccaaggagaggaggcgtgttgctcggtcccgtgtgctttatgggctag

SEQ ID NO: 232642 - DNA, 5070 bp, Artificial Sequence
  derived and/or modified sequence
atggaaagatgctccagatgtcatcgcctgttactgctactgccacttgtactcggactcagcgccgctcccgggtgggcaggcgctcccccagtggatgttcttagagccctaaggtttccctcactgccagacggagtccgcagagctaaggggatctgccccgccgatgtggcctatcgggtggcgaggcccgcacagttgagcgctccaacacgtcaattgtttccaggtggattcccaaaagatttttcccttctaacggtggtccgcacgcgacccggactccaagccccccttctgactttgtactcagcccaaggggtacgtcaactgggactcgagctgggtagaccggtcagatttctgtatgaagaccagacaggcaggccccagcctccaagtcagcccgtctttcgcggtctttctcttgcagatgggaaatggcaccgcgtggctgtggctgtgaagggccaatctgtgacacttatcgttgactgtaaaaagcgtgtcactagaccattaccacgatccgcccgacccgttttggatacacatggagtcattatctttggcgcccgcattttagatgaggaggtgtttgaaggtgacgtccaggagctggcaattgtgccaggcgtgcaggccgcttatgagtcgtgtgaacagaaagaactggagtgcgagggaggacagcgagagaggccacagaatcaacaaccacatcgagctcaacgatccccgcaacaacagcctagcagattgcaccgaccccaaaatcaggagcctcaatcacaggaacaaactgacctgcaggtgccgccaaccgcagacagatttcaggcagaggagtatggtgaaggcggaaccgatccacccgaaggcccttacgattatacctatggctacggggatgattatagggaggagacagaactcgggccggctctaagcgctgagacagcacattcgggggctgcagctcatgggccgagaggattgaaaggtgagaaaggcgaaccagcggtgttagagccgggtatgctggtggaaggaccccccggtcccgaaggcccagccggtctgatcggaccacccgggattcagggcaaccctggacctgtgggagacccaggcgaacgcggacctccagggagagcaggactgccaggtagtgatggagcccctggtcctccaggaacctcacttatgctcccatttcgttttggatcaggcggcggggacaagggaccagttgtggcagcccaggaggcccaggcacaggcaatactgcagcaggcaaggctggctctcagaggcccacccggacccatggggtacacagggcgaccggggccattgggtcagccaggctcaccgggtctcaaaggtgagagcggagatctcggcccccagggccctaggggaccccaaggtctcaccggccctcccggaaaagcaggacggcgcggacgagccggagccgatggagcacgcggaatgccgggcgatccgggggtgaaaggagatcggggatttgacgggttaccaggattacctggtgaaaagggtcataggggtgataccggcgctcagggcctcccaggtccaccaggtgaggacggagagagaggtgatgacggcgaaattgggccaaggggattgccaggggagtcgggacctagaggtctgctaggacctaaaggcccaccagggattcctggtccgccgggggtgagagggatggatggaccacagggacccaagggatctctaggccctcagggtgagccgggcccgcccggacagcaagggacacccgggacacaggggttgcccggcccacagggagctatagggccgcacggcgaaaaagggccccagggaaagccaggtttacctggaatgcctggttccgacggaccacctggccatccgggaaaggaaggcccccccgggaccaaaggaaatcaggggccttcaggacctcagggccctctgggctatccaggaccccgtggagtgaaaggagtggacggaattcgcggactgaagggacacaagggtgaaaaaggagaggacggcttccctggattcaaaggcgatataggcgttaaaggcgacaggggtgaagtgggagtgcctggtagtaggggggaggatggaccggaagggccgaaaggacgcacaggcccaactggcgaccctggacctcctggactcatgggcgaaaagggcaagcttggcgtgccaggcctccccggatacccgggcaggcaaggaccgaagggtagcctcggctttccaggattcccgggagcaagcggagaaaaaggggcacggggcctgagtggaaaaagcggcccccgtggagaacgtggccccacgggcccaagaggccagcgcggacctagaggcgccactggaaagtcaggcgctaagggcacctctggtggtgacggaccgcatggaccacccggtgagcgggggctgcccggtccacaggggcccaatggttttccaggtccaaagggacctcccgggcctcccggaaaggatggactcccgggccatccaggtcaaaggggcgaggtgggctttcaaggcaaaacggggcctccagggccaccaggagtagtcggaccccaaggagcagcaggagaaaccgggccaatgggagaacgcggtcatcccgggccaccagggcctcccggtgagcagggtctgccggggaccgctggaaaggaaggcaccaagggagacccaggccccccaggcgctcctggcaaagacggccccgccgggcttcgcgggttccctggcgagcgaggcctccccggaacagccggtgggccgggacttaaaggcaatgagggcccgagcggaccacctggccctgccggatcccctggggagaggggagcagcagggagtggaggtccaattggcccgcccggccgtcctggacctcaaggaccacctggagcagcgggcgaaaagggagtacctggcgagaaaggtccgataggacccaccggccgcgatggcgtccaaggacccgttggccttcctggccctgcaggtccgccaggcgtagcaggagaggacggtgataaaggagaagtaggagaccccggacagaaaggaactaaggggaacaaaggcgaacatggtccgcccggtccaccagggcccattggaccagtcggccagcctggagccgctggggctgatggggaacccggagctagaggaccccaaggccatttcggagccaaaggcgacgaggggacacggggttttaacggcccgcccggccctatcggcttgcaaggtctgccaggaccatctggagagaaaggagaaacaggcgatgtcggacccatgggaccccctggcccacctgggcctagaggcccagctggtcccaacggtgccgatggcccccaagggcccccaggcggggtaggcaatctgggcccacctggggaaaagggtgaaccaggagagagtgggtctcccggaatccaaggagaacctggggtaaaagggcctcgtggcgaacggggagagaagggggagagcggccaacccggcgagccagggccccctggccccaagggaccgacaggtgatgacggacctaagggcaatccaggacctgttgggtttcctggcgaccccggacccccaggagagggtggacctcgggggcaagatggtgcaaagggcgacagaggggaggatggagaaccaggtcagccgggttctccaggaccaaccggagaaaacggcccacccggcccattaggcaaaagaggtcctgcaggcagtccgggatcagagggacgacagggggggaagggagccaagggagatccgggagctatcggagccccggggaaaactggaccggtgggccccgcgggccccgcaggcaaaccagggccagatggcctgcgcgggctgcctgggtcagtgggccagcagggcagaccaggcgctacagggcaagcgggacctccaggaccagtcggtccgccaggtctgccaggactaaggggcgatgccggagccaagggcgaaaaggggcaccccggactgattggactgatcgggccaccaggggagcagggagagaagggagatcggggacttcccggtccacaggggtcaccagggcaaaaaggtgagatgggcattcccggtgcaagtggacctataggacctgggggacctcctggattgcccggccctgcgggacccaagggagccaagggtgcaacaggacctggtggccctaaaggtgagaagggcgtccagggcccacccggtcacccaggaccgccaggcgaagtcatccagccgctgccaatccagatgccgaaaaagacaaggagaagtgtagatggctccaggttgatgcaggaagatgaagcaatacctacaggaggagctcctggttcaccagggggactggaggaaattttcgggagtctcgattccctccgtgaagagatcgagcagatgcgccggcccaccggcacacaagatagccctgcaaggacctgccaggaccttaagctgtgtcaccccgagcttccggatggcgagtactgggttgacccaaatcaaggatgtgcacgtgatgctttccgggttttctgcaattttaccgctggcggagaaacgtgtgttactccacgagatgacgttacgcaattctcctacgttgattctgaaggaagtcctgtgggggtggtgcagctgacttttttgagactattgtccgttagcgcccatcaggatgtcagctacccttgttccggcgctgcacgggatgggccacttcggctaagaggggcaaatgaggacgagctatctcctgagacctcaccgtacgttaaggaattccgtgatggatgtcagactcaacaggggagaacagttcttgaggtgaggacccccgttttggagcaattacctgtcctggacgcctccttctccgatctaggagcacccccacgccgaggcggagttctgctgggacccgtctgctttatgggctag

SEQ ID NO: 232643 - DNA, 5133 bp, Artificial Sequence
  derived and/or modified sequence
atggagcggtgtagcaggtgtcaccggttgctcctcctgttgccgttggtcctcggcttgtctgctgcacccggatgggccggtgcccctccagtggacgtgctccgcgccctgcggtttcccagccttcctgatggcgtcagaagagccaaggggatttgccccgcagacgtggcttaccgtgtcgctagacccgctcaattatctgcacccacccgacagctgttcccaggcggattcccaaaagatttttccctactcaccgtcgttagaacccgaccaggactgcaggcacctctcctgactctttactccgctcagggagtgaggcaactcggtctggaactggggcggcccgtccgctttctgtacgaggatcaaacaggcagaccgcagcccccctcccagccggtcttcagagggctttccctagcggacggcaaatggcatcgtgttgctgtcgcggttaaaggtcaaagcgttaccctcattgtggattgcaagaagcgcgttacacgccctttaccccggagcgctcgccccgtgctcgatactcatggcgttattatattcggcgcgcggatactggacgaagaagtgtttgaaggagatgtgcaagagttggcaatagtacctggcgtgcaggctgcctatgaatcatgtgagcagaaagagcttgagtgtgaaggtggccagcgtgaaagacctcagaatcaacagccacaccgagcgcaaaggtcaccacagcaacaaccttcacggcttcacagaccccagaaccaggaacctcagagtcaagatccaactcccggagaggaagaagagatcctcgagagttcgctattacctccgctcgaggaggaacagactgacttgcaagtgccccccaccgcagataggttccaggcagaagaatacggtgagggcggcactgacccccccgaaggtccttatgactatacatacggctacggagacgattacagagaagagacagagttaggcccggcgcttagcgcagaaacagctcactcaggtgcagctgcccatgggccccgtgggttgaaaggcgaaaaaggtgaaccagcagtgttagaaccaggtatgctggtggaagggccaccaggtccagagggaccggccgggctgattggacctcctggcattcaaggcaacccaggacccgtgggagaccctggagaaaggggccctccgggtagggctgggctccccggctctgatggggcacctggccccccaggtacttcactcatgctgccatttcggttcggctcgggggggggtgataaaggacccgtagtcgcagcccaggaagcacaggctcaggctatcctgcagcaggcgcgcttggctctacgtggaccacccggcccaatgggttatacaggccgcccagggccacttggccagccaggcagccctggactgaagggggagagcggcgatctgggcccccagggaccgcgtggccctcaaggactaaccgggcctcctgggaaagctggcaggagggggagagcaggtgcagacggtgcaagaggtatgcctggggaccccggcgtaaagggggacaggggatttgacggactcccaggactgccaggtgagaaaggacataggggtgatacgggggcacaaggtttgcctggaccaccaggtgaagatggagagcggggggatgatggcgaaatcggtcctagaggactcccaggtgagagcggtccgagaggcttactcggacctaagggcccacctggcatccctggccctcccggggtgcggggtatggatggaccccaaggtccaaaagggagtctcgggccccaaggagaacccggtccgccgggccaacaggggacaccagggacccagggcttaccaggccctcagggtgccataggacctcatggcgagaaaggaccgcagggaaagcctggcttacccggtatgccgggctccgacggacctcccggccaccccggaaaggagggcccaccaggtaccaaaggcaatcagggaccctccggaccacaaggacctctgggttatcccggaccacgcggagttaaaggcgtcgacggcattaggggattgaaagggcataaaggagagaaaggagaagacgggttccctgggttcaagggcgatataggtgtcaagggcgatcgtggcgaggtgggggttcccggctctagaggagaggacggaccagaaggccctaaggggcggaccggaccaactggagaccccggaccaccagggctgatgggagagaagggaaagctgggggtgcctggcctgcctgggtaccctggcagacaggggcctaaggggagtctcggcttcccaggctttccaggagctagcggggagaaaggcgcacggggcttatccggaaaatctggtccaaggggagaacgtggccctaccggacccaggggccagcgggggccccgtggcgcaacaggcaaatcaggagccaaaggaacgagcggcggagacgggccacatggtcccccaggagagcgtggacttcccggaccacagggaccaaacgggttccctgggcctaaagggccccctggcccacccggaaaggatggtttgccaggccatcccggtcaacggggtgaggttggatttcagggaaaaacagggcctcccggacccccgggagtggtgggaccccagggggcagcaggagagacaggtccaatgggcgaaagggggcaccctgggccaccaggaccacccggggagcagggactgccaggaaccgccggcaaggaggggaccaagggggaccccggacctcccggtgcccctggtaaggacggacccgccggcctgagaggcttccctggtgaacgtggtttgcctggaaccgccggaggaccagggctcaaaggaaatgaaggcccaagtggaccacctggaccggcagggtcacctggtgagaggggggcagccggcagtggggggcctattggaccccccggccgtccaggacctcaggggccaccaggtgccgccggcgagaagggcgtgcctggcgagaagggaccaatcggaccaacgggaagggacggcgtacagggaccagtgggactaccaggcccggccggtccgcccggggtggcaggcgaggatggagacaagggagaggtaggggaccccggccagaaaggaaccaaagggaataaaggtgaacatgggcctccaggtcctcctgggcccattggacccgttggccagccaggagccgccggagctgacggcgaaccaggagcacgcggaccacaaggacattttggcgcaaagggtgacgaaggaactcggggatttaatggcccccctggcccaatagggttgcagggccttccaggcccttcaggagaaaaaggagaaaccggagacgtgggaccgatgggcccccctggcccacccgggccacggggacccgccgggccaaatggtgccgatggaccacaggggccacccgggggagtcggcaatttaggcccccctggagagaagggtgagcccggagaaagcgggtcccccggtatccagggggaaccaggcgtgaagggtcctagaggtgaaagaggcgagaagggcgaaagtggtcagccaggagaaccaggtcctccagggccaaagggcccaacaggcgacgacggtcccaagggaaaccccggccctgtaggcttcccaggagatcccggaccgcctggagagggcggaccacgtggacaggatggagctaaaggcgaccgcggagaagatggcgaacccggccagcccggctcaccggggcccactggcgaaaatggtccaccaggtcctttgggcaagcgcggccctgccgggtctccaggcagcgaggggagacagggaggcaaaggagccaagggagacccgggcgcaataggggctcccggaaagacaggcccagtggggcccgcaggaccggcaggcaaaccgggccccgacggactccgcggactgccgggcagcgtgggccaacagggtaggcctggcgctacgggtcaagccggacctcctggccctgtgggtcctccgggactgccaggactgagaggggacgccggagcaaagggggaaaaaggccatcccggattaattggtctgatcggcccaccgggagagcagggagagaaaggagacagagggctccccggcccacaggggtctccgggacagaagggtgaaatgggcatccccggcgcctcaggtccaataggtcctggagggcctccagggttaccaggaccagcaggcccaaaaggagctaaaggcgctacaggccccggaggtcctaaaggtgagaagggggtacaaggtccaccgggtcatcctgggcccccaggtgaggtgattcagccgctgccgattcagatgccaaagaagacaagacgttccgtcgacggatcaagactaatgcaggaggacgaagcaatccccacgggcggggcaccagggagcccgggtggcctggaggagatttttggatcactggattccttacgagaggagattgagcagatgagacggcccactgggacacaggatagccccgcaaggacctgccaggacctgaaactgtgtcatcccgagctgccagacggggaatactgggttgatccaaatcaagggtgtgctcgagatgcgttcagagtgttttgcaactttaccgctggcggcgaaacttgtgtaacccctagagatgacgttacgcagttcagctacgttgactctgagggcagtcctgtcggagttgtccagctaactttcctgcgacttttatcagtgtcagcccatcaagacgtgtcatatccctgtagtggcgccgccagagacggaccacttcggctgcggggagccaatgaggacgaactgagccccgaaacctcgccttacgttaaggaatttagagatggctgtcagacccagcagggcagaacagtactcgaagtgcggacccccgtactggaacagttacccgtccttgatgcttctttttctgatctcggcgctccaccaaggaggggaggggtgttgcttggaccagtttgttttatgggctag

SEQ ID NO: 232644 - DNA, 1875 bp, Artificial Sequence
  derived and/or modified sequence
atggagcggtgttctcgttgccatagattgcttctcctgctacctctggtacttggtctatctgccgcacctggctgggctggcgcaccacccgtagatgtgctgcgggccctccgattcccatccctgccagatggtgtcaggcgcgcaaaaggcatatgccctgccgatgttgcttaccgagtcgccaggcccgcccagcttagcgcaccaacccgtcagctatttcccggaggctttcccaaggattttagtctgctcacagtagttaggaccagacccggactgcaagccccactgctgacactctattccgcacagggggttaggcaactgggcctagagctcgggcgcccagtcaggttcttgtatgaagatcagaccggcaggcctcagccaccatcccaaccagttttccgcgggttatccctggccgacggcaagtggcaccgcgttgcagtcgctgtgaaaggccagtccgtcacactcattgtagattgtaaaaaaagagtgacccggccgttacctagatccgcccgccccgtacttgacactcacggagttattattttcggtgccaggatcctcgacgaggaggtcttcgagggggatgtccaggagcttgcaattgtacccggagtccaggccgcttatgagagctgtgagcaaaaggaactggagtgcgaaggaggccagagggaaaggccacagaatcaacagccacatcgcgcccaacggagtccccagcagcagccatcccgacttcataggccgcagaaccaagagccacagagccaaccaacagagtccctttattatgattacaaaccgccctactatgatgtgatgaccaccggcactacccccgattaccaggaccccaccccaggagaagaggaggagattcttgagagttccctgctgccgccgctggaagaagagcagaccgacttacaggttccaccaaccgcagaccgattccaggcggaagagtatggcgagggcggcacagatccaccagagggcccctatgactacacctatggatatggggacgattatagggaagagacagaactgggaccagcattatcagcagaaaccgcacactccggagctgcagcccatggaccccgcggcctgaagggagagaagggcgaaccagctgtgctagaaccaggaatgctcgtcgagggacctcctggtcccgaggggcctgcgggcttgataggacccccaggcatccaaggtaatccaggtcctgtgggtgacccaggcgagcgcggaccaccaggcagggcaggcctcccagggagcgacggcgcacccggaccccccggaacctccctgatgctgccatttcgtttcggctcaggcggaggtgataaaggaccagtggtggctgctcaggaagctcaggctcaggccattctacagcaagctaggctggcactgcgaggaccccctggcccgatgggatacacaggcaggccaggcccactgggacaacctggaagccctggcttaaaaggcgagagcggagatcttggcccccaggggccacgcggtccacagggcctaacgggaccaccgggcaaggcaggaagacggggtagagcaggagcagatggggcccggggtatgccaggagaccctggggtgaagggcgataggggatttgatgggttgcctggcctgcccggcgagaaggggcatcgaggcgacactggtgcacaaggactgccaggacccccgggtgaagacggggagagaggggacgacggagagatcggtccgagaggactccctggcgaaagcggccccagaggtctgttaggcccaaaaggacctcccggaatcccaggacccccctag

SEQ ID NO: 232645 - DNA, 1875 bp, Artificial Sequence
  derived and/or modified sequence
atggagcggtgttcccgctgtcaccgattgctgctcttactccccctggtcctaggattgtccgctgctccagggtgggccggcgctcctcctgttgacgttcttagagcactgcgtttcccttcacttccggatggcgtgagacgtgcaaaaggtatctgcccggctgacgttgcctacagggttgcacgccccgcccagctgtctgcccctactaggcaactgtttcccggaggctttccgaaagatttctcactcctgaccgtggtgcgcacccgccccggcttgcaggcaccactgctcactctgtatagcgcccaaggagtcagacagctgggtttggagctgggacgacccgttagattcctctacgaggaccaaactggccgcccccagccaccttctcagcctgttttccggggattgtctctggctgatggaaagtggcatcgtgtcgctgtggccgtgaaaggacagagtgtcacactgattgtcgattgcaagaaacgcgttactaggcctttacctagatcagcacgacctgtactggatacccatggcgtgataatctttggggcccggatcctggatgaggaggtttttgaaggtgatgtgcaggaattagcaatcgtccctggtgtgcaggctgcatacgagtcctgcgagcagaaagaattagaatgtgaggggggacaaagggagcgacctcagaatcagcaaccacaccgtgctcagaggagtccacagcagcaaccgtcccggctccacaggcctcagaaccaagagccccaaagccagccaaccgaatctttatattacgactacgaacctccgtactacgacgtcatgaccacaggcactactcctgattaccaggatcctacccccggagaggaagaggagattctcgagagctccttattacccccgttagaggaagaacagacggaccttcaggtgccccctactgctgacagatttcaagcggaggagtacggtgaaggtgggacagacccgccagaagggccatacgattatacctacggctacggagatgactatagagaggagacagaactgggccctgcccttagtgcggagacagcccatagtggagccgcagctcacggccctcgcggactgaaaggcgaaaagggggagcccgctgtcctggaacctggtatgctggtagaaggacccccaggaccagaaggtccagccgggcttatcgggccacccggcattcagggcaatccaggacctgtcggcgaccccggcgaacgcggcccccctggtagagctggcctgcctggcagcgatggcgctcccggacctcctggtacatcactgatgctgcccttcagatttggtagtggcggcggcgataaaggtcctgttgtcgcagcccaagaggctcaggcccaggccattctgcagcaagcaaggttggccttgcgaggaccccctggaccaatgggctatactggacgcccagggccactcggacagcccgggagtccaggactgaaaggggaatcaggtgacttgggaccacaggggcccaggggtcctcaaggactaaccggaccccccggaaaagcaggcagacggggacgcgcgggggccgatggtgcaaggggaatgcccggagatcccggcgttaagggggatcgggggttcgacgggttgcctggactgccaggggaaaagggtcataggggagatacaggtgcccagggcctccccggcccgccaggcgaggatggcgagaggggagatgacggggagattggaccaaggggtctccctggcgaatctggacctcgaggactactcggcccaaagggaccacccggaattcctggccccccgtag

SEQ ID NO: 232646 - DNA, 5133 bp, Artificial Sequence
  derived and/or modified sequence
atggaaagatgtagtagatgtcaccgacttctgctgttgctgccccttgtacttggtctgtcagccgctcccggatgggcaggggccccgcccgtcgacgtgcttagagcactgcggtttccctccctcccagatggcgtgcgtcgagccaaaggaatttgtccagctgatgtggcatacagggtagcccgaccggcccagctttctgccccaactcgtcagctgttcccaggaggctttccaaaagatttctctctgctgactgtcgtaaggactagacctggtctgcaagctcccctcctgaccctatactctgctcaaggcgtgaggcagctaggccttgaactcggcaggcctgtgagattcctatacgaggaccaaaccggtcggcctcaacctcccagccaaccagtttttagagggctgagcctggccgacggcaaatggcatagggtggcagttgcggttaaagggcaatccgtcaccttgatcgttgactgcaaaaaacgagtcactagacccttgcctcggagtgcgcgccctgtgttggacacccacggagttataatcttcggagcccgaatcctagacgaagaggtatttgagggcgatgtgcaagagctagcaattgtgccaggggtgcaggctgcctatgagtcatgcgaacagaaagaattagagtgcgagggaggccagagggagaggcctcaaaaccaacagcctcatagggcacagagatcaccgcagcaacaaccatcacgcctgcatcggccacagaaccaggagccacagagccaagatccgacccccggcgaagaagaagagatcctggagtcaagccttttgccaccgttggaagaagaacagacagaccttcaagtgcctcctactgccgaccgctttcaggctgaggagtacggggaaggaggcactgaccccccagaaggaccatatgattacacatacggatatggcgatgattatcgcgaagaaactgaattaggaccagcccttagtgccgaaacagcccactccggcgctgcggcacatggacctcgaggattgaaaggagaaaagggcgagccagccgtcttggagccaggtatgctagtggaaggcccgcccgggccagaaggccccgccggattgatcggcccaccgggcatccaggggaaccccgggcctgtcggggacccaggtgagaggggcccccccggcagagcaggacttcccggcagtgacggcgccccagggccaccaggcacctctctcatgctccctttccggttcggtagcggaggcggcgacaaaggaccagtggtggcagcacaggaagcacaggctcaagcgatcctacagcaggccagactggccctgcgcggacccccagggcccatggggtacactggacgccccggccccctgggccagcctggttccccaggcctcaaaggagagtcaggagatctgggaccacagggcccccggggccctcaaggactgacagggccaccaggcaaagccggccgtcgaggacgcgcaggggcagacggcgccaggggcatgcccggcgatcccggagtaaagggcgacagggggtttgacggcctgccaggccttcctggggagaagggtcacagaggcgatacaggcgcgcaagggctcccaggtccccccggagaagacggtgaaaggggcgacgacggagaaattgggccacggggactcccaggcgagtcagggccacgtgggttgctggggccaaaaggaccaccgggcattcccggtcccccgggagtgcgagggatggacgggcctcaagggcccaaaggttctctgggaccacaaggcgaaccaggaccccccggacagcaaggtacacccgggacccagggtctgcccggcccccagggcgcaataggtccgcacggggagaagggaccacagggaaagcccggcttaccaggtatgccaggttccgatggcccaccaggccacccagggaaggaaggcccccctggaacgaagggaaatcaagggccatcaggccctcaaggtccactaggctatcctggcccaagaggtgtgaaaggcgtagacgggatcagaggactgaaaggacataagggcgagaagggcgaagatgggttcccaggctttaagggcgacattggtgtgaaaggtgataggggcgaggtcggtgttcccggctctcgaggcgaggacggacccgagggcccaaaaggccggactggtccaacaggtgatccagggccccccgggctgatgggagagaaaggaaaattaggtgtgccaggtctaccagggtaccccggccgtcagggccccaagggaagcctcggcttccccggcttcccaggagcatcaggggaaaagggcgctaggggtctgagcggcaaatctggaccaagaggtgaacgaggtccaactggcccgaggggccagaggggtcccaggggagctaccggcaagagcggtgcaaagggaacgagcggcggggatggacctcacgggccacccggcgaaagaggactgcctggaccccaggggccaaatggatttcccggccctaaaggacctcccggtcctcccggcaaggatggtctgccagggcaccctggacaaagaggtgaggttggctttcaagggaaaaccggaccccctggccctccaggagtggtgggaccccagggcgccgctggcgaaacaggccccatgggagaacgaggacaccccggaccacccggacctccaggggaacagggtctgcccggcacagcaggtaaggaaggtactaaaggcgaccctgggccccctggggcaccaggaaaagatggaccagcaggtttgcggggctttcctggtgaaagaggcttgcccggaaccgccgggggcccagggcttaaaggaaatgaagggccttcaggtcctcctggtccagccggttctccaggggaaagaggagcagctggttccggcggacccatcggcccgccaggaaggcccggcccacaaggacctcccggcgctgccggtgaaaaaggggtaccgggggaaaaaggacctatagggcctacagggcgagacggggtacagggaccggtagggctcccaggacctgcaggccctcctggcgtggccggggaggatggtgacaagggtgaagttggcgaccccggacagaaaggaactaagggaaataagggcgagcacgggcccccgggaccgccgggacctataggaccggtgggtcaacctggagcggccggagctgatggagaacctggagcacgcggacctcaaggtcatttcggcgccaagggagatgagggaacacggggctttaacgggcccccaggacccatagggcttcaagggttacctgggccaagcggagagaagggagagacaggcgacgttggtcccatggggccacccggcccacctggcccccgcgggcccgccggacccaatggtgcagacggcccacagggaccacccggcggagtgggtaatctcggacctcccggcgaaaaaggcgaaccgggtgagtcggggtcgcccggtatacagggtgaacccggggtaaaaggtccacggggtgagaggggggagaagggagagtcaggtcagccgggagaacctggaccacccggacctaaaggccctaccggggacgatggaccaaaaggaaatcccggccctgtaggcttcccaggggaccccggccctcccggtgaagggggaccgcgcggacaagatggcgcaaagggagacaggggggaagatggcgaacctggacaaccaggctctccagggcctacgggagagaacggccctccagggcccttgggtaaacgcggtcctgcaggtagtccaggcagcgagggaaggcagggaggaaaaggagcaaaaggcgatccgggcgcgattggcgcaccaggcaaaaccggaccagtgggccccgcaggacccgctggcaaacctggaccagatgggcttagagggttgcccggcagcgtgggacaacaaggtcgccctggtgctacaggacaggcagggccccctggcccagttggccctcctggtctccccgggctgaggggcgatgcaggggccaagggcgagaaggggcaccccggactgataggcttgattggacctccaggtgaacagggcgagaaaggggatagaggcctgcctggtccacagggcagtcctggtcagaaaggtgaaatgggcatacccggcgccagcgggcccatcggacctggcggcccacccggcctccccggcccagccggacctaagggagctaagggcgctactggcccgggaggaccgaagggcgaaaagggcgtgcagggaccacccggtcatcctggaccaccaggggaagtcattcagcccctgccgatccagatgccaaagaagactcgacgtagcgtggatgggagtcgattgatgcaggaggatgaagccatccccacaggcggcgcccctggatctcctggcggactagaagaaattttcggcagcctggactcgctacgagaagaaatcgaacagatgcggagaccaacaggtacacaagactccccagccaggacatgtcaggatttgaaactctgtcaccctgaactcccagatggcgaatactgggtggaccctaaccagggctgtgctagagacgcctttcgtgtattttgtaattttaccgctggcggagagacctgcgttactcctcgggacgatgttacacagtttagctatgtcgactccgaaggaagtccagtgggagtcgtgcaactgacctttctccgtctactcagtgtatccgcacatcaagatgtgtcctatccatgctcaggcgctgctcgggacggaccattaagactgcgaggtgcgaacgaggatgaactgtcgcccgaaacctctccatacgtgaaggagtttcgagatggatgtcagacccagcagggcagaacagtcctcgaggttagaacaccagtcttagaacagttgcccgtactcgatgcctccttttctgacctgggcgcgcctccgaggaggggtggcgtgctgcttgggcctgtttgtttcatgggatag

SEQ ID NO: 232647 - DNA, 5211 bp, Artificial Sequence
  derived and/or modified sequence
atggaaagatgttctagatgccaccgactgctgttgctgctgcccctcgtcctcgggctgtcagccgctcctggctgggccggggcgcctcccgtggatgtcctcagagcattaaggttccctagtctgcccgatggggtccgaagggccaagggcatttgtccagccgacgtggcctatagagtggcacgaccagcacagttgtccgcaccaacacgacagttattccccggcggattccctaaggatttctcattactgaccgtggttaggacacgacccggattgcaggctcctctattaactctgtacagtgctcaaggtgttcggcagcttggcctagaactggggcgacccgtccgtttcctctatgaagatcaaaccggacgaccacagcctcctagccagccagtgtttcgcggtctttccctggccgatggaaaatggcatcgagttgctgtagcggtcaaaggacagagtgtaactttgatagtcgattgtaaaaagcgagtgacacgacccctcccccgttccgccagacctgtattagatacccacggggtgatcatattcggagcaaggatactcgatgaggaggtgttcgaaggagatgtacaagaattggcaatagtccccggagtgcaagcagcatatgaaagctgcgaacagaaggaattagagtgtgagggcgggcagagagaaagaccccagaaccagcaacctcaccgtgctcagagaagcccgcagcaacaaccttcccgcctgcaccgtccccaaaaccaggaaccccagtctcaaccaaccgagtctctgtactacgactataagcccccttattacgacgtcatgaccaccggaacaactcccgactatcaggaccctactcccggtgaggaggaagaaatccttgagagttctttgctgccacctctggaggaggaacagaccgatcttcaggtcccccccaccgccgatcggtttcaggcagaggagtatggtgagggaggcaccgacccccctgagggcccttacgattacacctacgggtatggagacgattacagagaagaaacggaattaggcccagcattgagtgcagaaacagcccattctggcgccgcggcacatggaccacgcgggctaaagggagagaaaggcgaacccgccgttcttgaacccggaatgctggttgaaggaccccctggccctgaggggcctgcagggctaatcgggccccccggaattcagggaaatccgggaccggtgggcgatccgggagaaagaggaccacctggcagagccggactgccgggatccgatggagcccctggccctcccggtacatctttgatgctgccatttcggttcggaagcggcgggggagacaagggtccagttgtggcggcacaggaggctcaggcgcaggcaatattacagcaggcacgcttggctctccgcggccccccaggccctatgggttacacaggacggcctggcccactaggacaacctggatcccccggcctgaaaggtgagagtggtgacttgggaccccaaggacctcgtggcccacagggacttaccgggccacccggcaaagcaggtaggagggggagagctggagctgatggagcacgcgggatgcccggcgaccccggcgtgaaaggtgacagaggattcgatggccttcctgggttgcccggcgagaaagggcacaggggagacacaggagcgcaaggattgcctggccctcctggggaagacggagaaagaggggacgacggcgagattggcccaagaggtctgcccggggaaagcggaccaaggggactgcttggtcccaaagggcccccagggatcccggggccacctggagtacgcggaatggatggccctcagggccccaaaggctccttaggacctcaaggcgaacctggaccacctggacaacagggtacccccggaacccagggactcccaggcccccaaggagcgattggcccccacggagagaaaggtcctcagggcaaaccagggctgcctggcatgccaggatcagacggacctccgggacaccctggcaaggaaggtccacccgggactaaaggtaatcagggacccagcggtccacagggacctctggggtacccaggacctcgaggcgtaaaaggcgtcgacggtattagaggcttgaaggggcacaagggcgaaaagggcgaggatggtttccctggatttaaaggtgatattggcgtaaagggcgacagaggagaggtaggagtgccaggctcgcgcggggaggacggaccagaaggtccaaagggaagaaccgggcccacaggagacccaggacctcccgggcttatgggcgaaaagggcaaacttggagtcccaggattaccaggttaccccggtcggcagggaccaaaaggatcactcggttttccaggtttccccggcgcttcaggtgagaaaggtgctcgcggactgtctggtaaatcaggcccacggggtgaaaggggccccaccgggccacggggacagagaggtccacgcggagcgacaggcaagagcggggctaaggggactagcggcggtgacgggcctcacggcccccccggcgagagaggcctccccggcccccaagggcccaatgggtttccagggccaaaaggtcccccaggcccccccggtaaggacggcctgcctggacatcctggccagcgaggtgaagtcggcttccaaggcaagacggggcctcccggaccacccggagtagttggcccacagggggccgctggtgagacagggccaatgggagagagaggtcaccctggacccccgggacccccaggagaacagggactgccgggcactgcgggaaaggagggcactaaaggggacccggggcctcctggcgcacctggaaaggatggacctgcgggtctgcggggttttcccggagagagaggactaccaggaaccgccggcggccctgggctcaaggggaacgaaggaccgagtggcccccctggcccagcgggtagtcccggggagcgtggcgctgcaggctcaggcggacccatcgggcctcccggacgccccggaccgcagggaccacccggagcagccggggagaagggagttcccggcgagaaaggacctattggcccaacgggtagagatggcgtgcagggccctgtagggctgccaggaccggccggtccccctggcgtggctggcgaggacggcgacaaaggggaggtaggcgaccccggtcagaaaggtactaagggaaacaaaggagaacatggacctcccggaccccctggaccaattggaccggtcggtcagcctggggcagctggggccgacggcgagccaggcgcacgaggccctcaagggcattttggggctaaaggtgacgaaggaactagaggatttaatggccccccaggaccaatcggactccagggcctgccaggccccagcggagagaaaggtgaaaccggcgatgtgggacctatggggccacctggacctcctgggccgcggggccccgcgggaccgaatggcgcagatggaccacagggaccgccgggcggcgttggcaatctgggaccacccggtgaaaaaggcgaacctggagagagcggatcacctggtatccaaggcgagccaggagtgaagggcccaagaggcgaacgcggagaaaaaggagaaagcggacagcccggggaaccaggacctccaggaccaaagggccccaccggagacgatggtccaaagggcaatccaggtccggtaggcttcccaggggatcctgggccgccgggtgagggtggaccgcgggggcaagacggcgcaaagggtgataggggagaggacggggagcccggccagccagggagccctggaccgacaggcgaaaacggccctccaggaccattggggaagcgcggaccggccggatcgcccggaagcgaaggccgacaaggcggaaaaggagcaaaaggggaccccggagctatcggagccccaggaaaaactggccccgttgggcccgccgggccggctggaaagccgggacctgacggcctacgaggcctgccagggagcgttggacagcaaggaagaccaggagctaccgggcaagcaggaccaccaggtcctgttgggccacctggcctgcccggattaagaggcgatgctggtgccaaaggggaaaaagggcatccaggactaattggacttattggacccccgggagagcagggggagaagggggacagagggctcccgggcccccagggttcacctgggcagaaaggagaaatgggtattcctggggcgagtgggcctatcggtcccggcggacctcctggactgcccggacctgcggggcctaaaggagcaaaaggcgccaccggacctggcggccctaaaggcgaaaagggagtgcagggcccacctgggcatccaggccctcctggggaggttatccaacctttaccaattcaaatgccaaagaagaccagaagatctgtggatgggagcagattaatgcaggaggatgaagcgatacccaccggcggcgcccctggaagccccggcggcctcgaggaaatttttggttctctcgactcacttagggaagaaattgagcaaatgcggcgcccaacgggaacccaggactctcccgcgcgcacctgccaggatctgaaactgtgccacccagagctgccagacggagaatattgggtagatccaaaccagggatgtgcaagggatgccttcagagtcttttgcaacttcactgcaggtggcgaaacctgtgtcaccccccgcgatgacgtcacccaattttcatacgtagactcagaaggaagccctgtgggtgtcgtccagcttacatttcttcgcctgctcagtgtctcagcccaccaggatgttagctatccctgtagcggagctgctcgcgacggcccattaagactccggggcgccaacgaggatgagctttcaccagagactagcccttacgtgaaagaatttagagacggctgccaaacccaacaaggccgaaccgtattagaggttagaacacccgtgttggaacagttaccggttcttgacgcttctttttccgaccttggcgcccctcccagacgcggaggtgtgttacttggtccagtctgcttcatgggatag

SEQ ID NO: 232648 - DNA, 5070 bp, Artificial Sequence
  derived and/or modified sequence
atggagcggtgcagtcgttgtcaccgtctgcttctgctgttacctctggtacttggactttctgccgctcccgggtgggcgggggctcccccggtggacgtcctgcgcgcattaagattcccttcgctaccagatggcgtccgtagagctaaaggcatatgccctgctgatgttgcatatcgtgttgcacgccctgcgcagctttccgcacccaccagacaacttttcccaggaggtttccccaaggatttcagtctgctcacagtcgtacgaacacggcctggactgcaagccccactgctcactttgtactccgcccagggcgtgcgacaactgggattagagttaggccgcccagtgcgtttcttgtacgaagaccagacaggaagacctcaacctccttctcagccagtcttccgcggcctcagtttagcagatgggaaatggcaccgggtcgctgtcgcggtgaagggacaatcagttaccctgatcgttgattgtaagaaaagagtcacaagaccccttcccagatctgccaggccagtgctggacacgcatggcgtgatcatcttcggagccaggattttggatgaggaagtcttcgaaggagacgttcaggagttggcaatcgtgccgggtgtgcaggcagcctatgaatcttgcgagcagaaggaactggaatgtgagggcggacagagagaacgtccacagaatcagcagcctcatagggcgcagagatccccacagcagcaaccgtcacgtctacaccgcccccaaaatcaggagccccagtcccaagaacagacagatctgcaggttccaccaaccgctgataggtttcaagcagaagaatatggagagggagggacagacccccctgaggggccttatgactatacatacggatacggtgatgattatagggaagagacggagttgggaccggcactctctgcagaaactgctcacagtggtgctgcggcccatggacctcgcggactgaaaggggaaaaaggcgagcccgctgtgctagaacctgggatgctggtggagggcccacccggacccgagggacctgctggcctcatcggcccacctggcatccaaggaaatcctggcccagtcggcgatccgggagaacgcggacctccaggaagagctggcctaccaggctccgacggtgcacctggaccacctggaacgagtttaatgttaccattcagattcggttcaggaggaggagataaggggccagtggtggcagcacaggaggcacaggcccaggcaatccttcagcaggccaggctggccctaaggggaccgcctggacccatgggctatacaggcagacctggtccgctggggcagcccggatccccagggctcaaaggtgagagtggcgacctagggcctcaaggtcccaggggcccccaaggattaactggtccaccaggcaaggctgggcgacgaggaagggccggggctgacggtgcaagagggatgcctggcgacccaggagtgaaaggcgatagaggctttgacggactgcccggcctgccaggtgagaaaggccaccgaggcgatactggagcacagggacttcctggtcctccaggtgaggatggagagagaggagatgacggtgagatcggaccccgcggactcccaggagaatccggaccccgggggcttctgggccctaagggaccccctgggatcccggggccaccaggtgtgcgcggtatggacggaccccaggggccaaagggaagcttaggacctcagggcgaaccagggccgcccggacagcaaggcacacctggaacacagggattgcccggaccacagggcgcaatcggcccacatggagaaaaagggccgcaaggcaagcccggtttgcccggcatgccaggatcagacggtcctcccgggcacccaggtaaagaaggcccaccaggtaccaagggaaatcagggtccctcgggccctcagggtcccctgggctaccccggacctagaggagtgaagggagtggacggtatccgcggcctcaaggggcacaaaggtgagaaaggcgaggacggcttcccaggcttcaaaggtgatatcggtgttaaaggggacagaggcgaagttggtgtacctggcagccggggtgaggatggccccgaaggtcctaaaggtcggaccggcccgaccggtgatccaggtccgcctggactgatgggtgaaaaaggaaagcttggcgttccaggtctccctgggtaccctggacggcagggccctaagggatcattaggctttcctggctttcctggggcttcaggggagaaaggggctagaggactatctggaaagagcgggcctcggggtgagcgaggcccaaccggaccccgtgggcagcgtggcccacgtggagctacaggcaagtcaggggcaaaaggaactagcgggggcgatggcccacacggaccacccggtgagcgcggtcttccaggcccccaaggtcccaacggctttccagggccaaagggtcctccgggtcctccagggaaagatggtctaccagggcacccaggccagcggggcgaagttggttttcaaggcaaaaccggccctccaggccctccaggagtggttggaccacagggggctgctggtgaaactggcccaatgggagagcgcggccacccaggccccccggggccccccggcgagcagggcctgccaggaactgcaggtaaggaaggcacaaaaggagatcccgggcccccaggcgcacccgggaaggacggccccgccggattaagagggtttccaggagagcgcggtctccctgggaccgctggcgggccaggccttaaaggaaatgaaggaccaagtggaccccctggtcccgcaggcagccctggggagcgtggtgcggcgggcagcggaggaccaattgggccaccaggcagacccggaccacaaggacctccgggggcggcgggcgaaaagggggtaccaggagagaagggaccaattggtccaactggtagagacggcgttcaaggaccggttggactgcctggcccagcaggaccacccggtgtggcaggagaggacggcgataagggtgaagtgggtgatccaggacagaagggaacgaagggaaacaaaggcgagcacggcccacctggcccgccgggcccaatcggacctgtgggacagcctggggctgccggcgctgacggtgaacctggcgctagaggaccccaagggcatttcggcgctaagggggatgagggaacacggggattcaatggaccacctggacctatcggcctacagggccttcccggtccctcaggagaaaagggagagacaggagatgttggcccaatgggaccacccgggccccccggacctagaggtcccgccggcccaaatggtgccgatggaccccaggggcctccagggggagtcggtaatcttggccctccgggtgaaaagggagaacctggcgagagcggtagtccggggatacagggtgaaccaggcgtgaagggccctaggggcgaaaggggcgaaaagggcgaaagtggccagccaggagagcctgggcctcctggcccaaaaggcccaactggggacgacggacccaaaggaaaccccggaccagtcggcttccccggtgacccaggaccaccaggtgaaggaggacctcgcgggcaggatggtgccaaaggggataggggcgaagacggcgaacctggccaacccggctctcctgggcccaccggcgaaaatggccccccaggacctctcggcaaaaggggacctgctggatcgcccggcagcgagggacggcagggaggcaagggagctaagggggaccctggagccattggcgcgcctggaaaaactggtcccgtaggccctgccggacccgccggaaagccaggccccgatggactgagaggattgcccgggtctgtcggacagcaaggaagacccggtgcaacaggccaagccggtcccccaggaccagtgggcccaccaggactccctggactgcgcggagacgctggtgctaagggcgagaagggtcacccagggttaatcgggctcatcgggccacctggagaacaaggggaaaaaggagatcgagggctgccaggaccacagggatccccaggccaaaagggtgagatgggtattccaggcgcatcgggaccaatcggaccgggaggccctccaggattacctggaccagccggccctaaaggagctaaaggcgccacggggccgggcgggcccaaaggcgagaaaggtgtgcagggcccacccggtcatccaggacccccaggagaggtgatacagccactcccaatccagatgcccaaaaagactcggcgatccgtggatggcagtcggctgatgcaggaggatgaggctatccctacaggcggcgcccctggaagcccgggcggactagaggaaatatttggatccctcgactctcttcgtgaagaaattgaacagatgcgcaggcccactggaacacaggacagcccagcccgtacttgtcaggacctcaagttgtgtcatcctgagctgcctgacggggaatattgggtcgaccccaaccaagggtgcgcccgtgacgcgttcagagtgttctgtaacttcactgcaggaggggagacctgcgtcacgcccagggacgacgttacccaattctcctatgtagactcagaagggtccccagtcggagttgttcaactaacctttctccggcttctatcagtgtcagctcatcaggatgtgtcctacccttgttcaggagcagcaagagatggacccttacgcctgagaggcgctaatgaggacgagctatccccagaaactagtccctatgtgaaggaattccgcgacggatgccagacacagcagggccgcaccgtgctcgaggtccgcactcccgtcctagaacagttgccagtgctcgatgccagcttcagcgacctcggggccccgccgcgcagagggggtgtgcttctgggtcctgtgtgttttatggggtag

SEQ ID NO: 232649 - DNA, 5148 bp, Artificial Sequence
  derived and/or modified sequence
atggaacgatgttcccgctgtcatcgtctacttctgcttttacctcttgtattagggctctccgctgcccctgggtgggccggcgccccccccgtggatgtattgcgcgcccttcgcttcccgagcttaccggatggagtgcggagagcgaaagggatctgcccagctgatgtggcttatagggttgctagacctgcacaactcagcgcaccaacccggcagctcttccctggcggctttcctaaagacttctccctgctcactgtggtcaggactcgtcccgggctccaggctcccctgctcactttatattcagcccagggtgtgagacagttaggattggagctcggcagacccgttcggtttttgtatgaggatcagaccggcaggccacaacccccatcccagccagtctttcggggtttgtccctggccgatggtaaatggcaccgcgttgctgtggcagtgaaaggacagagtgtaactcttatcgtcgactgtaagaagcgtgtgactcggccgcttccccgatctgcaaggccagtactggacacgcatggcgtgataatttttggagcacggattctggacgaagaagtcttcgaaggcgacgtccaagagctcgccatcgtccctggcgtccaagccgcctatgaatcctgcgagcagaaagaactagaatgtgagggcgggcaaagagagaggccgcaaaatcagcaaccacatcgcgcccagaggtcacctcagcaacagccatctcgcctgcatcggccccagaaccaggagcctcaaagccaaccaactgagtccctttattacgactataagcctccctattatgacgtgatgacaaccggtaccacacccgattaccaggagcaaaccgatctccaagttccgcctaccgcagatagatttcaagccgaagagtatggtgagggaggtactgaccctcctgaaggaccttacgattacacttacggttacggtgatgactatcgcgaagagacagagttgggccctgcactctctgcagaaacggcacattctggggccgccgctcatggacccagggggctgaagggggagaagggagaacctgctgtgctagagcctggcatgctagttgaaggacctcctggtcctgaggggccggcaggattgattggccctcccggcatccaaggaaaccctggcccggttggagatccaggcgaacggggacctccaggtcgagcaggtttaccaggttccgatggcgccccaggtccccccggcaccagtctaatgttaccgttcagattcggcagcggcggtggagacaagggccccgtcgtggcggcacaggaagctcaggcacaggcaatcctccagcaggcaagacttgctctgagggggccgcccggaccaatgggatatacaggacggccaggacccctgggccagccgggcagccccggcctgaaaggggaatcaggagatctgggcccccagggaccaaggggaccccaagggctgacaggaccacctggaaaggctggacggagaggtagggccggagctgatggagcaagaggcatgccgggagaccccggtgttaaaggggatcgcggattcgacggactgcctggcttaccaggagagaaaggacatcgcggagatacaggtgcccagggactgcccggccctccgggcgaggacggagagaggggggacgacggtgagataggaccacgtggtttgccaggcgaatcaggcccacgcggcttgcttggtcctaaggggccccctggtatacccggcccgcccggcgttagaggaatggatggacctcaaggccctaaggggtctctgggaccacagggcgagcctggcccacctggtcagcaaggcactcctggaacacaaggcttacctggcccccaaggagctattggacctcacggcgaaaaagggccacaaggaaagccgggtctgcccggaatgcctggcagcgatggaccacctggccatcctgggaaggagggcccgcctggaacaaaggggaatcaaggaccatccggcccccagggacctctgggatatcctggcccccggggcgtaaaaggtgtggacggtatcagaggactgaaggggcacaaaggagaaaagggagaagacggcttccctggatttaagggcgacattggcgtaaaaggcgatcgcggcgaagtgggagtgcctggcagtcgcggcgaagacggccccgagggtcccaaaggccgcacaggacccaccggagaccccggaccaccaggcttgatgggagagaagggaaagctcggagttccgggccttcctggataccccggccggcagggtcccaagggttcgcttggctttccagggttcccaggcgcaagtggcgagaagggcgcaaggggtctgagcggaaagagtggtccacggggcgaaagaggccctacaggccctaggggacagagaggcccacgcggggccactgggaagagtggggcaaaaggcacgtctggcggcgatggaccacacggcccacccggggaacgggggcttccgggtcctcaaggtcccaatggcttccccggtccaaaaggtcctccaggcccgcccggcaaagacggcctgccgggccacccaggacagagaggtgaggtgggatttcagggaaagaccggccctccagggccacctggtgtcgtaggacctcaaggggcagcaggcgagaccggccccatgggtgagcggggccacccaggcccccccgggcccccgggcgaacagggcctaccaggcaccgctggtaaagaggggaccaaaggggaccccggacctccaggagcgccaggtaaagacggacccgccggactgaggggcttcccaggggagaggggcctaccaggaacagcaggagggcctgggcttaagggtaacgagggcccctccggacctccaggaccggccggcagtcctggtgaacgaggggccgcagggtctggaggacctatcggacccccaggcaggccaggaccacaaggtccccccggggccgctggagagaaaggagtccccggcgagaagggacccattgggcccacggggagggacggcgtgcagggacccgtgggcctgcccgggcctgccggaccacctggagtagcaggagaggacggagacaagggggaagtaggcgaccccggacagaaaggaaccaaaggcaacaaaggagaacacggccccccaggaccacctggccccataggaccagtcggacaacctggcgccgccggggccgatggggaaccaggagccagaggacctcagggacactttggagctaaaggcgatgaaggaacaagaggatttaacgggcctcccggcccaattggcctgcaaggtctgccaggacctagtggcgaaaaaggcgagacgggagacgttggcccgatgggacctccgggcccccctggcccacgaggacctgccggccctaatggagctgacggcccccagggcccccctggcggcgtgggaaacctcggcccacccggagaaaaaggggaacctggggagtccggatcccctggaatacagggcgaaccgggtgtaaaaggccccagaggagagcgcggcgaaaagggagaatctggccagccaggtgagcctggaccacccgggcctaaggggccaactggcgacgatggaccaaaaggcaatcctggaccggtcgggttcccaggagaccctggacctcccggggaaggtggcccacgaggtcaggacggagcaaagggcgatagaggcgaagacggggaaccagggcaacccggctcacctggccctactggcgaaaatggtccaccaggcccactggggaagcgcggccctgcaggctcccccggctcggaaggccgacaaggagggaaaggggcaaaaggcgaccccggcgccatcggggcccctggaaaaactggccccgtaggtcccgccggccctgccgggaagcccggaccagatggactgcggggtctcccggggagcgtgggccaacagggtcgacccggcgccaccggacaagccggaccaccaggcccagtcggtcctccaggactccccggactacgtggagatgccggcgcaaagggagaaaagggtcacccggggctgattggactaatcggacctcccggcgagcagggcgaaaaaggagatagagggttaccagggccccagggttcacccggccagaagggagaaatggggatacctggagcttcaggtcccatcgggcctgggggacctccaggactgcccggcccggccggacctaaaggcgcaaagggggcaacagggccaggcggcccaaagggagagaaaggtgtgcagggccccccaggacatcctggcccacccggagaggttatccagccactgccaattcagatgcctaagaaaactagacggtccgtggatggatctcggcttatgcaggaagatgaagctattcccaccggcggcgcccccggatcaccgggcggcctggaggagatttttggaagtctggatagcctaagggaggagatcgaacaaatgagaaggccaacaggaacacaggacagcccagcccgaacctgccaagatttgaaactgtgccaccccgagttgcccgatggagagtactgggtggacccaaatcagggctgcgcccgcgatgcctttagagtgttctgcaatttcactgccggcggcgagacttgtgtgactcccagagacgatgtgacccagttctcttatgtagatagcgagggatcccctgtgggcgtggtgcaactcaccttcttacgcctgctgtctgtaagtgcccaccaggacgtgtcgtacccttgctcaggcgcagcacgcgatggtccccttagactccgaggagctaacgaagacgagttatccccagagacatccccatatgtgaaggagtttcgtgatggatgccagacccaacaagggcgaactgtgttggaggttaggacacctgtactagaacaactaccggtactggacgctagttttagtgatttaggagcccctcctcgaaggggtggcgtactgctgggtccggtttgcttcatgggctag

SEQ ID NO: 232650 - RNA, 5211 nt, Artificial Sequence
  derived and/or modified sequence
auggaacgguguagucgcugucauaggcugcuccuccucuugcccuugguccuuggacuguccgcagcuccuggcugggcaggagcgccccccgucgacgugcugcgggcccugcgcuuccccagucucccugauggcguaagaagagcuaaggggaucuguccugcugacguggccuaccggguagcacgaccugcccagcuguccgcucccacaagacaguuauucccugguggcuuuccuaaggauuucucucugcugacgguugugcgaacacgaccuggccuccaagcccccuuacugacucuauauagcgcucaaggagugcggcagcugggucuggagcucggaaggccuguaagguuucuuuaugaggaccagacagggagaccucaaccgcccucucaaccugucuuccggggauuaagccuggcugauggaaaguggcacaggguugccguggccgugaagggccagagugucacccugaucguggacuguaaaaaacgugucacgcgaccacucccaaggucagcuaggccuguucucgacacucacggugugauuaucuucggcgccaggauccucgacgaggagguuuuugaaggcgacgugcaggaguuggcaaucguucccggcgugcaggcugcauaugagucuugcgaacagaaggagcuugagugcgaggggggucaacgcgagcgaccacagaaccagcagccucacagagcccagcggaguccacaacagcagccaucaaggcugcacaggccacaaaaucaagagccucagagccagccuaccgaaucucucuacuacgauuacgaacccccuuauuacgacgugaugacaaccggaacgacucccgacuaccaggaccccacgccgggcgaagaagaagagauccuugaaaguagucuuuugccaccuuuggaggaggaacaaacugaccuccaggugccuccaacugccgaccgcuuucaggcugaggaauacggcgagggcgguacagauccuccagaggggccuuaugacuauacuuauggauacggagacgauuacagggaagaaacagaacucggcccagcguuguccgccgagacagcccauaguggcgcagcugcccacggccccagaggccugaaaggagaaaaaggagagcccgccgugcuggagccagggauguugguggaggguccuccaggcccagaagggcccgcaggucucauuggcccuccuggaauccagggcaaucccggccccguaggggacccuggagagcgcggcccccccggacgggccggcuuacccggauccgauggugccccuggcccuccaggaaccagccugaugcuaccauucagauucggaucaggaggcggagauaagggaccuguaguugcugcgcaagaagcccaggcucaggcaauccuccaacaggcuagguuagcacugcgaggucccccagguccaaugggcuauaccggacgcccuggcccccuagggcaaccgggcagcccaggauugaaaggagagucuggugaucugggaccacagggcccucggggcccccagggccuuaccggccccccggguaaagccggccgucgaggucgugccggggcugauggcgcucgagggaugccaggagacccaggcgugaagggggaccgaggcuuugauggacugccuggucucccuggggaaaagggccaccguggcgauacaggagcacagggucugccaggcccuccaggggaagauggcgaacguggcgaugacggggagaucggaccucgcggguugccuggggaaucggggccacgaggccuacugggaccuaaagguccgccagggaucccagggcccccaggaguccgcggcauggacgggccacaaggacccaagggaucucuggggccacagggugagccaggccccccgggucaacagggcacuccagggacacaaggacugccagggccucagggagccauuggaccucauggagagaaagguccccaaggcaagccuggacucccuggaaugcccggcuccgauggaccaccuggucaccccggcaaggaagggccuccagguacgaaagggaaccagggaccauccggcccacagggaccacugggauauccggggccaaggggggugaaggggguggacgggaucagaggccugaaaggccacaaaggcgagaaaggagaggacggguuuccaggauucaagggggauauugggguuaagggugacaggggggaggugggugucccaggaagccgcggcgaagauggcccugaaggacccaaaggaagaaccggaccuacuggcgacccagggccaccuggucuuaugggcgagaagggcaagcuuggaguuccaggccugcccggguauccgggcagacaaggucccaagggaucccucggauuuccgggauucccaggggcauccggagaaaaaggcgcucgcggccucagcggaaagagcggaccccguggggaacggggcccaacagguccuagaggucagcgcgggccaagaggcgcgacaggaaagucaggggccaaaggcacaucaggcggggacgguccccacgggccaccaggugagagagggcuuccaggaccccaggggccuaauggguuuccaggacccaaaggacccccuggcccuccaggaaaagaugggcuucccggacaucccggacaacgcggggaaguugguuuucagggcaagacaggccccccaggcccccccggcguugugggaccccagggagcugccggagaaacaggccccaugggggaacgcggucacccaggccccccuggcccucccggcgaacaaggccuacccgggacagccggcaaggaaggaacaaagggagauccgggaccaccuggcgccccuggcaaggacgguccugccggauugcgaggauuuccaggagaaagaggacugcccgggaccgccgggggaccgggacugaaaggcaaugaagggcccucugguccccccgggccagcuggcucgcccggcgagcgcggagccgcugguagcggggguccuaucggaccccccggccgaccugguccacaggggccccccggcgccgcuggagagaagggugugccuggagagaagggcccuauagggccaacugggcgagauggugugcagggcccagugggccugccuggaccggcagguccccccggcguagccggggaggauggggacaaaggcgaagugggugacccuggacagaagggcacaaaaggcaacaaaggggaacacgggccaccaggcccaccugggcccauuggcccagucggacagccuggugcugccggcgcugacggggaacccggugcucgcggcccacaggggcauuucggugcaaagggggaugaaggcaccagaggcuucaacggucccccuggcccuaucggccugcagggacuccccggcccuucaggcgaaaagggagaaaccggggacgucggucccaugggaccucccggaccaccaggaccgcgcggcccugcagggccaaauggagccgauggaccucagggcccccccggggggguugguaacuugggccccccaggcgaaaaaggcgaacccggggaaagugggagcccuggcauccagggggaaccuggugugaagggcccacguggcgaaagaggggaaaaaggagagagugggcagcccggggaacccgggcccccaggaccuaaaggcccuacuggcgaugauggacccaaagggaaucccggcccgguaggauuccccggcgauccgggacccccgggagaggguggcccccgcggacaggacggggcgaaaggagacaggggugaggauggcgagccagggcaaccuggcagcccaggaccuacaggagaaaaugggccacccggcccacuggggaagagagggcccgccggaucaccaggaucagagggucgucagggcggcaagggcgcgaaaggugacccgggagcgaucggcgcucccgguaaaaccgggccgguaggaccagcuggaccagcaggaaagccagggcccgacggccucaggggccugcccggaagcguggggcagcagggaagaccgggagccaccggccaggcuggcccacccggacccguagguccuccuggccugcccggccugagaggugacgcgggagcuaagggcgagaagggccaccccggccugaucggucucauagguccuccaggagagcagggagagaaaggagauagggguuuacccggcccacagggaaguccuggacaaaaaggggaaaugggcauacccggcgcuagcggucccaucggacccggugguccacccggucuuccgggcccggcgggaccaaagggagccaagggagcaaccggccccggcgggccaaaaggcgaaaaggggguucaagggccuccaggacauccugguccucccggggaagugauccaaccacugccgauccagaugcccaagaaaacccggcguuccguagacggcagccgccugaugcaagaagaugaagcaauaccaaccgggggcgcaccuggaucgcccggcggauuagaggagaucuucgggucucuggauagccugagagaggaaauugagcagaugcgaagaccuacaggaacccaggauucccccgccaggacuugccaggaucuuaaacucugccaucccgagcugccggacggcgaguauugggucgaccccaaucagggcugugcccgcgacgccuuuagaguguuuuguaacuucaccgcuggaggcgagaccugcguuacacccagagaugacgucacacaguucuccuauguagauucagaagguuccccggugggagucgugcaacuaacguuccugagacugcugagugugucagcccaccaggacgugucauauccuuguucgggagccgccagagacgggccauugcgccugcgaggggcaaacgaagaugaguugaguccagagacgucuccuuacgucaaagaguuccgagauggaugccagacccagcaaggacgcacgguccuagaagugaggacgccgguccuggagcaacuccccgugcuggacgccucuuucucagauuugggugccccuccacggcguggaggcgugcugcugggacccgucugcuuuauggguuag

SEQ ID NO: 232651 - RNA, 5148 nt, Artificial Sequence
  derived and/or modified sequence
auggagagguguagcaggugccaucggcugcugcucuuguugccccugguuuuggggcuuuccgccgccccuggcugggcaggugcuccgccuguugacgugcucagagcucuccgcuuuccaagccugccagacggaguuaggcgggcuaaaggaaucuguccggccgauguagcuuauagggucgcccggccagcacaguuauccgcaccgacucggcaacucuucccaggaggauucccuaaggacuuuuccuuguugacagugguacggacacgaccaggacuccaggccccacugcucacccuguauuccgcccagggcgugagacaacugggauuggagcugggcaggccugugcgcuuuuuauaugaagaccagacuggcaggccucagcccccuucucagccaguuuucagagggcugucuuuggccgacggaaaauggcauaggguagccguggcagucaagggacaguccguuacccugauagucgauugcaaaaagagagucacuaggccccugccacggagcgcccguccuguucuugauacccauggcgugaucauuuuuggagcacguaucuuggaugaggagguauuugagggcgaugugcaggaacuggcuaucgugccaggggugcaggcagcguacgaaucuugcgagcagaaagagcuugaaugcgaaggaggucagcgcgaacgcccacagaaccagcaaccccacagggcucagcggaguccucagcagcagccuagcagacugcauagaccacaaaaucaggagccccagucccagccaacugagagucuguacuacgacuaugaaccucccuauuacgaugugaugacuacagggaccacacccgauuaccaggaacaaacggaccuacaggugccaccaacugcagaucgcuuccaagccgaggaauacggcgagggcgggacugacccaccagaaggcccauacgacuacacuuauggauacggagacgauuaucgugaagaaaccgaguuggggcccgcacuaucugccgagacagcccauuccggugccgccgcgcacggaccgaggggccuaaagggggagaagggugaaccggcaguccuggagccugggauguugguugagggaccuccgggaccagaggguccugcugggcugauuggcccucccgggauucagggcaacccagguccugugggagaucccggagaacgcggccccccgggcagggccggccuuccugggagcgauggagcaccaggaccucccgggacuucacucauguugcccuuucgguucgguucgggggguggggacaaaggaccuguuguagccgcccaggaggcccaggcucaggccauccuucaacaagcgcgccuggcuuugcgaggucccccuggccccaugggguauacaggccgcccuggcccgcugggucaacccggcagucccggacugaaaggugagucaggcgaucugggcccacagggcccacgcggcccccagggacugaccggcccgccugguaaggccgggcgccgcggccgugcuggagcugacggcgcccgaggcaugccuggggaccccgguguaaaaggcgaucggggcuuugacggccuccccggccucccaggagagaaggggcauaggggggauaccggagcacagggccuucccggcccuccaggggaggacggcgagcggggugaugauggggagaucggcccgagggggcucccuggagagucugguccccgcggucuccucgguccaaagggaccacccggaauuccaggcccucccggugugcggggaauggacggaccucagggacccaagggaucauuagggccgcaaggggaaccaggcccccccgggcagcaagguacaccuggcacccaggggcugccaggaccucaaggagcuauugggccacauggugagaagggaccccagggcaagccaggccugcccggcaugccgggcagcgacggaccucccggacauccaggcaaagagggcccuccaggcacuaaggggaaucaaggcccgucagggccucaggguccacugggauacccagggccgagagggguuaaaggcgucgacgggauccggggccugaagggccauaagggcgagaagggcgaggacggcuuuccaggauucaaaggugacaucggcgugaaaggcgaccguggcgagguaggggugcccgguagucggggggaagacggaccagagggaccaaagggcagaacaggcccuacgggagauccggggccacccgggcugaugggcgaaaagggaaagcucggggucccaggccugcccggcuacccuggcagacagggacccaaaggcucccugggcuuuccaggauuccccggugccucgggugaaaagggcgcucguggauugucuggcaagucaggaccaaggggagaaagagggcccacaggacccagaggccaacggggaccacggggcgccacuggcaaaagcggcgcuaaagggacaagcgguggagauggcccucauggacccccuggagagcgcggucugcccgguccccagggccccaauggcuuuccuggcccuaagggaccucccgguccacccggaaaagacgggcugccagggcaccccggucagcggggcgaggucggauuucaggggaaaacaggcccuccuggucccccuggcguaguugguccucagggugccgccggggagacgggccccaugggugagagggggcaccccggaccaccuggaccuccuggagaacagggccucccugguacugcuggcaaagagggcacuaaaggcgauccagggccaccgggagcgcccggcaaggauggcccagcuggucuuagaggguucccuggagaacggggccugccaggcaccgcaggggggccuggcuuaaagggaaaugaggggcccucuggaccaccaggacccgcuggcucgccuggcgagaggggugccgcaggaaguggagggcccaucgguccacccgggagacccgggccccagggaccucccggagccgccggugaaaagggcguuccuggagagaaaggccccaucgguccuacagggcgcgauggcguucagggaccuguggggcuuccugggccggcgggcccccccgggguagcaggugaagacggugauaagggagaggugggagauccagggcagaaaggcaccaaagggaacaagggugagcacggaccgcccggaccgccuggaccaaucgggcccguugggcagccaggcgcagccggcgccgacggggaacccggcgcucgcggcccgcaggggcacuucggugcgaagggcgacgagggaacgagaggauucaacggcccaccagggccgauagggcuccagggucugccaggaccaaguggggagaagggggaaaccggcgaugucgggcccaugggcccuccgggcccuccagggccucguggccccgccgguccuaacggagcugacgguccccaggggccgcccggaggaguggguaaccugggcccccccggcgagaaaggcgagccaggagagucuggaucuccuggcauccaaggcgaaccuggggugaaagguccgagaggugaaagaggggagaagggugagagcgggcagccaggggagccaggacccccaggacccaaaggacccacuggagaugacggcccaaagggaaacccaggaccagugggguucccuggagacccuggcccccccggagaaggcggcccgcggggacaggacggagcaaagggagaccgcggggaagacggggagccuggacagcccggaagcccuggcccaaccggcgaaaauggccccccuggaccccuggggaagaggggcccugccggcucaccuggcagugaggggcgccaaggagggaaaggugccaagggcgaucccggcgccauuggugcaccugggaagacuggccccguuggacccgcaggccccgcugggaaacccggcccugacggacuccgcggacucccuggguccgugggacagcaggggaggccaggugccaccgggcaagccggccccccuggcccuguagguccuccuggucuucccggcuuaaggggugaugcuggcgccaaaggcgaaaagggccauccuggccuuaucgggcucaucgguccucccggcgagcagggugaaaagggugacaggggccugcccggcccucaaggcucucccggacagaagggcgagaugggcauuccgggcgcaucaggaccuauuggaccgggcggaccgccuggccuccccgggcccgcuggaccgaagggggcuaagggugcuaccgggcccggcgguccuaagggagagaaaggcgugcaggggccaccuggacaucccgguccaccuggagaggugauucagccucugcccauacaaaugccuaaaaagacgagacgaucagucgauggaagcaggcucaugcaggaagaugaggccauucccacuggcggugcuccagggagccccggaggacuggaggaaaucuucgggagcuuagauucccugcgugaggaaauagagcagaugcgaaggccgacuggcacucaggauaguccugcacguacuugucaggaucugaagcucugucacccggaacugccagauggcgaguauuggguggauccaaaccaaggaugcgcaagagaugccuucagggucuucuguaauuuuacagcagggggugagaccugugugacgcccagagacgacgucacccaauuuagcuacguggauagcgaaggcucuccugucgguguggugcagcuuaccuuccuaagacuucuaagugugagugcucaccaggacguguccuauccuugcagcggggcugcuagggacggcccccuuagacugagaggagccaacgaagaugaacugucuccagaaacuucacccuacgugaaggaguuuagagaugguugucaaacccagcaaggucggacugugcuggaagugagaaccccuguuuuagagcaacuuccaguguuagacgccucuuuuagugaucugggagcccccccaaggagaggaggcguguugcucggucccgugugcuuuaugggcuag

SEQ ID NO: 232652 - RNA, 5070 nt, Artificial Sequence
  derived and/or modified sequence
auggaaagaugcuccagaugccaccgccuccugcugcuucugcccuugguacugggccucuccgcagcucccggcugggcuggcgcacccccagucgacguccugcgugccuugcgguuucccaguuugcccgauggaguaagaagagcaaaggggauuuguccugccgauguagcguaccggguggcucggcccgcccaacugucugcuccaaccaggcaauuguuccccggaggcuuccccaaggauuuuucacugcugacgguaguacgaacacguccaggccugcaggcaccucuucugacuuuguacucagcccaagggguacgucaacugggacucgagcuggguagaccggucagauuucuguaugaagaccagacaggcaggccccagccuccaagucagcccgucuuucgcggucuuucucuugcagaugggaaauggcaccgcguggcuguggcugugaagggccaaucugugacacuuaucguugacuguaaaaagcgugucacuagaccauuaccacgauccgcccgacccguuuuggauacacauggagucauuaucuuuggcgcccgcauuuuagaugaggagguguuugaaggugacguccaggagcuggcaauugugccaggcgugcaggccgcuuaugagucgugugaacagaaagaacuggagugcgagggaggacagcgagagaggccacagaaucaacaaccacaucgagcucaacgauccccgcaacaacagccuagcagauugcaccgaccccaaaaucaggagccucaaucacaggaacaaacugaccugcaggugccgccaaccgcagacagauuucaggcagaggaguauggugaaggcggaaccgauccacccgaaggcccuuacgauuauaccuauggcuacggcgacgacuaccgugaggaaaccgaguugggucccgcucuaucagcagagacagcacacucaggugccgccgcccacggcccuaggggacugaagggugaaaagggcgagccugcuguguuggaacccggaauguugguggaggguccuccuggcccagagggaccggccggccucaucggcccacccggcauccagggaaacccuggucccgugggcgacccaggagaaagggggcccccugggcgggcuggucuuccuggaucagacggcgcuccuggaccuccagggaccagccucaugcugcccuuuagauucggcaguggaggcggagauaaggguccugucgucgccgcucaggaggcccaggcacaggcuaucuugcaacaggcacggcuggcacuccgggggccucccgggcccaugggauacaccgggcguccagggccucucggucagccaggcaguccuggccuuaagggggagucgggcgaucugggcccccaggguccccgaggcccucaaggguugacugggcccccuggcaaggcuggacguaggggcagagcuggagccgacggagcacggggcaugccaggggacccuggcgucaagggagacagaggguucgacgguuuaccaggauuaccaggcgaaaaaggucaucgcggagacacaggcgcucaggggcugcccggcccccccggcgaagauggagagagaggagacgacggggagaucgggcccagaggucugccaggcgagaguggucccaggggucuguugggaccaaagggccccccaggaauccccgggccucccgggguacggggaauggaugggccacagggccccaaagguucccugggaccucagggagaaccugggcccccgggacagcaaggcacacccgggacucaaggcuugccggggccccagggcgcgaucggaccucauggggaaaaaggcccucagggcaagccaggucugccaggcaugccugguuccgaugggccacccggccauccuggcaaagaaggcccgccuggcaccaagggaaaucagggucccagcgggccgcaggguccgcugggguauccuggaccccguggugugaaaggcguagaugguauaagaggguugaaggggcacaaaggggagaaaggugaggacggauuucccggguuuaagggugauaucggagugaaaggagacaggggugaagugggcgucccuggcucuaggggggaagacggccccgaaggcccaaaaggacgcaccggcccuaccggagacccuggcccgcccggucucaugggcgagaaagguaaacucggaguuccgggacuacccggguaccccggaaggcagggccccaaagggucucuuggauucccuggguucccgggugccucaggugaaaaaggagcgcggggacuuagcggcaagagcggaccaagaggcgaacggggaccaaccggcccucgaggucagcgcgggccucggggggcaaccggcaaguccggcgcgaaagguacuagcggcggcgacgguccucacgguccucccggggaaagagggcuccccggaccucagggucccaacgguuuuccuggaccaaaaggacccccgggcccaccuggcaaggacggguugccaggucacccaggucaacgcggggaggucggauuccaggggaagaccggcccaccuggaccacccggcguaguugggccccaaggagccgcaggagagacagggcccaugggggaaagggggcaucccggaccuccagggccaccaggagagcagggcuugccggggacggcagguaaagaaggcacuaaaggugacccuggaccaccuggcgcccccggaaaggacggccccgccgggcugaggggguuuccuggagagaggggacuacccgggacugcaggcggcccagggcuuaaaggcaacgagggaccaucuggcccccccggacccgccggaucucccggagagagaggggcagccggauccggagggcccaucggacccccaggacgcccuggaccucaaggaccuccaggggccgcaggagagaagggagucccaggcgaaaaagggccuaucgguccaaccgggcgugaugggguccaaggcccagugggacuuccugguccagcaggaccucccgguguggcaggcgaggacggcgacaaaggcgaagugggagacccaggucaaaaaggaacaaaaggcaauaagggggagcacggccccccagggccccccgggccuauaggaccugucggacaacccggcgccgcuggagcggauggcgaaccaggcgcccggggcccgcagggacacuuuggagccaaaggagacgagggcacccgcggauuuaauggaccccccgggccuaucggcuugcagggucugcccgggcccucuggcgagaagggugagacuggggauguaggcccgauggguccgccugggccacccgguccccggggaccagcagguccuaacggagccgaugggccucagggaccaccaggcggcgucgggaaccugggcccaccgggagaaaagggagagccaggggagagcgggagcccugggauucaaggugaaccuggggugaaaggcccuagaggcgagcggggagaaaagggggagaguggccagcccggcgaaccggguccacccggaccuaaaggucccacuggggacgaugggcccaaagguaacccaggcccggugggcuucccgggcgaccccgguccccccggggaagguggccccaggggacaggauggagcuaagggcgacagaggcgaagauggagagccaggccaaccuggaucuccuggcccaacgggugagaaugggccuccagguccucuggggaagcgaggucccgccgguagcccugguagcgaaggacggcaggggggaaaaggagccaagggcgacccuggcgcuaucggugcuccugggaagacuggccccgugggacccgccggaccagcggguaaacccgggcccgacgguuugaggggcuugccaggcucaguggggcagcagggcagacccggagcuacugggcaagcggggccgccuggccccgugggcccgccuggccugcccggauugcggggagaugcaggcgccaaaggcgaaaaaggucauccuggucucauugggcugaucgggcccccaggagaacaaggcgagaaaggcgacagaggucugcccggaccucagggcuccccuggccagaaaggggaaauggggauucccggggcaagcggcccaaucggucccggcggccccccgggucuccccggacccgcaggcccuaagggggccaaaggagcuacgggaccaggaggcccuaaaggugagaaggggguacagggcccucccgggcacccaggcccgccuggagagguuauccagccuuuacccauacagaugccaaaaaagacaaggagauccguggauggaucacggcucaugcaagaggaugaggcgaucccaaccggaggggccccuggaucaccuggaggccuugaggaaaucuucgguucacucgauucucugcgggaggagauugaacaaaugagacgcccaacuggaacgcaggacuccccagcuaggaccugucaggacuuaaaacugugucauccugagcugccagauggcgaauacuggguggacccuaaucaggguugcgcucgcgaugccuucagaguuuucuguaauuuuaccgccgguggcgagacuugcgugaccccuagagaugauguuacgcaauuuucauacguggauucggagggaagcccugucggcgucguucagcuuaccuuccugcgacuguugagugugagugcccaucaggacguaucuuaccccugcucuggggcggcaagggacgguccccugcgacugagaggagcaaaugaagaugagcugaguccugagacaagcccauacgugaaagaauuucgagauggaugccagacacagcagggaagaaccguguuggaggugagaacaccagugcucgagcagcugcccgugcuggaugcgucuuucagugaucugggcgccccaccucgccgcggaggcguucuguugggacccgucugcuucaugggcuag

SEQ ID NO: 232653 - RNA, 5133 nt, Artificial Sequence
  derived and/or modified sequence
auggaaagguguagcaggugucacaggcugcuauugcugcugccccuuguccugggcuugagcgcagcaccuggaugggccggagcacccccaguugauguucugcgcgcccugcgcuucccuucccugccggacgguguaaggcgcgccaaggggauuugccccgcugaugucgcuuaccgaguugcgcgaccagcucaguuaagugcaccuacaagacaacuguucccuggcggcuuucccaaggauuuuucccugcuuacaguugugcgcacgagaccaggccugcaagcgccccuacugacauuguacucugcccaggggguccggcagcugggucuugaauugggcaggcccguucguuuccucuaugaggaccagaccggucgcccacagccucccucucaaccggucuuuaggggccuaucucuggccgacggcaaguggcaucgagucgcuguggcugugaagggucagucggucacccugaucguggauuguaaaaaacgggugaccaggccccugcccaggucagcccgccccguacuggauacccaugguguaauuaucuucggcgcccgcauccuugacgaggagguguucgaaggggaugugcaggaacuagcgauugucccuggagugcaagccgcauacgaaagcugugaacagaaggagcuugaaugugagggcggacagagagaacggccacaaaaccagcaaccccaccgggcacaaaggagcccucagcagcagccuucucgucuccaccggccucagaaccaggagccccaaagucaggaccccacccccggcgaggaagaggagaucuuagaauccucccuccugccaccccuugaggaggaacagaccgaccugcaggugccacccacagcagaccgguuucaagcggaggaauauggggaggguggcacugauccccccgaggguccuuaugacuacaccuauggauauggcgacgacuaccgcgaagagacugaacugggacccgcucucucagcggagacagcucacuccggagccgcagcucacggcccuagaggacucaagggggagaaaggcgagccugcuguuuuagagcccggaaugcugguugagggcccaccaggcccugaggguccagcaggccuuauaggaccuccgggcauucaggggaauccuggcccuguuggcgacccaggcgaacguggcccacccgggcgagccggguugccaggguccgauggcgcccccgggccacccgggacuucacugaugcugccuuuccgauucgguucaggggggggcgauaagggacccgugguggcugcacaagaggcccaagcccaggccauccuucaacaggcacggcuggccuuacgcggaccgcccggaccuaugggcuacacaggccggccaggcccacugggacaaccuggcagcccuggccugaaaggggagaguggugaucuuggaccacagggccccagggggccccaaggccugaccggaccccccggcaaagcgggaagacgaggcagagcuggggccgauggggcacgcgggaugccaggagacccgggagugaaaggagaccgaggcuucgacggccugcccgggcuuccaggugagaaaggucaccggggcgacacuggcgcgcagggacugccuggcccacccggggaagacggagaacggggagacgacggagagauuggcccucgcggacugcccggugaaucaggaccacggggacuccuggggccaaaagggccuccagguauaccugguccaccugggguccguggcauggauggaccacaagguccuaaggggucgcucggcccgcaaggagaaccaggcccucccgggcaacaggguacucccggcacucagggccugccaggaccacagggcgccauugggccacacggggagaagggcccccaaggcaagccaggucuuccaggaaugccagguagcgauggcccaccgggccaucccggaaaagagggcccacccggcacaaaaggcaaccagggccccucagggccacagggaccacugggauauccaggcccccgaggagugaagggcguggacggcaucagaggacucaagggccauaagggggagaagggugaagauggauuccccggauucaaaggcgauauuggagucaagggcgacaggggcgaagugggcguucccgguucccgaggggaggacggcccugaggggccgaaggggcggacuggcccaacaggggaucccgggcccccaggucugaugggcgaaaaggggaagcucggugugccaggauugccugguuaccccgggcgucaaggccccaagggcaguuuaggguuccccggauuuccuggagccaguggugagaaaggggcccgcggcuugucaggcaaaucuggaccccggggggaaaggggcccgaccgggccgcgcgggcagagaggacccaggggcgcaaccggaaagucuggagcaaaagguacaaguggcggcgauggaccacacggccccccuggugagcgugggcuuccagggccccaggggcccaauggcuucccugggcccaaaggaccuccuggaccacccggcaaagaugggcuacccgggcauccuggacaacgcggcgaggugggauuccaggguaaaaccgguccgccuggucccccaggcgucgucggcccucaaggggccgcaggagagacagggccuaugggcgagcggggacaccccgguccgccugggcccccaggugaacaaggcuugccaggaacugcaggcaaagagggcacaaaaggcgaucccgggccccccggggcuccagggaaggauggacccgcugggcugcgugguuuuccaggcgaacggggucugccgggcacggcuggcggaccuggucuaaaagggaacgagggaccaaguggaccgcccggacccgcgggcucacccggggagagaggcgcugcgggauccggagguccuauuggaccuccaggacgaccaggcccacagggacccccaggagccgcuggcgagaagggaguuccaggggagaagggccccauaggcccuacuggccgagauggaguccagggcccagugggacugccaggccccgccgguccaccuggagucgcgggggaagauggugauaaaggagagguuggcgaccccggccagaagggaaccaaagggaacaaaggagagcaugggccuccugguccgccagggccaauaggucccgugggccaaccuggcgcugcuggcgccgacggcgaaccuggcgccagagguccacaggggcauuucggggccaagggagacgagggaacccggggcuuuaacggccccccuggcccaauuggccuccagggauuaccaggaccaagcggagagaagggcgaaacgggagauguugggcccaugggcccuccggguccaccaggcccccgcgggcccgcaggacccaauggcgccgacgguccccagggccccccugguggcgugggcaaccucgggccuccaggcgaaaaaggagaaccuggagagaguggaucccccgguauccaaggagaaccaggcgucaaggguccuaggggcgaaaggggcgaaaagggggagagcggccagccaggcgagccuggccccccggggccgaagggacccacuggcgacgauggucccaagggcaacccaggcccggucggguuuccaggugacccuggaccaccaggggagggcggaccuagagggcaggauggugcgaaaggcgacaggggcgaggacggcgagccgggucagccagggagcccuggaccuaccggagagaauggccccccuggaccgcuuggcaaaagaggcccugcugguaguccaggcagcgaggggagacagggaggcaaaggagccaagggagacccgggcgcaauaggggcucccggaaagacaggcccaguggggcccgcaggaccggcaggcaaaccgggccccgacggacuccgcggacugccgggcagcgugggccaacaggguaggccuggcgcuacgggucaagccggaccuccuggcccuguggguccuccgggacugccaggacugagaggggacgccggagcaaagggggaaaaaggccaucccggauuaauuggucugaucggcccaccgggagagcagggagaaaagggcgaccgcgguuugccagggccacagggcucaccuggucaaaaaggcgaaaugggcaucccaggggccucagguccuauuggccccggcggcccacccgggcugcccggcccagcaggacccaaaggggcaaagggugcgacugggccuggaggccccaaaggagaaaaaggaguccaaggaccccccggucacccagguccuccuggcgaaguaauccaaccucuacccauccagaugcccaaaaagacgcgaaggucuguggacggcagccgucuaaugcaggaagaugaggccauucccacaggcggcgcuccaggcucuccgggcggccuugaggaaauuuuugguagucucgauagcuuacgcgaggaaaucgagcagaugcggcggccaacagggacacaggacucgcccgccagaacaugucaggaucugaaauugugccacccggagcugccagacggcgaguacugggucgauccuaaucaggguugcgcaagagacgccuuuagggucuucuguaauuuuacagcaggcggagaaacuugcgugacuccccgugaugauguaacgcaauuuucauacguggacuccgagggcucuccgguaggcguggugcaguuaaccuuucuccgacuguuaagcgugucugcucaccaggauguguccuaccccugcucuggcgcugcgagggacggcccuuuaagacuucgcggcgcuaacgaggacgaacuuagucccgaaacuagcccuuacgugaaggaguuccgcgacggaugccagacucagcaaggccggacggugcuggaggugagaacacccgugcuggagcagcugcccguccuggacgccagcuuuucagaccuuggugcaccaccaagaaggggaggcguccuguugggccccguguguuucaugggauag

SEQ ID NO: 232654 - RNA, 1875 nt, Artificial Sequence
  derived and/or modified sequence
auggagcgcugcagccggugucaccgacuccuccuucuguuaccccucgugcugggcuuaucugccgcccccggcugggccggagcuccaccaguugaugucuugagagcacugagguuucccagcuuaccugacgggguccgacgggcaaaggggaucuguccagccgacguagcguaccgcguggcgagaccagcccaguuaucggcuccuacccgucaguuguuccccgguggguuccccaaagacuucucucucuuaacggugguucggacccgaccuggacuccaggccccccuucugacacucuauuccgcacaggggguuaggcaacugggccuagagcucgggcgcccagucagguucuuguaugaagaucagaccggcaggccucagccaccaucccaaccaguuuuccgcggguuaucccuggccgacggcaaguggcaccgcguugcagucgcugugaaaggccaguccgucacacucauuguagauuguaaaaaaagagugacccggccguuaccuagauccgcccgccccguacuugacacucacggaguuauuauuuucggugccaggauccucgacgaggaggucuuugagggcgauguacaagaguuggcuauaguacccggcguccaagcugcauacgagucuugugagcagaaggaacucgagugugaaggcggccagcgcgagcgaccacagaaucagcaaccgcaucgcgcccagcgaaguccucaacagcagcccuccagauugcacagaccccagaaucaggagccacaaucccagccaacugaaagucuauacuacgauuauaagccccccuauuacgaugugaugaccacaggcaccacuccugauuaucaggauccaacuccuggcgaagaggaagagauucuugagaguucccugcugccgccgcuggaagaagagcagaccgacuuacagguuccaccaaccgcagaccgauuccaggcggaagaguauggcgagggcggcacagauccaccagagggccccuaugacuacaccuauggauauggggacgauuauagggaagagacagaacugggaccagcauuaucagcagaaaccgcacacuccggagcugcagcccauggaccccgcggccugaagggagagaagggcgaaccagcugugcuagaaccaggaaugcucgucgagggaccuccugguccugaaggaccagccgggcuuauugguccaccuggaauucaggggaauccaggccccgucggagacccuggggaacgagggccuccagggcgcgccggucugcccggcagcgacggugccccagggcccccaggaaccagucuuaugcuuccauuccgcuuugguucaggcgggggggacaagggaccugugguugccgcccaggaagcccaagcccaggcuauucuccagcaggcccgucuggcgcuuagagggccucccgggccuaugggcuauacugguagaccaggcccccuugggcaaccgggaucuccaggguugaaaggggagaguggugaucucggaccucagggcccacggggcccacagggccuuacagggccuccuggcaaggcagggcgccgggggcgcgcuggggccgacggggcacgggguaugccaggcgacccuggcguaaagggugacagaggauucgacgguuugcccggcuugccgggagagaaaggccaccgaggcgauacaggggcccagggccugccagggccuccaggcgaggacggugagagaggggaugauggggagauuggcccucgggggcugccgggcgaaaguggcccacgcggccuccuagguccaaaggggcccccagggauuccaggcccacccuag

SEQ ID NO: 232655 - RNA, 1875 nt, Artificial Sequence
  derived and/or modified sequence
auggagagauguucuagaugccacaggcuccuucuguugcugccacugguacugggccugucagcggccccaggcugggccggggcaccuccaguagaugugcuuagggcccuccgguuccccucucucccagauggagugcgccgagcaaaggggaucugucccgcugacguugcguaucgcgucgcuaggccugcacaguuaagcgccccaacucgccagcucuuuccuggcggcuucccuaaggauuuuucacugcucacagucgucagaacccggccuggucuucaggccccucugcucacccucuauagcgcucagggggugcgccagcucggauuggaacuuggcaggcccguuagguuccuguaugaggaucagacaggcaggccccagccgcccucucaacccguauuucguggccuguccuuggcugaugguaaauggcacagggucgccguggcaguaaaaggucagucugucacuuuaauuguggauuguaagaagcgcguuacucgcccccugcccagaucugcuaggccgguucuggauacccacggcguaauuaucuuuggugcuagaaucuuagacgaggaggucuuugaaggugauguucaagagcuagcuaucgucccaggcguccaggccgcauaugaaucuugcgaacaaaaggaacuggaaugcgaaggcggccagagagagagaccacaaaaucagcaaccucacagggcucagcgcagcccacagcaacagccuuccagguugcauagaccccagaaccaagaaccgcagucucagcccacugagucccuguacuacgauuaugagccgccuuacuaugacgugaugacuacagggacgacccccgacuaccaagacccaacacccggggaagaggaagagauucucgagagcuccuuauuacccccguuagaggaagaacagacggaccuucaggugcccccuacugcugacagauuucaagcggaggaguacggugaaggugggacagacccgccagaagggccauacgauuauaccuacggcuacggagaugacuauagagaggagacagaacugggcccugcccuuagugcggagacagcccauaguggagccgcagcucacggcccucgcggacugaaaggcgaaaagggggagcccgcuguccuggaaccugguaugcugguagaaggacccccgggcccggagggcccagcgggacugaucggaccuccuggaauucaggguaacccugggcccgucggcgacccaggugagagggguccgcccggcagagccggguugccgggaagugauggagcaccagggccccccgggaccagucuuaugcuacccuuuagguuuggaucaggugguggagacaaggggcccgugguugccgcacaggaagcccaggcccaggcaauccugcagcaggcgcgccuggcccuucggggaccuccagggccgaugggcuacaccggucguccagguccucuuggacagccaggcaguccugguuugaaaggcgagucuggagaccugggcccacaggggccucgggguccgcaggggcuuacuggucccccggguaaggcagggcggagagggagagcuggcgccgacggcgcuagggguaugccuggggacccaggugucaagggagaucgaggcuucgaugggcugccuggcuugccuggcgagaaggggcacaggggagacacaggagcccagggcuugccagguccuccaggcgaggacggagaacguggugacgauggcgaaauagguccgcgcggccugcccggugaaagcggaccaagaggcuuguuaggaccgaaaggacccccuggcauaccugggccgccuuag

SEQ ID NO: 232656 - RNA, 5133 nt, Artificial Sequence
  derived and/or modified sequence
auggagcggugcagcaggugccacagauuguuguuguugcugccacuugugcugggccugucugccgcucccgggugggcaggggccccgcccguugacguccugcgcgcucugagauuuccuucacuaccggacgguguccggcgggcuaaaggaaucuguccagcagacguggcuuaucgcguugcccgaccugcacaauuauccgccccuacacggcagcuguuucccgggggcuuccccaaggauuuuucacuacucacgguggugagaacacgccccggacuucaagccccccuacucacacuguacucugcacagggagugagacagcugggauuggaguugggccgccccgugagguuucucuacgaggaccagaccggcagaccccaacccccuagucagcccguguuucgaggccucucccuugccgauggaaaguggcaccgcguugcagucgccgugaaaggucagucagucacguugaucguagauugcaagaaaagagucacaaggccccucccaagguccgcaaggccgguucuugauacacacggcgugaucaucuuuggagcacgcauccucgaugaggaaguuuuugaaggcgaugugcaagagcuggcuauugucccaggcgugcaggcugccuacgaaagcugcgaacagaaagagcuagagugcgaaggcggacagcgagaacggccacaaaaccagcagccccauagagcccagagauccccccaacagcagccuagucgucuucacagaccccaaaaucaggaaccccaaagucaggauccaacccccggcgaagaggaagagauucuugaguccagucugcugccaccacuggaggaagagcagacugaccugcagguaccccccacggccgacagauuucaggcagaggaguacggcgagggagggaccgacccacccgaaggccccuacgacuauacauacggauacggcgaugauuaucgagaggagacggaguuagggccggcccuuagcgcugagacagcacauagcggggcagcugcacacgguccucgaggucuuaaaggugaaaagggcgaacccgccgugcuggaaccggguaugcuaguggaaggaccucccggaccugaggguccggcugggcuuaucggaccuccaggaauccagggcaaucccggaccugugggcgacccaggggagcggggccccccugggagagccggucugccagggagcgauggggccccaggaccucccggaaccucacugaugcuccccuuuagauuuggaagcggagguggugauaagggacccgugguggcggcacaggaggcccaggcacaggccauccugcagcaggccagacucgcucugaggggcccccccggccccaugggguauacagggcgcccgggcccacuggggcaaccagguucgcccggcuugaagggggaaagcggugacuugggcccacaaggaccccgcgguccucaaggcuugaccgggccacccggcaaggcagggagacgagguagggccggcgcggacggcgcaagagggaugccaggugaucccggcgucaaaggagaucgcgguuuugauggcuugccagggcugccuggagagaagggacacagaggugacacaggugcgcagggacucccaggaccccccggcgaggauggggagcguggcgaugacggcgagauugggcccaggggucugcccggcgagagcggcccccggggcuugcugggcccaaaaggcccucccggcauacccggcccucccggaguucgcgggauggacgguccacagggccccaaaggaagccucggcccgcagggggagccgggaccccccggacagcagggaacuccaggaacccagggccugcccgggccacaaggugccaucgguccgcauggagaaaaaggaccucagggaaagccuggucugccagguaugccugguuccgacgggccuccugggcauccaggaaaggaaggcccgccuggcacaaaaggaaaucaaggcccaagcgguccgcagggaccacugggguauccaggaccgcggggggugaaggggguggacgguaucagggggcugaaaggucauaagggagagaagggagaggauggauucccaggauucaagggcgauaucgggguaaagggagaucgaggcgagguuggggugccaggcagccggggugaagacggucccgaaggcccuaagggacggacgggccccacuggcgauccagggccgcccggguuaaugggggaaaaagggaaacugggaguuccagggcuuccgggauauccuggacggcaagguccuaagggcagucucggauuuccagguuuccccggggcaucuggugaaaagggcgcucgagggcuuucaggaaaguccgguccuagaggugaacgcggaccaacgggcccucgcgggcagcgaggcccccguggagcaacuggcaagagcggcgcaaaggguaccucuggcggagacggcccacacggaccccccggagaaagaggccuccccgguccacaagggcccaacggguucccuggaccaaaggggccaccggguccccccggcaaagauggacugcccgggcaucccggacaacgcggugaaguaggcuuucaaggcaagacagggccgccgggcccucccggagucgugggcccccagggggccgccggugaaacagggccgaugggcgagagaggccacccuggcccgcccggaccacccggugaacaggggcugccagggaccgcuggaaaggaggggacaaaaggcgacccugggcccccgggcgcuccuggcaaggacggccccgccggcuuaagaggguuccccggggagcgcggguuacccgggaccgccggagggccagggcugaaaggcaacgagggucccuccggaccacccggucccgcaggcucgcccggugaacgcggggcugcaggaagcgggggccccauagggccucccggcaggccggggccacaagggcccccaggugcugcuggcgagaaagggguucccggcgagaaaggcccuaucgggccaacaggacgggacggcguucaagggccuguuggccucccaggaccggccgguccacccggcguggccggggaggauggugauaaaggggaggugggggacccuggccaaaaaggcacuaaggggaauaagggugagcacggacccccgggcccccccgggccuauuggcccagugggucaacccggggccgcuggagcagauggcgaaccaggcgcucgcggcccccagggccauuuuggagccaaaggcgacgaggggaccagaggcuucaacggacccccuggaccgauugggcuucaaggacugcccgggccaagcggggagaagggagagacuggcgaugugggccccaugggacccccuggucccccuggaccgaggggacccgcuggccccaacggcgcagauggcccacaagggccacccgguggcgugggcaaucuggguccaccaggagaaaagggcgagccaggggaaucuggcucccccggcauacagggugaacccgggguuaaggguccaagaggagaacgcggagagaagggcgagagcggccagcccggcgaaccagggccccccggcccaaagggaccuacaggagaugauggcccuaaggggaacccuggaccggugggcuuuccaggagacccggguccuccuggcgagggggggccaagaggccaggacggcgcaaaaggcgacagaggggaggauggcgaaccuggucagccgggcagucccggaccaacaggugagaacggcccuccugguccucugggaaagagaggucccgccgguucuccaggaagugaaggucggcagggggggaaaggagccaagggcgaucccggagcaauuggggcacccgguaaaaccggucccguagggccagccggaccugcuggcaaaccugguccagauggccugaggggacugccuggcagugugggccagcagggcagaccaggggccaccggacaggcaggaccuccuggcccaguggggccaccuggccugccgggacugaggggagacgccggagcaaagggugagaagggccauccuggacuuauuggacuuaucggacccccaggcgaacagggggaaaagggggaucggggccugccggggccccaggggucacccggucagaaaggagagaugggaaucccgggggcuagcggucccaucgggccggguggaccacccggacugccaggcccggcaggcccgaaaggagccaaaggcgcaaccggaccagggggaccuaaaggcgagaaaggcguccaggggcccccuggucaucccggcccacccggggaggugauucagccgcucccaauucaaaugccaaaaaagacucgcagaucagucgaugguagucguuuaaugcaagaagaugaagcaauccccacagggggugccccagguucacccggcggccuggaggaaaucuucggaaguuuggacaguuuacgggaagagauagagcagaugaggagacccaccggcacccaagauucgccugcccggacaugccaggaucuuaaacuaugucacccggagcuucccgauggggaauauuggguugaucccaaucaggggugcgcuagagaugcauuccgaguuuucuguaacuuuacugccgguggcgagacuugugucacgccuagagacgacguuacccaauucucauauguggacucagagggaucaccuguuggcguuguucaguugacuuuccuaagacuccucuccgucucagcccaccaagaugugucuuaccccuguuccggagcugcccgggacggcccacugcgacugagaggugccaaugaggacgagcuaucacccgagacgucaccauacguuaaagaguuucgggauggaugccagacacagcagggccguacagugcuggaggugcggacucccguuuuggagcagcuacccgugcuggacgccuccuucucagaccucggggccccucccagaaggggaggagucuugcucggcccagugugcuucaugggcuag

SEQ ID NO: 232657 - RNA, 5211 nt, Artificial Sequence
  derived and/or modified sequence
auggaaagaugcucaaggugucacagacugcuccugcugcucccucugguccuuggccuaagugccgccccaggaugggccggugcacccccugucgaugucuuacgagcccuccgcuuuccuucacucccugacggugugaggcgcgcgaaggggaucugccccgccgaugucgcuuauaggguugcucgacccgcccagcugucugccccaacgaggcagcuuuuuccuggcgguuuuccaaaggauuuuucucugcuuaccgucguccguacucggccggggcugcaagcaccucugcucacucuguauagugcucaggggguucggcaacugggguuggaacuaggccgccccguccgcuucuuguaugaggaucagaccggucgaccccagcccccgucacaaccugucuuucggggucugagucuggcagacggcaaauggcaccgaguggcgguggcuguuaaagggcagucuguaacacugaucguggauuguaagaaacgcgucaccaggccccucccccgcucugcucguccagugcuggacacacacggcguaauuaucuuuggagcccgcauccucgaugaagagguauucgaaggagacguacaggagcuagcaauaguccccggcguucaggcagccuaugaauccugcgagcaaaaagaauuggagugcgaaggggggcagagggagcggccucagaaccagcagccgcaccgggcccagaggucgccucagcaacagccgucaaggcuccacaggccucagaaccaagagccucagucccagcccacagaaucacucuacuacgauuauaagccuccauacuacgacgucaugacaaccggcaccaccccagacuaccaagauccaacucccggggaggaagaggagauucuggagucuagucuccugccuccccucgaggaagagcagacugaucuccaggugccuccuacggccgaccgguuccaggcugaggaauacggugaaggcggaacagacccuccugaagggccuuacgacuacacauacggguacggugaugauuacagagaggagacagaguugggcccggcccuuucggccgaaacagcucacagcggagcagccgcgcacggcccgaggggguugaaaggggagaagggggaaccugcaguacucgagcccgggaugcucgucgaggguccacccggaccugagggaccagccgggcugaucggaccaccaggaauucagggcaaccccggucccguuggugauccuggcgagcgaggccccccaggccgcgcuggucucccagggagcgauggagcacccgggcccccggggacaucucugaugcucccauuucgguuuggauccggugggggagauaagggaccaguuguggccgcacaagaggcacaagcccaggccauccugcagcaagcucgccuugcguugcgggggccuccuggaccaaugggauacacuggaagacccggaccucugggccagccaggcagccccggccucaagggagagagcggcgaccuugggccucagggaccucgcggcccccagggcuugacagguccccccgggaaagcuggccggaggggccgagccggggccgauggagcccgaggcaugccgggcgauccagggguaaaaggcgacaggggauuugauggacucccaggacugccaggagagaaaggccaucggggcgacacaggagcucaaggucugcccggacccccgggggaagauggagagagaggcgacgauggugagauugggccucggggacugccaggagaaucugggccucggggauuacuugguccuaagggcccaccggggaucccuggaccaccaggaguacgcggcauggacggaccgcaggggccaaaggggagccuuggcccccaaggugaaccaggcccgcccggacagcaggggacuccgggaacucaggggcugccaggaccucagggagcuauugggccccacggggagaaaggaccccagggcaagcccggacugccuggaaugccgggauccgaugguccaccagggcauccggguaaggaaggaccccccgggacuaaggggaaucagggaccgucuggaccacaagggccacuuggauacccugguccccgaggcgugaaagguguggacggaaucaggggacugaagggacacaagggggagaaaggggaggacggguuucccggauucaagggcgauauugguguaaaaggagacaggggggaggugggcguuccggguagccgcggagaggacggcccagaaggaccuaagggaagaacugggcccacgggagauccaggcccuccugguuugaugggagagaaggggaaacucggaguccccgggcugcccggauacccaggucgccaaggucccaagggcuccuugggauuucccggcuuucccggggccagcggugaaaaaggagcucggggccugagcggaaagucugggccuaggggcgagcggggucccaccggcccuagaggacaaagagggccucggggcgccacaggcaaaucuggcgcgaaagguaccucggguggcgauggcccacacggaccgccuggagagagagggcuuccgggaccucagggccccaacggauucccuggcccaaaaggccccccaggacccccuggcaaggauggcuuaccaggacacccagggcagcgaggcgaaguaggcuuucaagggaagacgggcccuccgggaccuccuggcguaguugggccccagggcgcggccggagagaccggaccuaugggggaacgaggccacccaggcccaccgggcccgcccggggagcagggccugccugggacugccgggaaagaggguacgaagggggaccccgggccacccggcgccccaggaaaggacgguccagccggacuacgaggguucccgggagaaaggggccugccagguacugccggcggaccaggacugaagggaaacgaaggccccaguggaccaccuggacccgccggaucucccggagagcgcggggccgcugguuccggggggccaaucgggcccccaggcagaccgggcccccagggcccccccggugccgcaggagagaagggcgugccaggggagaaaggcccuauuggcccuaccgggcgugacgguguccaggguccugugggccugccgggacccgcaggcccaccaggcguggccggcgaagacggagauaagggagaggugggagacccuggccagaaggguacuaaaggcaauaaaggagagcacggccccccaggcccuccugguccaauuggcccugucgggcagccaggggccgccggggcggauggcgagccgggagcacgcggcccacaggggcacuuuggggcaaaaggcgacgagggaacuagagguuuuaaugggccucccgggccuauuggguuacaaggucuaccuggaccaucaggggaaaagggagagacaggcgaugucggccccauggggccuccagggccccccggcccgcgcgggccagccgguccaaauggcgcagauggcccacagggacccccugggggcguugguaaccuggggccaccaggcgagaagggcgaaccuggcgaaagcggcuccccugggauucagggagagccuggcguuaaagggccucggggggagagaggcgaaaagggcgaaagcggucaacccggcgaacccgguccacccggcccgaagggacccacaggugaugacgguccaaagggaaacccuggcccgguggguuuuccuggugacccuggaccccccggugagggggggcccagaggacaggacggagccaagggcgauagaggagaggacggagagcccggucagcccggcaguccagggccuacaggggaaaacggaccaccugggccacuugguaagaggggccccgcugggaguccaggcucagaaggacgacaaggcggcaagggugcuaaaggugauccaggggcgauuggagcccccggcaagacagggccugucgggccggccgggccugccggcaagcccgguccugauggcuuaagaggucugccuggaaguguuggccagcaagguaggcccggcgcaacugggcaggccggcccuccugggcccguggggccgccgggauuaccaggcuugcgcggugacgcaggcgcgaagggcgagaagggacauccuggucugaucgggcuuauaggaccgcccggagagcagggagagaaaggcgaucggggacuacccgggccacaggguagccccggccaaaagggcgagauggggaucccuggugcuuccgggccuauuggcccugguggaccuccugggcuaccaggcccagccgggccaaaaggcgcaaagggugcaaccggccccggugggccuaaaggcgagaagggagugcagggacccccgggacauccaggcccaccuggcgaggugauccaaccccugccaauucagaugccgaagaaaacacggagaagcguugacggcagccggcugaugcaggaggacgaagccauuccgacuggaggagcccccgguaguccugggggguuggaggaaaucuucgggagccuggauucucugcgcgaagagaucgagcagaugcgacgccccacaggcacccaggauucaccagcgagaacaugccaggaucugaagcugugccacccagaacugcccgauggagaauacugggucgacccuaaccagggcugugcucgcgaugccuuccguguuuucugcaauuuuacagcugguggggaaacaugcguuacaccacgggacgaugugacgcaguuuucauacguggacucagaagggaguccugugggagucgugcaacugacauuccuaagacuguugucagucucggcacaucaagacgugucauauccuugcaguggugccgcucgagauggaccccugcgauugagaggggccaaugaggaugaacugucgccggagacuucccccuauguuaaggaguuuagggacggaugccagacucagcaggguagaacuguucuugaggucaggaccccaguguuggaacagcucccuguccuggacgcaucuuuuucugaucugggcgcccccccaagacggggagggguuuuacuggguccgguuuguuucaugggcuag

SEQ ID NO: 232658 - RNA, 5070 nt, Artificial Sequence
  derived and/or modified sequence
auggagagauguucuagaugucauagacuucugcuuuugcuuccuuugguucucggguugucugccgcgccuggaugggcgggcgcuccuccaguggauguccugagagcgcuccgcuucccuucccugccugacggcgugagaagggcgaaggggaucugcccagccgauguggccuaccggguagcacgcccagcgcagcuuagugcccccacucgacaacuguuucccggaggauucccuaaggauuucucccuccuaacaguggugcgcacgaggcccggccugcaggcuccgcugcugacccuguacucugcgcagggugugaggcagcucggucuggaacuuggucguccuguaagguuucucuacgaggaccagacuggcagaccacagccuccaucucagccaguguucagagguuuaagccuugccgauggaaaauggcaccgcguggcgguggccgucaagggccaaagcgucacguugaucguggacuguaaaaagcgggugacucguccuuugccccgcucugcccgucccguguuggacacgcacgguguaaucaucuucggcgcccggauccuugacgaggagguguucgagggagacguccaagaacucgccauuguucccggagugcaggccgccuacgagagcugugaacagaaagaauuggagugcgaagguggccagagggagcggccgcagaaccaacaaccgcaccgcgcccagcgcuccccacagcagcagccaucgagacugcauagaccgcaaaaucaagaaccacagucucaggagcagacggaccugcagguuccacccacagccgaccgguuucaagccgaagaguacggggaagguggaaccgauccacccgagggaccuuacgacuacacuuacggauacggagaugacuaucgggaggaaaccgagcugggucccgcccuuucugcagagacagcucacucuggggcggccgcccauggaccuagggguuugaaaggugagaagggggagccugccgugcuugagccugguaugcucgucgagggcccucccggaccugaggggccagcuggcuugaucggaccccccggaauucaaggcaacccugggcccguuggagacccaggagaaaggggcccuccugguagggcugggcugccuggcuccgacggcgcucccggaccacccggaacauccuugaugcuaccuuuuagauuugggucgggcgguggugauaagggccccguggucgccgcccaggaagcccaggcccaggcaauucuccagcaggccaggcucgcacugcgcgggccuccagggcccaugggauauaccggucggcccgggccccugggccagccuggcucccccggccugaaaggggagucaggcgaccuggggccucagggcccaaggggcccucaggguuugacaggccccccuggaaaggcgggacggaggggacgggcuggcgcagauggcgcacgggggaugcccggggauccuggcgugaaaggagauaggggcuuugacggacugcccggauugcccggcgaaaagggccacaggggugauaccggugcacaaggucuaccggggccccccggcgaggauggcgagcguggcgaugacggcgaaauaggaccacggggacucccaggcgagucuggcccucgcggacugcugggaccaaaggggccucccgggauccccggccccccuggcgugcguggcauggacggcccucaagggcccaagggcagccuggggccacaaggagagccagggccuccuggucagcagggaacaccaggcacucaagggcugcccgguccacaaggagcaauaggaccccacggcgaaaaaggcccucaggggaaacccggacuccccggaaugccugggucagacggcccccccggucaccccggcaaagaagggccaccgggcaccaaagggaaccaggggccaucagggccgcagggcccgcuuggauauccagggccccguggggugaaggggguggaugguauacgcggccucaaagggcauaagggcgagaaaggagaagauggauuuccuggcuucaaaggggacauugggguuaagggggaccguggcgaggugggagugccaggcagucgcggugaggauggcccugaggguccuaagggcagaaccggaccgaccggggacccgggcccgccgggguugaugggcgagaaagggaagcugggugucccugggcugccaggcuauccagguagacagggaccuaagggcagucuuggguuuccaggcuuucccggcgcuagcggagagaagggcgcacguggauuaagcgggaaauccgguccaaggggugagcgcgggccaacggggccccgcggacagcguggcccacguggagcuacaggcaagucaggggcaaaaggaacuagcgggggcgauggcccacacggaccacccggugagcgcggucuuccaggcccccaaggucccaacggcuuuccagggccaaaggguccuccggguccuccagggaaagauggucuaccagggcacccaggccagcggggcgaaguugguuuucaaggcaaaaccggcccuccaggcccuccaggagugguuggaccacagggggcugcuggugaaacuggcccaaugggagagcgcggccacccaggccccccagggccuccaggcgaacagggccucccgggcacugcuggcaaagaaggaaccaaaggagacccugggcccccuggcgcucccggaaaagacggcccugccggacuccguggcuuccccggggaaagaggucugccuggcacugcugggggaccaggucucaaggguaaugaagguccuucuggaccucccgguccugcuggcagucccggugagcgaggggccgcggguaguggcggcccuaucgguccucccggacgucccgggccccaggguccucccggcgcugcuggcgagaagggcgugccuggggagaagggaccaauuggacccacaggccgcgacggcgugcagggacccgucggccugccaggaccggccggaccucccggugucgcuggggaggauggagacaagggugagguuggugauccgggacagaaagggaccaagggcaacaaaggagagcacgggccaccaggcccgccuggacccauugggccuguggggcagccuggagcggccggggcggacggagaaccaggggcaagagggccccagggccacuucggagccaagggggaugaaggaacccgaggauuuaauggccccccggggcccaucgggcugcagggguugcccggcccuaguggagagaaaggagaaacuggcgauguagguccgauggggccuccugguccaccgggcccacgggggcccgccggacccaacggagcugacgggccacagggaccucccgguggagucggcaauuugggccccccuggugagaagggcgagcccggggaaagugguuccccaggcauucagggugaacccggggugaaggguccaaggggcgagcggggagagaagggagaguccggacaaccuggcgaacccggaccuccgggaccaaaggggccuacaggggaugacggaccuaagggcaauccaggacccgucggguuccccggagaucccggcccaccaggagagggugguccuaggggucaagacggagccaaaggagaucggggugaagacggcgaaccugggcagccuggaucuccuggcccgacuggugagaauggcccgccuggcccucugggcaagcgagggccagcagggagcccuggaagugagggucgucaaggcggaaaaggcgcgaagggugaccccggggcuauuggggcgcccggaaaaacuggucccguaggcccugccggacccgccggaaagccaggccccgauggacugagaggauugcccgggucugucggacagcaaggaagacccggugcaacaggccaagccggucccccaggaccagugggcccaccaggacucccuggacugcgcggagacgcuggugcuaagggcgagaagggucacccaggguuaaucgggcucaucgggccaccuggagaacaaggggaaaaaggagaucgagggcugccaggaccacagggauccccaggccaaaagggugagauggguaucccgggggcaagcggaccuaucgguccuggcggcccuccgggccucccggggcccgcaggaccgaaaggcgcuaagggugcaaccggcccaggcgggccaaagggcgagaagggcguccaggguccaccaggacacccaggcccaccuggcgaggucauccaaccccuaccuauccaaaugccaaagaaaacgcgccgcucuguagacggcucucgccuuaugcaggaggacgaagccaucccuacugguggggcucccggaaguccaggaggccuugaagagaucuuugggagucucgacuccuuaagagaggagauugagcagaugaggagaccuacuggaacucaggauucaccagcacguacuugucaggaccuaaagcuuugucacccagaauuacccgacggagaguauuggguggacccuaaucagggaugugcccgagacgccuuccgggucuuuugcaauuuuaccgcugggggggagacaugcguaacuccuagagacgauguuacucaguuuucuuacgucgacucagagggaagcccugugggagucguacagcugacauuccuuaggcugcuguccgucagcgcccaccaggauguuuccuaccccugcagcggugccgcaagggaugggccuuugaggcugcggggagccaacgaagacgagcuguccccagagacaucccccuauguaaaggaauucagagaugggugccagacacagcagggaagaaccguuuuagaagugaggacgccaguucuugagcaauugccugugcucgacgcgagcuuuuccgaucugggggccccuccaaggcgaggagguguguugcucggcccugucugcuuuaugggguag

SEQ ID NO: 232659 - RNA, 5148 nt, Artificial Sequence
  derived and/or modified sequence
auggagagguguagucguugccacagacugcuccuucuacugcccuuaguucucggacucucugcggccccugggugggcuggcgcacccccagucgauguucugagggcccugagguuuccaucccuacccgaugggguuagacgggccaaaggaaucugucccgcagauguggcauauagggucgcuagaccagcucagcuaagcgcuccaacacggcagcuuuuccccggcgguuucccuaaggacuuuucucuacugacaguggugcgaaccagaccaggucugcaggcuccacugcuaacgcucuauuccgcucagggagugagacaguugggccuagagcuggguagaccggugcguuuucuauacgaggaucagacaggaaggccacaaccccccagccagccuguguuccgagggcugagcuuagcagacggaaaauggcaccgaguggcaguugcugugaaaggccagucuguuaccuugauugucgacugcaaaaagagagucacucgaccccuuccuaggucagccagacccgugcucgauacacauggaguuaucauauuuggcgccagaauccuggacgaggagguuuuugagggcgaugugcaggaauuggccauugugccuggcguccaagcagccuaugagucaugugagcagaaggaauuagagugugagggcggacagcgcgagaggccacaaaaccagcagccacaucgggcacagcggagcccacagcagcagccaagccggcugcaccgaccucaaaaccaagaaccucagucucaacccacggaaagucucuacuaugacuacaagccccccuauuacgauguuaugacgaccggaacuacuccagauuaucaggaacaaacugaccuccagguaccuccgacagcagacagguuccaggcggaagaguacggugaaggcgggaccgauccacccgagggacccuaugauuacaccuacggguauggcgaugauuaccgugaggaaacggaacucgggcccgcuuugagcgcugagacagcccacaguggagcagcagcacaugggccgcguggucugaagggagagaagggagagcccgcagugcuggagccugggaugcucguggagggacccccaggacccgaagggccagccgggcugaucgggccgcccggcauucaagguaaucccggcccagucggcgauccuggcgaaagagguccuccuggcagggcuggccucccaggcagcgauggcgcgcccggccccccagguaccagccuuaugcugcccuuucgguuugggucuggggggggagacaagggaccagugguggccgcccaagaggcccaggcucaggcaauucugcaacaagcucggcucgcccuccgggguccacccggaccaaugggguauacagggagaccuggcccucuggggcagccagguucuccugggcugaagggagaguccggagaucuuggcccucagggaccgcguggaccacaggggcugacggguccuccaggaaaggcggggcgccggggccgggccggugcugacggugcucggggaaugccgggagauccaggcgugaagggcgaucggggauuugauggacugccagggcugccaggcgaaaaaggacacaggggagauaccggggcccagggacuaccaggcccccccggugaggacggcgaacgaggcgaugauggugagauagggccacgcggucucccaggggaauccggcccuagaggacuucuugggccaaagggaccuccuggaauccccggcccccccggcgugcgcggcauggauggcccccaaggcccaaagggcagcuuaggaccucagggugagcccggcccaccuggucaacagggcacaccugggacgcaggggcugccagguccccagggggccaucggaccccauggcgagaaggggccccagggaaagcccggguugccuggcaugccuggaucugauggacccccuggccauccagggaaggaggggcccccaggcacgaaaggcaaccaaggcccuuccggaccacaggguccacugggcuauccugggccucgaggagugaaagggguagauggcaucagaggccugaagggccacaagggagagaagggcgaagacgguuuuccaggcuuuaaaggggauauuggagugaagggggaccggggggagguggguguuccaggaucccggggcgaagauggaccugagggcccuaaaggccgcacgggaccaacuggggacccaggccccccagggcugaugggcgaaaaagggaagcuuggugugccuggucugccaggcuauccagguagacagggucccaagggguccuugggguucccaggguucccuggcgcuaguggagaaaagggagcgaggggcuugucaggcaagagugguccaaggggagaaagaggcccaaccggcccuagaggccagagagguccucggggggccaccgggaaaucuggagcgaaaggcacuagcggcggagauggcccacacggaccaccgggugagagggguuuaccugggccucaaggcccuaauggauuucccggaccaaaaggcccgccgggcccuccuggcaaagacggcuuaccagggcaucccggucagcgcggagaagucggcuuccagggcaaaacugggcccccugggccccccggcguaguaggaccucagggugcugcaggagaaacaggcccuaugggugagcgcggccacccuggcccgcccggaccacccggugaacaagggcugccaggcacggccggcaaagagggcacuaagggcgaucccgggccuccgggggcaccuggaaaggauggaccggccggacugcgcggauuccccggagagcgcggccugccagggaccgcagggggucccgggcuuaaaggaaaugaaggccccagcggcccucccggcccagcaggaagcccaggggaaagaggcgccgccgggaguggugggccaauuggaccuccugggcgaccagguccucagggcccgccuggcgccgcaggcgagaaaggggucccaggugaaaaaggacccaucggaccgaccggacgcgacggggugcaggggccugugggccugcccggccccgcuggccccccggguguggcuggggaggauggagacaaaggagaagugggcgacccuggccagaaaggcaccaagggcaacaagggagaacauggcccgccagggcccccagggccaaucgguccagugggacaaccuggggcugccggagcagacggggagccaggugcacgaggcccgcaaggccacuuuggcgccaagggugacgagggcacaaggggcuucaacggacccccuggccccaucggucuccagggccugccgggccccaguggcgagaaaggagagacaggagauguggguccaaugggaccaccuggaccaccagguccaagaggccccgccggcccgaauggcgccgacgguccgcaaggaccaccuggcggagugggaaaucuggggccaccuggcgaaaagggagagccaggggaauccggcagcccgggaauucagggcgaaccaggggucaaaggaccucggggagaacgcggggagaagggcgagagcggccagccuggggagccuggaccacccggacccaaaggccccacaggcgacgacggaccuaaggguaaccccgguccuguugguuucccuggagauccggggccacccggggaagguggaccucggggacaagauggugcgaaaggcgaucggggcgaagauggagagccuggccagcccggaaguccugguccgacgggcgaaaauggcccuccagggccucuggggaagagaggcccggccgguagccccggaucagagggccggcagggaggcaagggcgcuaagggugaccccggcgcuauaggcgccccaggcaaaaccggcccuguagggccugcuggcccagccggaaaaccugguccugauggucugaggggacugccugggucaguuggccagcaggggaggccuggggccaccggccaggcaggcccccccgggccaguggggccuccuggacuucccggauugcggggggacgcaggugcuaagggagagaaaggccaccccgggcuaauuggccugauuggcccgccuggggagcagggcgaaaagggcgauagggguuugcccgggccucaaggcuccccaggucagaaaggugaaaugggcaucccaggagcgaguggucccaucggacccgguggaccuccuggccugcccggcccagcagggccaaaaggcgcaaaaggagccacggggccuggcgggcccaaaggggagaaaggggugcaagggccuccgggccauccagggccacccggcgaagugauucagccccucccuauccaaaugcccaaaaagacucgcagaucuguagacggaucccgcuugaugcaggaagacgaggcuaucccuacaggcggugcuccggggucccccgggggauuagaggagauauuuggcucucucgacuccuugcgugaagagauugagcagaugcgccguccuacaggaacacaggacagcccagcccggacuugccaggaccugaagcugugccaccccgaauuaccggacggagaguauugggucgacccgaaccaagguugcgccagggaugccuuucggguguuuuguaauuuuacugcaggcggggaaaccugugugacccccagggaugacguuacucaauuuuccuaugucgacuccgaaggcucucccguugguguggugcagcugaccuuuuugagacugcuuuccgugagcgcacaucaggaugucucauacccuugcucaggagcagcucgcgacggcccccuacgguugcgcggcgcaaaugaagacgagcucagcccagaaaccuccccauaugucaaggaauucagagaugggugucagacccaacaggguagaacugugcucgagguccguacacccgugcuugagcagcugcccguccuagaugcauccuucucagaucuaggcgcuccaccccgcagaggagguguuuugcuugggccugugugcuuuaugggcuag

SEQ ID NO: 232660 - RNA, 5211 nt, Artificial Sequence
  derived and/or modified sequence
auggaaagaugcagccgcugucaccgccuucuacugcuucucccucucguccugggacuuagcgccgcaccuggcugggcuggagcaccgccugucgacgugcugcgagccuuaagauuuccgucccuccccgauggcgugcggcgcgcaaagggcauuugucccgccgacgucgcauaccggguugccaggccugcccaauuaucagcuccuacaaggcaacuguucccugggggguuucccaaagacuuuucguuauugacugugguuagaacuagacccggacugcaagccccucuacucacccucuacucagcccagggagugaggcagcuaggucuugagcucggacgaccagugagauuccucuacgaagaucagacgggaaggccacaaccccccucacaacccguguuccgcggcuugagucucgcagacgguaaguggcacaggguugccguugcagugaaaggacaauccgucacucuuauaguugacugcaaaaagcgagugaccaggccccuuccucggagcgcgcgacccgugcuggacacacacggcgugauuaucuucggcgcuagaauccuggacgaagaagucuuugagggugauguacaagagcucgcuauuguuccaggaguccaggcugcguacgagucaugcgagcaaaaagaauuagagugugaaggaggacaaagagagaggccucagaaccagcagccccaccgggcacagcgguccccccagcaacagccuaguagacuucacaggccccaaaaccaagagccacaaagccagccaaccgagucccuguauuacgacuaugagccuccuuacuaugaugucaugaccacgggcacaacacccgacuaccaagauccaaccccgggcgaagaggaggaaauacucgagagcucuuuauugccgccucuggaggaagagcagaccgaucuccaagugccccccaccgccgauagauuccaggcagaggaguauggcgagggugggacagauccaccugagggaccuuaugacuauaccuacggauacggcgacgacuacagagaagagaccgaauuagguccugcccugucagcugagaccgcacauucaggagccgcugcccacggccccaggggccugaaaggagagaagggcgaaccagcaguacuggaacccgggauguuaguggagggaccgccagggccggaaggacccgcuggacugauuggaccuccaggaauucaggguaacccuggcccggugggcgaucccggagagcggggucccccaggcagagccgguuugccaggcagcgauggcgcucccggucccccaggaaccucccuuauguuaccguuuagauucggcuccggcggaggcgauaaagguccggucgucgcagcucaagaggcacaggcucaggccaucuugcagcaggcaagauuggcauuacgcggaccuccagggcccaugggcuacacaggacgaccagguccucuagggcagccuggcucgccaggucuaaagggggaaaguggcgaucugggcccacaggguccucggggaccacagggacugacaggcccgccaggaaaggccggcaggagagguagggcaggugccgacggggcccgcggaaugcccggcgauccuggggugaagggcgauagaggguuugacggacugccaggccuuccuggugagaagggucacaggggcgacaccggcgcacaaggacugcccgggcccccaggggaagauggagaacgcggcgaugauggagagaucggaccacgaggguugccaggcgagucagggccacgugggcugcugggccccaaaggaccaccuggaauacccggcccaccuggagucagaggaauggauggaccacagggcccaaaaggaagccuugggccccaaggggagccugguccccccggccagcaaggcacccccggcacccagggccuucccggaccucagggagcaaucggaccucacggcgagaaaggcccucaggggaaaccaggacuaccagggaugccgggaagcgacggcccaccaggacaccccggcaaggaaggacccccaggcacaaagggcaaucagggaccaucagggccgcagggaccucuuggcuacccagguccccgugggguuaaggggguggacggcauucggggucugaaaggccacaaaggugagaaaggcgaggauggguuuccaggguuuaagggcgauauuggagugaagggagauagaggcgaggugggagugcccgguaguagaggggaggacggaccagagggacccaagggacggaccggaccaacgggagauccugggccacccggucugaugggugagaagggcaagcuggguguuccgggacucccuggcuaccccgggcgccaggggcccaaagggagucuuggauucccugguuuuccuggagcguccggugaaaaaggggcccguggacucucaggcaagaguggaccccgaggugagagaggaccuacaggcccaaggggacagcgcggaccacgaggggccaccggcaagaguggagccaaaggcacguccggaggcgacgguccccauggacccccgggagaaagaggucucccaggaccgcaggggccuaacggcuuucccggccccaaaggaccacccggaccuccuggcaaagaugggcuaccuggccauccuggucagcggggggaggucggauuucagggaaagaccggaccaccuggaccacccgggguugucggaccacagggcgcugcuggagagaccgguccuaugggagagagagggcaucccgggcccccaggucccccgggagaacaaggauuaccugggaccgcugggaaggaaggcacuaagggcgacccagggccaccaggagccccuggcaaggacgguccugcuggacugcgggguuuucccggggagcgaggguugccaggcaccgccggaggaccugguuugaaggggaacgagggacccucuggcccgcccgguccggcugguagcccgggcgagagaggcgcagcuggcuccggcggacccaucgggccaccugggcguccuggcccucaggguccaccaggagcugccggagaaaaagggguuccaggcgagaaaggaccaauuggucccacuggaagggauggggugcaaggcccaguuggauuacccgggcccgcagggccgccuggaguagccggggaagauggcgacaagggcgaggugggcgauccuggacagaaagggacgaaagggaacaaaggugagcauggaccccccggaccaccuggcccuaucggucccgugggacaaccgggggcugccggcgcagauggcgagccuggcgcuagagggccucagggacacuuuggcgcuaagggggacgaagguacacgaggcuucaauggcccccccgggccaaucgggcuccagggacucccagggccuagcggcgagaagggcgaaacuggggauguugguccuauggggccccccggccccccuggaccucgagggccugccggccccaacggcgcugacggaccccaaggaccacccgggggggugggaaauuugggaccacccggggagaagggagaaccaggagaauccggcagcccaggcauacaaggagaacccggagugaaaggaccaagaggcgagcgcggcgaaaagggugagucuggucaacccggugagccagguccacccggaccaaaagggccaacuggcgacgaugggccaaagggaaauccaggucccgucggauuucccggagacccuggaccuccaggugagggcgggcccagagggcaggacggugcuaaaggcgaucguggugaggacggggaaccaggacaaccugguucuccaggcccuacaggggagaaugggccacccggcccccucggaaaacgcggccccgccgggucccccgguagugaaggcaggcaaggcggaaagggcgcaaaaggggacccuggggcuauuggcgcacccggcaagacagggccuguagguccagccggaccugccgguaaaccaggaccagacggucuacgcggucugccugggucagucggacagcagggacggcccggagccacaggacaagccgggccacccggucccguuggcccucccggccucccagguuugaggggagacgcgggagcuaagggcgaaaagggucauccaggacuuaucggacugaucggcccacccggugaacaaggagaaaagggcgacagagguuugccuggcccccaaggcucaccgggccagaaaggagagaugggcauccccggggcaucgggucccauagguccagggggcccucccggucuacccgguccugcuggaccuaagggagcaaagggcgcgacuggacccggcggaccuaaaggggaaaagggaguacagggaccuccaggccaucccggaccaccuggcgaaguuauccagcccuugccaauccaaaugccaaagaagaccagaaggucuguugacggauccaggcugaugcaagaagacgaggcaaucccuaccgguggugcaccugguuccccaggcggacuggaagaaaucuucgguagucuugacagccuuagagaggaaaucgaacagaugaggcgcccaaccggaacacaggacucaccagcucgcaccugccaagaccucaaacuuugucaucccgaacugcccgacggggaauauugggucgaccccaaccaggguugugccagagacgcguuccgcguguucuguaacuucacagccggaggagagaccugcguuaccccuagagacgauguuacucaguucagcuacguagauucugaggguucccccguuggcguuguccaacugaccuuuuuacggcuccuuagcguaucugcucaucaagacgugagcuaucccugcuccggugccgcacgagauggcccccugagacuucgcggcgccaaugaagacgagcucaguccugaaacaaguccauaugugaaggaauucagggauggcugccagacccagcaggggaggacuguguuagaaguccguacuccgguucuggaacagcugcccgugcuugaugcaaguuucuccgaccugggcgccccccccagacgaggaggcgugcuacuuggcccugugugcuuuaugggauag

SEQ ID NO: 232661 - RNA, 5148 nt, Artificial Sequence
  derived and/or modified sequence
auggaacgcugcucuaggugccaucggcuccuuuuguugcuaccguuaguauuaggcuuaucugccgcuccugggugggccggagcaccucccguggacguccuucgugcccuccgguucccaucucucccagauggaguaagaagggccaaaggcauuugucccgccgacguggccuaccgaguagcgagaccagcccagcugagcgcuccaacccgccaacuguucccuggcgguuuuccaaaggacuucucauuguuaacugugguucgcacgcgcccaggucugcaagcccccuuacucacauuguacagcgcacaggguguccggcaacuuggucuggaguuaggacgucccguaagauuucuguaugaagaccaaacgggaagaccccagccuccaucucagcccgucuuucgcggacuuucucuggcagaugggaaguggcaccgagucgccguggcugugaaaggccagagugugacucucauagucgauugcaagaaaagaguuacacgcccacuaccucgaagcgcccggccuguccuggauacucacggugugaucauauuuggagcaaggauucuagacgaagagguguucgaaggggaugugcaagagcuggcaauaguucccgggguccaggccgcauaugaaucaugcgagcaaaaagaauuagagugugagggugggcagcgcgaacgaccccagaaucaacagccacaucgcgcccagcgauccccucagcaacagccuucccgacugcaucggccgcagaaccaggaaccucagucacagccaaccgagucacuauacuacgauuacgagccuccuuacuacgaugucaugacaacaggcacuacccccgauuaucaagaacaaacagauuugcaagugcccccaaccgccgacagauuucaggcagaggaauauggagaagggggcaccgacccgccugaagggccuuaugacuauaccuauggcuacggcgaugacuaccgagaggaaacagagcuugguccggcucugagugccgagaccgcucacaguggagccgcugcacacggaccccgugggcugaaaggugagaaaggagaaccugcuguccuugaaccugggaugcucguggaaggacccccuggucccgaaggccccgcaggccugauugguccucccggaauacaaggcaacccagggccagugggugauccaggugaaagagguccgccuggccgagcagggcuacccggcagcgauggugcaccuggcccaccuggcacaagccucaugcugccauuccgcuuuggcucagguggcggugauaaggggcccguuguggccgcacaagaggcacaggcucaggcuauccugcaacaagcacggcuggcguuaagaggcccuccaggcccaaugggauacacaggcagaccugguccgcuuggucagcccggcucucccggucuaaagggugaaucuggugaccuggggccacaaggcccccgcgggccgcaggggcucacugguccaccuggaaaagcgggcagaagagggcgcgccggcgcagauggagcacgcggaaugccaggagauccugggguuaaaggggacagaggguuugacggacuaccuggguugcccggagaaaaggggcauaggggcgacacaggcgcucagggccuuccaggaccaccuggcgaagacggagagcggggcgaugauggcgagaucgggccacgcggacugccuggugaaucagguccuagaggccuucucgggccaaaaggcccucccgggauuccugguccacccggcgucagggguauggaugguccacagggucccaagggaagccuuggcccucagggagaaccaggucccccgggucagcaggggacgccaggcacacagggacucccuggcccacaaggcgccaucgggccucacggagagaaaggaccacaaggaaaacccggccugcccgguaugccagggagugacggcccgccuggucaccccggcaaggaagguccaccagguaccaaaggaaaucaggguccaaguggcccucagggcccguuagguuauccaggcccuagaggcguuaaggguguugaugguauccgugggcugaagggccacaaaggcgaaaagggagaagauggguucccaggauuuaaaggcgacauuggcguuaaaggugaucggggggaaguaggagugcccggaucccggggagaggacggacccgaggggccgaaagguaggacaggaccaacaggcgaucccggcccaccuggcuugaugggagaaaaaggcaagcucggggugccaggucuaccagguuauccaggacgucagggccccaaagggagucugggauuuccuggcuuucccggugcaucuggugagaagggagccagaggucucagcggaaagagcggcccgagaggugaacgcggaccaacuggacccagaggccaacgcggaccaagaggcgcaacaggcaagagcggugcaaaagguaccucuggaggggacgggccgcauggcccuccuggagagcggggauugccugggccccaaggaccuaaugguuuucccgggcccaagggaccacccggacccccugguaaagacggacuaccuggccaucccggacaacggggugaaguugguuuucaggguaaaacaggcccgccaggaccacccggagucguugggccccaaggcgccgcuggugagacgggaccaaugggcgaaagaggacacccagggccucccgguccccccggggagcagggauugccuggaacggcuggaaaagaagguacgaagggggacccaggcccgccaggugccccagguaaggaugguccugccgggcugcggggcuucccaggcgaaagaggauuaccaggaacagcuggcggaccuggccuaaagggaaacgaaggacccucaggaccuccaggacccgccggaagcccaggggagcgcggggccgcuggcuccggcggccccauuggaccucccggaaggcccggaccccaagguccaccgggugccgcgggggagaagggugugcccggcgaaaagggccccaucggaccaacaggucgugacggcguucagggcccaguaggacucccaggaccagccggaccccccggaguugcuggugaagauggcgauaaaggagaagugggcgacccuggacagaaggggacaaagggcaacaaaggcgaacacggcccucccgggccaccagguccuaucgguccagucggacagccuggagcugcaggagcagacggagaaccaggcgccagggguccucagggccacuucggggcaaagggagacgagggaaccaggggcuuuaacggcccccccgguccaaucggguuacaaggguugccagggcccagcggagaaaagggugagacuggugauguuggaccgauggggccaccaggacccccaggccccagaggucccgccggaccaaacggugccgacggcccccagggaccucccggaggcguggggaaucugggcccacccggggagaagggagaaccaggugagagcggcagcccaggaauccagggagaaccaggcgugaaagggccccgcggugagcguggggagaaaggagaaagcggacaaccaggggaaccaggcccaccaggaccuaagggacccacaggugaugacgggcccaaaggcaacccuggaccggugggguucccgggcgacccgggaccaccgggcgaaggagguccuagaggacaagauggugccaagggugacaggggggaagacggcgagcccggucagccaggaucaccaggaccaacaggcgagaacggaccccccgggccccuuggaaaaagaggaccagccgggagcccagguagugagggaaggcagggcggaaagggagcaaagggcgacccaggggcaauuggggcaccagguaagacaggacccguagguccagcagggccggccggaaagccuggaccagacggacuucgcgggcugcccgguuccgugggacagcagggcaggccaggagccaccgggcaagcuggcccccccggcccugucggcccaccaggguugccaggccugaggggcgaugcgggcgcuaaaggggaaaagggacacccaggauugaucgggcugaucgguccgcccggcgaacaaggggaaaagggugacaggggacucccuggcccucagggcagcccuggccagaaaggagaaauggguauuccaggagcuucaggaccuauuggccccgggggccccccugguuugccagggcccgccggccccaaaggugcaaagggcgcuaccggacccggaggacccaaaggcgaaaagggagugcaggggccucccggccauccgggcccaccaggggaaguuauccagccucugccgauccagaugccuaagaaaacacgcagaagcgucgacggaucccgguugaugcaagaggaugaggccauaccaacaggcggagcaccaggcucaccaggcggacuugaagaaauauuuggcucccucgacucacugcgagaggaaaucgaacaaaugcgaagacccaccgguacacaggacuccccugcacggacuugucaggaccuaaagcuaugucauccugaacuuccagauggugaauauuggguggaccccaaccaggggugcgcacgagaugcuuuucgaguguucuguaacuucaccgcaggaggugaaacaugcguuacgcccagggaugaugugacacaauuuagcuauguggacagugaaggcuccccugugggggugguccaguuaacauuccugcgacuuuugucaguguccgcucaucaggaugugucauacccauguaguggugcggcucgggacggaccccuccgccuccguggugccaacgaggacgaauugucuccagaaaccagccccuauguaaaagaauuccgcgacggaugccagacucaacaaggacgcaccguucucgaggugagaacucccgucuuagaacaauuacccguucuggacgccucauucucagaccugggugccccaccaaggagaggaggcguguugcucggucccgugugcuuuaugggcuag

SEQ ID NO: 232662 - RNA, 5070 nt, Artificial Sequence
  derived and/or modified sequence
auggaaagaugcuccagaugucaucgccuguuacugcuacugccacuuguacucggacucagcgccgcucccgggugggcaggcgcucccccaguggauguucuuagagcccuaagguuucccucacugccagacggaguccgcagagcuaaggggaucugccccgccgauguggccuaucggguggcgaggcccgcacaguugagcgcuccaacacgucaauuguuuccagguggauucccaaaagauuuuucccuucuaacggugguccgcacgcgacccggacuccaagccccccuucugacuuuguacucagcccaagggguacgucaacugggacucgagcuggguagaccggucagauuucuguaugaagaccagacaggcaggccccagccuccaagucagcccgucuuucgcggucuuucucuugcagaugggaaauggcaccgcguggcuguggcugugaagggccaaucugugacacuuaucguugacuguaaaaagcgugucacuagaccauuaccacgauccgcccgacccguuuuggauacacauggagucauuaucuuuggcgcccgcauuuuagaugaggagguguuugaaggugacguccaggagcuggcaauugugccaggcgugcaggccgcuuaugagucgugugaacagaaagaacuggagugcgagggaggacagcgagagaggccacagaaucaacaaccacaucgagcucaacgauccccgcaacaacagccuagcagauugcaccgaccccaaaaucaggagccucaaucacaggaacaaacugaccugcaggugccgccaaccgcagacagauuucaggcagaggaguauggugaaggcggaaccgauccacccgaaggcccuuacgauuauaccuauggcuacggggaugauuauagggaggagacagaacucgggccggcucuaagcgcugagacagcacauucgggggcugcagcucaugggccgagaggauugaaaggugagaaaggcgaaccagcgguguuagagccggguaugcugguggaaggaccccccggucccgaaggcccagccggucugaucggaccacccgggauucagggcaacccuggaccugugggagacccaggcgaacgcggaccuccagggagagcaggacugccagguagugauggagccccugguccuccaggaaccucacuuaugcucccauuucguuuuggaucaggcggcggggacaagggaccaguuguggcagcccaggaggcccaggcacaggcaauacugcagcaggcaaggcuggcucucagaggcccacccggacccaugggguacacagggcgaccggggccauugggucagccaggcucaccgggucucaaaggugagagcggagaucucggcccccagggcccuaggggaccccaaggucucaccggcccucccggaaaagcaggacggcgcggacgagccggagccgauggagcacgcggaaugccgggcgauccgggggugaaaggagaucggggauuugacggguuaccaggauuaccuggugaaaagggucauaggggugauaccggcgcucagggccucccagguccaccaggugaggacggagagagaggugaugacggcgaaauugggccaaggggauugccaggggagucgggaccuagaggucugcuaggaccuaaaggcccaccagggauuccugguccgccgggggugagagggauggauggaccacagggacccaagggaucucuaggcccucagggugagccgggcccgcccggacagcaagggacacccgggacacagggguugcccggcccacagggagcuauagggccgcacggcgaaaaagggccccagggaaagccagguuuaccuggaaugccugguuccgacggaccaccuggccauccgggaaaggaaggcccccccgggaccaaaggaaaucaggggccuucaggaccucagggcccucugggcuauccaggaccccguggagugaaaggaguggacggaauucgcggacugaagggacacaagggugaaaaaggagaggacggcuucccuggauucaaaggcgauauaggcguuaaaggcgacaggggugaagugggagugccugguaguaggggggaggauggaccggaagggccgaaaggacgcacaggcccaacuggcgacccuggaccuccuggacucaugggcgaaaagggcaagcuuggcgugccaggccuccccggauacccgggcaggcaaggaccgaaggguagccucggcuuuccaggauucccgggagcaagcggagaaaaaggggcacggggccugaguggaaaaagcggcccccguggagaacguggccccacgggcccaagaggccagcgcggaccuagaggcgccacuggaaagucaggcgcuaagggcaccucugguggugacggaccgcauggaccacccggugagcgggggcugcccgguccacaggggcccaaugguuuuccagguccaaagggaccucccgggccucccggaaaggauggacucccgggccauccaggucaaaggggcgaggugggcuuucaaggcaaaacggggccuccagggccaccaggaguagucggaccccaaggagcagcaggagaaaccgggccaaugggagaacgcggucaucccgggccaccagggccucccggugagcagggucugccggggaccgcuggaaaggaaggcaccaagggagacccaggccccccaggcgcuccuggcaaagacggccccgccgggcuucgcggguucccuggcgagcgaggccuccccggaacagccggugggccgggacuuaaaggcaaugagggcccgagcggaccaccuggcccugccggauccccuggggagaggggagcagcagggaguggagguccaauuggcccgcccggccguccuggaccucaaggaccaccuggagcagcgggcgaaaagggaguaccuggcgagaaagguccgauaggacccaccggccgcgauggcguccaaggacccguuggccuuccuggcccugcagguccgccaggcguagcaggagaggacggugauaaaggagaaguaggagaccccggacagaaaggaacuaaggggaacaaaggcgaacaugguccgcccgguccaccagggcccauuggaccagucggccagccuggagccgcuggggcugauggggaacccggagcuagaggaccccaaggccauuucggagccaaaggcgacgaggggacacgggguuuuaacggcccgcccggcccuaucggcuugcaaggucugccaggaccaucuggagagaaaggagaaacaggcgaugucggacccaugggacccccuggcccaccugggccuagaggcccagcuggucccaacggugccgauggcccccaagggcccccaggcgggguaggcaaucugggcccaccuggggaaaagggugaaccaggagagagugggucucccggaauccaaggagaaccugggguaaaagggccucguggcgaacggggagagaagggggagagcggccaacccggcgagccagggcccccuggccccaagggaccgacaggugaugacggaccuaagggcaauccaggaccuguuggguuuccuggcgaccccggacccccaggagaggguggaccucgggggcaagauggugcaaagggcgacagaggggaggauggagaaccaggucagccggguucuccaggaccaaccggagaaaacggcccacccggcccauuaggcaaaagagguccugcaggcaguccgggaucagagggacgacagggggggaagggagccaagggagauccgggagcuaucggagccccggggaaaacuggaccggugggccccgcgggccccgcaggcaaaccagggccagauggccugcgcgggcugccugggucagugggccagcagggcagaccaggcgcuacagggcaagcgggaccuccaggaccagucgguccgccaggucugccaggacuaaggggcgaugccggagccaagggcgaaaaggggcaccccggacugauuggacugaucgggccaccaggggagcagggagagaagggagaucggggacuucccgguccacaggggucaccagggcaaaaaggugagaugggcauucccggugcaaguggaccuauaggaccugggggaccuccuggauugcccggcccugcgggacccaagggagccaagggugcaacaggaccugguggcccuaaaggugagaagggcguccagggcccacccggucacccaggaccgccaggcgaagucauccagccgcugccaauccagaugccgaaaaagacaaggagaaguguagauggcuccagguugaugcaggaagaugaagcaauaccuacaggaggagcuccugguucaccagggggacuggaggaaauuuucgggagucucgauucccuccgugaagagaucgagcagaugcgccggcccaccggcacacaagauagcccugcaaggaccugccaggaccuuaagcugugucaccccgagcuuccggauggcgaguacuggguugacccaaaucaaggaugugcacgugaugcuuuccggguuuucugcaauuuuaccgcuggcggagaaacguguguuacuccacgagaugacguuacgcaauucuccuacguugauucugaaggaaguccuguggggguggugcagcugacuuuuuugagacuauuguccguuagcgcccaucaggaugucagcuacccuuguuccggcgcugcacgggaugggccacuucggcuaagaggggcaaaugaggacgagcuaucuccugagaccucaccguacguuaaggaauuccgugauggaugucagacucaacaggggagaacaguucuugaggugaggacccccguuuuggagcaauuaccuguccuggacgccuccuucuccgaucuaggagcacccccacgccgaggcggaguucugcugggacccgucugcuuuaugggcuag

SEQ ID NO: 232663 - RNA, 5133 nt, Artificial Sequence
  derived and/or modified sequence
auggagcgguguagcaggugucaccgguugcuccuccuguugccguugguccucggcuugucugcugcacccggaugggccggugccccuccaguggacgugcuccgcgcccugcgguuucccagccuuccugauggcgucagaagagccaaggggauuugccccgcagacguggcuuaccgugucgcuagacccgcucaauuaucugcacccacccgacagcuguucccaggcggauucccaaaagauuuuucccuacucaccgucguuagaacccgaccaggacugcaggcaccucuccugacucuuuacuccgcucagggagugaggcaacucggucuggaacuggggcggcccguccgcuuucuguacgaggaucaaacaggcagaccgcagccccccucccagccggucuucagagggcuuucccuagcggacggcaaauggcaucguguugcugucgcgguuaaaggucaaagcguuacccucauuguggauugcaagaagcgcguuacacgcccuuuaccccggagcgcucgccccgugcucgauacucauggcguuauuauauucggcgcgcggauacuggacgaagaaguguuugaaggagaugugcaagaguuggcaauaguaccuggcgugcaggcugccuaugaaucaugugagcagaaagagcuugagugugaagguggccagcgugaaagaccucagaaucaacagccacaccgagcgcaaaggucaccacagcaacaaccuucacggcuucacagaccccagaaccaggaaccucagagucaagauccaacucccggagaggaagaagagauccucgagaguucgcuauuaccuccgcucgaggaggaacagacugacuugcaagugccccccaccgcagauagguuccaggcagaagaauacggugagggcggcacugacccccccgaagguccuuaugacuauacauacggcuacggagacgauuacagagaagagacagaguuaggcccggcgcuuagcgcagaaacagcucacucaggugcagcugcccaugggccccguggguugaaaggcgaaaaaggugaaccagcaguguuagaaccagguaugcugguggaagggccaccagguccagagggaccggccgggcugauuggaccuccuggcauucaaggcaacccaggacccgugggagacccuggagaaaggggcccuccggguagggcugggcuccccggcucugauggggcaccuggccccccagguacuucacucaugcugccauuucgguucggcucgggggggggugauaaaggacccguagucgcagcccaggaagcacaggcucaggcuauccugcagcaggcgcgcuuggcucuacguggaccacccggcccaauggguuauacaggccgcccagggccacuuggccagccaggcagcccuggacugaagggggagagcggcgaucugggcccccagggaccgcguggcccucaaggacuaaccgggccuccugggaaagcuggcaggagggggagagcaggugcagacggugcaagagguaugccuggggaccccggcguaaagggggacaggggauuugacggacucccaggacugccaggugagaaaggacauaggggugauacgggggcacaagguuugccuggaccaccaggugaagauggagagcggggggaugauggcgaaaucgguccuagaggacucccaggugagagcgguccgagaggcuuacucggaccuaagggcccaccuggcaucccuggcccucccggggugcgggguauggauggaccccaagguccaaaagggagucucgggccccaaggagaacccgguccgccgggccaacaggggacaccagggacccagggcuuaccaggcccucagggugccauaggaccucauggcgagaaaggaccgcagggaaagccuggcuuacccgguaugccgggcuccgacggaccucccggccaccccggaaaggagggcccaccagguaccaaaggcaaucagggacccuccggaccacaaggaccucuggguuaucccggaccacgcggaguuaaaggcgucgacggcauuaggggauugaaagggcauaaaggagagaaaggagaagacggguucccuggguucaagggcgauauaggugucaagggcgaucguggcgagguggggguucccggcucuagaggagaggacggaccagaaggcccuaaggggcggaccggaccaacuggagaccccggaccaccagggcugaugggagagaagggaaagcugggggugccuggccugccuggguacccuggcagacaggggccuaaggggagucucggcuucccaggcuuuccaggagcuagcggggagaaaggcgcacggggcuuauccggaaaaucugguccaaggggagaacguggcccuaccggacccaggggccagcgggggccccguggcgcaacaggcaaaucaggagccaaaggaacgagcggcggagacgggccacauggucccccaggagagcguggacuucccggaccacagggaccaaacggguucccugggccuaaagggcccccuggcccacccggaaaggaugguuugccaggccaucccggucaacggggugagguuggauuucagggaaaaacagggccucccggacccccgggaguggugggaccccagggggcagcaggagagacagguccaaugggcgaaagggggcacccugggccaccaggaccacccggggagcagggacugccaggaaccgccggcaaggaggggaccaagggggaccccggaccucccggugccccugguaaggacggacccgccggccugagaggcuucccuggugaacgugguuugccuggaaccgccggaggaccagggcucaaaggaaaugaaggcccaaguggaccaccuggaccggcagggucaccuggugagaggggggcagccggcaguggggggccuauuggaccccccggccguccaggaccucaggggccaccaggugccgccggcgagaagggcgugccuggcgagaagggaccaaucggaccaacgggaagggacggcguacagggaccagugggacuaccaggcccggccgguccgcccgggguggcaggcgaggauggagacaagggagagguaggggaccccggccagaaaggaaccaaagggaauaaaggugaacaugggccuccagguccuccugggcccauuggacccguuggccagccaggagccgccggagcugacggcgaaccaggagcacgcggaccacaaggacauuuuggcgcaaagggugacgaaggaacucggggauuuaauggccccccuggcccaauaggguugcagggccuuccaggcccuucaggagaaaaaggagaaaccggagacgugggaccgaugggccccccuggcccacccgggccacggggacccgccgggccaaauggugccgauggaccacaggggccacccgggggagucggcaauuuaggccccccuggagagaagggugagcccggagaaagcgggucccccgguauccagggggaaccaggcgugaaggguccuagaggugaaagaggcgagaagggcgaaaguggucagccaggagaaccagguccuccagggccaaagggcccaacaggcgacgacggucccaagggaaaccccggcccuguaggcuucccaggagaucccggaccgccuggagagggcggaccacguggacaggauggagcuaaaggcgaccgcggagaagauggcgaacccggccagcccggcucaccggggcccacuggcgaaaaugguccaccagguccuuugggcaagcgcggcccugccgggucuccaggcagcgaggggagacagggaggcaaaggagccaagggagacccgggcgcaauaggggcucccggaaagacaggcccaguggggcccgcaggaccggcaggcaaaccgggccccgacggacuccgcggacugccgggcagcgugggccaacaggguaggccuggcgcuacgggucaagccggaccuccuggcccuguggguccuccgggacugccaggacugagaggggacgccggagcaaagggggaaaaaggccaucccggauuaauuggucugaucggcccaccgggagagcagggagagaaaggagacagagggcuccccggcccacaggggucuccgggacagaagggugaaaugggcauccccggcgccucagguccaauagguccuggagggccuccaggguuaccaggaccagcaggcccaaaaggagcuaaaggcgcuacaggccccggagguccuaaaggugagaaggggguacaagguccaccgggucauccugggcccccaggugaggugauucagccgcugccgauucagaugccaaagaagacaagacguuccgucgacggaucaagacuaaugcaggaggacgaagcaauccccacgggcggggcaccagggagcccggguggccuggaggagauuuuuggaucacuggauuccuuacgagaggagauugagcagaugagacggcccacugggacacaggauagccccgcaaggaccugccaggaccugaaacugugucaucccgagcugccagacggggaauacuggguugauccaaaucaagggugugcucgagaugcguucagaguguuuugcaacuuuaccgcuggcggcgaaacuuguguaaccccuagagaugacguuacgcaguucagcuacguugacucugagggcaguccugucggaguuguccagcuaacuuuccugcgacuuuuaucagugucagcccaucaagacgugucauaucccuguaguggcgccgccagagacggaccacuucggcugcggggagccaaugaggacgaacugagccccgaaaccucgccuuacguuaaggaauuuagagauggcugucagacccagcagggcagaacaguacucgaagugcggacccccguacuggaacaguuacccguccuugaugcuucuuuuucugaucucggcgcuccaccaaggaggggagggguguugcuuggaccaguuuguuuuaugggcuag

SEQ ID NO: 232664 - RNA, 1875 nt, Artificial Sequence
  derived and/or modified sequence
auggagcgguguucucguugccauagauugcuucuccugcuaccucugguacuuggucuaucugccgcaccuggcugggcuggcgcaccacccguagaugugcugcgggcccuccgauucccaucccugccagauggugucaggcgcgcaaaaggcauaugcccugccgauguugcuuaccgagucgccaggcccgcccagcuuagcgcaccaacccgucagcuauuucccggaggcuuucccaaggauuuuagucugcucacaguaguuaggaccagacccggacugcaagccccacugcugacacucuauuccgcacaggggguuaggcaacugggccuagagcucgggcgcccagucagguucuuguaugaagaucagaccggcaggccucagccaccaucccaaccaguuuuccgcggguuaucccuggccgacggcaaguggcaccgcguugcagucgcugugaaaggccaguccgucacacucauuguagauuguaaaaaaagagugacccggccguuaccuagauccgcccgccccguacuugacacucacggaguuauuauuuucggugccaggauccucgacgaggaggucuucgagggggauguccaggagcuugcaauuguacccggaguccaggccgcuuaugagagcugugagcaaaaggaacuggagugcgaaggaggccagagggaaaggccacagaaucaacagccacaucgcgcccaacggaguccccagcagcagccaucccgacuucauaggccgcagaaccaagagccacagagccaaccaacagagucccuuuauuaugauuacaaaccgcccuacuaugaugugaugaccaccggcacuacccccgauuaccaggaccccaccccaggagaagaggaggagauucuugagaguucccugcugccgccgcuggaagaagagcagaccgacuuacagguuccaccaaccgcagaccgauuccaggcggaagaguauggcgagggcggcacagauccaccagagggccccuaugacuacaccuauggauauggggacgauuauagggaagagacagaacugggaccagcauuaucagcagaaaccgcacacuccggagcugcagcccauggaccccgcggccugaagggagagaagggcgaaccagcugugcuagaaccaggaaugcucgucgagggaccuccuggucccgaggggccugcgggcuugauaggacccccaggcauccaagguaauccagguccugugggugacccaggcgagcgcggaccaccaggcagggcaggccucccagggagcgacggcgcacccggaccccccggaaccucccugaugcugccauuucguuucggcucaggcggaggugauaaaggaccagugguggcugcucaggaagcucaggcucaggccauucuacagcaagcuaggcuggcacugcgaggacccccuggcccgaugggauacacaggcaggccaggcccacugggacaaccuggaagcccuggcuuaaaaggcgagagcggagaucuuggcccccaggggccacgcgguccacagggccuaacgggaccaccgggcaaggcaggaagacgggguagagcaggagcagauggggcccgggguaugccaggagacccuggggugaagggcgauaggggauuugauggguugccuggccugcccggcgagaaggggcaucgaggcgacacuggugcacaaggacugccaggacccccgggugaagacggggagagaggggacgacggagagaucgguccgagaggacucccuggcgaaagcggccccagaggucuguuaggcccaaaaggaccucccggaaucccaggaccccccuag

SEQ ID NO: 232665 - RNA, 1875 nt, Artificial Sequence
  derived and/or modified sequence
auggagcgguguucccgcugucaccgauugcugcucuuacucccccugguccuaggauuguccgcugcuccagggugggccggcgcuccuccuguugacguucuuagagcacugcguuucccuucacuuccggauggcgugagacgugcaaaagguaucugcccggcugacguugccuacaggguugcacgccccgcccagcugucugccccuacuaggcaacuguuucccggaggcuuuccgaaagauuucucacuccugaccguggugcgcacccgccccggcuugcaggcaccacugcucacucuguauagcgcccaaggagucagacagcuggguuuggagcugggacgacccguuagauuccucuacgaggaccaaacuggccgcccccagccaccuucucagccuguuuuccggggauugucucuggcugauggaaaguggcaucgugucgcuguggccgugaaaggacagagugucacacugauugucgauugcaagaaacgcguuacuaggccuuuaccuagaucagcacgaccuguacuggauacccauggcgugauaaucuuuggggcccggauccuggaugaggagguuuuugaaggugaugugcaggaauuagcaaucgucccuggugugcaggcugcauacgaguccugcgagcagaaagaauuagaaugugaggggggacaaagggagcgaccucagaaucagcaaccacaccgugcucagaggaguccacagcagcaaccgucccggcuccacaggccucagaaccaagagccccaaagccagccaaccgaaucuuuauauuacgacuacgaaccuccguacuacgacgucaugaccacaggcacuacuccugauuaccaggauccuacccccggagaggaagaggagauucucgagagcuccuuauuacccccguuagaggaagaacagacggaccuucaggugcccccuacugcugacagauuucaagcggaggaguacggugaaggugggacagacccgccagaagggccauacgauuauaccuacggcuacggagaugacuauagagaggagacagaacugggcccugcccuuagugcggagacagcccauaguggagccgcagcucacggcccucgcggacugaaaggcgaaaagggggagcccgcuguccuggaaccugguaugcugguagaaggacccccaggaccagaagguccagccgggcuuaucgggccacccggcauucagggcaauccaggaccugucggcgaccccggcgaacgcggccccccugguagagcuggccugccuggcagcgauggcgcucccggaccuccugguacaucacugaugcugcccuucagauuugguaguggcggcggcgauaaagguccuguugucgcagcccaagaggcucaggcccaggccauucugcagcaagcaagguuggccuugcgaggacccccuggaccaaugggcuauacuggacgcccagggccacucggacagcccgggaguccaggacugaaaggggaaucaggugacuugggaccacaggggcccagggguccucaaggacuaaccggaccccccggaaaagcaggcagacggggacgcgcgggggccgauggugcaaggggaaugcccggagaucccggcguuaagggggaucggggguucgacggguugccuggacugccaggggaaaagggucauaggggagauacaggugcccagggccuccccggcccgccaggcgaggauggcgagaggggagaugacggggagauuggaccaaggggucucccuggcgaaucuggaccucgaggacuacucggcccaaagggaccacccggaauuccuggccccccguag

SEQ ID NO: 232666 - RNA, 5133 nt, Artificial Sequence
  derived and/or modified sequence
auggaaagauguaguagaugucaccgacuucugcuguugcugccccuuguacuuggucugucagccgcucccggaugggcaggggccccgcccgucgacgugcuuagagcacugcgguuucccucccucccagauggcgugcgucgagccaaaggaauuuguccagcugauguggcauacaggguagcccgaccggcccagcuuucugccccaacucgucagcuguucccaggaggcuuuccaaaagauuucucucugcugacugucguaaggacuagaccuggucugcaagcuccccuccugacccuauacucugcucaaggcgugaggcagcuaggccuugaacucggcaggccugugagauuccuauacgaggaccaaaccggucggccucaaccucccagccaaccaguuuuuagagggcugagccuggccgacggcaaauggcauaggguggcaguugcgguuaaagggcaauccgucaccuugaucguugacugcaaaaaacgagucacuagacccuugccucggagugcgcgcccuguguuggacacccacggaguuauaaucuucggagcccgaauccuagacgaagagguauuugagggcgaugugcaagagcuagcaauugugccaggggugcaggcugccuaugagucaugcgaacagaaagaauuagagugcgagggaggccagagggagaggccucaaaaccaacagccucauagggcacagagaucaccgcagcaacaaccaucacgccugcaucggccacagaaccaggagccacagagccaagauccgacccccggcgaagaagaagagauccuggagucaagccuuuugccaccguuggaagaagaacagacagaccuucaagugccuccuacugccgaccgcuuucaggcugaggaguacggggaaggaggcacugaccccccagaaggaccauaugauuacacauacggauauggcgaugauuaucgcgaagaaacugaauuaggaccagcccuuagugccgaaacagcccacuccggcgcugcggcacauggaccucgaggauugaaaggagaaaagggcgagccagccgucuuggagccagguaugcuaguggaaggcccgcccgggccagaaggccccgccggauugaucggcccaccgggcauccaggggaaccccgggccugucggggacccaggugagaggggcccccccggcagagcaggacuucccggcagugacggcgccccagggccaccaggcaccucucucaugcucccuuuccgguucgguagcggaggcggcgacaaaggaccagugguggcagcacaggaagcacaggcucaagcgauccuacagcaggccagacuggcccugcgcggacccccagggcccaugggguacacuggacgccccggcccccugggccagccugguuccccaggccucaaaggagagucaggagaucugggaccacagggcccccggggcccucaaggacugacagggccaccaggcaaagccggccgucgaggacgcgcaggggcagacggcgccaggggcaugcccggcgaucccggaguaaagggcgacaggggguuugacggccugccaggccuuccuggggagaagggucacagaggcgauacaggcgcgcaagggcucccagguccccccggagaagacggugaaaggggcgacgacggagaaauugggccacggggacucccaggcgagucagggccacguggguugcuggggccaaaaggaccaccgggcauucccggucccccgggagugcgagggauggacgggccucaagggcccaaagguucucugggaccacaaggcgaaccaggaccccccggacagcaagguacacccgggacccagggucugcccggcccccagggcgcaauagguccgcacggggagaagggaccacagggaaagcccggcuuaccagguaugccagguuccgauggcccaccaggccacccagggaaggaaggccccccuggaacgaagggaaaucaagggccaucaggcccucaagguccacuaggcuauccuggcccaagaggugugaaaggcguagacgggaucagaggacugaaaggacauaagggcgagaagggcgaagauggguucccaggcuuuaagggcgacauuggugugaaaggugauaggggcgaggucgguguucccggcucucgaggcgaggacggacccgagggcccaaaaggccggacugguccaacaggugauccagggccccccgggcugaugggagagaaaggaaaauuaggugugccaggucuaccaggguaccccggccgucagggccccaagggaagccucggcuuccccggcuucccaggagcaucaggggaaaagggcgcuaggggucugagcggcaaaucuggaccaagaggugaacgagguccaacuggcccgaggggccagaggggucccaggggagcuaccggcaagagcggugcaaagggaacgagcggcggggauggaccucacgggccacccggcgaaagaggacugccuggaccccaggggccaaauggauuucccggcccuaaaggaccucccgguccucccggcaaggauggucugccagggcacccuggacaaagaggugagguuggcuuucaagggaaaaccggacccccuggcccuccaggaguggugggaccccagggcgccgcuggcgaaacaggccccaugggagaacgaggacaccccggaccacccggaccuccaggggaacagggucugcccggcacagcagguaaggaagguacuaaaggcgacccugggcccccuggggcaccaggaaaagauggaccagcagguuugcggggcuuuccuggugaaagaggcuugcccggaaccgccgggggcccagggcuuaaaggaaaugaagggccuucagguccuccugguccagccgguucuccaggggaaagaggagcagcugguuccggcggacccaucggcccgccaggaaggcccggcccacaaggaccucccggcgcugccggugaaaaagggguaccgggggaaaaaggaccuauagggccuacagggcgagacgggguacagggaccgguagggcucccaggaccugcaggcccuccuggcguggccggggaggauggugacaagggugaaguuggcgaccccggacagaaaggaacuaagggaaauaagggcgagcacgggcccccgggaccgccgggaccuauaggaccggugggucaaccuggagcggccggagcugauggagaaccuggagcacgcggaccucaaggucauuucggcgccaagggagaugagggaacacggggcuuuaacgggcccccaggacccauagggcuucaaggguuaccugggccaagcggagagaagggagagacaggcgacguuggucccauggggccacccggcccaccuggcccccgcgggcccgccggacccaauggugcagacggcccacagggaccacccggcggaguggguaaucucggaccucccggcgaaaaaggcgaaccgggugagucggggucgcccgguauacagggugaacccgggguaaaagguccacggggugagaggggggagaagggagagucaggucagccgggagaaccuggaccacccggaccuaaaggcccuaccggggacgauggaccaaaaggaaaucccggcccuguaggcuucccaggggaccccggcccucccggugaagggggaccgcgcggacaagauggcgcaaagggagacaggggggaagauggcgaaccuggacaaccaggcucuccagggccuacgggagagaacggcccuccagggcccuuggguaaacgcgguccugcagguaguccaggcagcgagggaaggcagggaggaaaaggagcaaaaggcgauccgggcgcgauuggcgcaccaggcaaaaccggaccagugggccccgcaggacccgcuggcaaaccuggaccagaugggcuuagaggguugcccggcagcgugggacaacaaggucgcccuggugcuacaggacaggcagggcccccuggcccaguuggcccuccuggucuccccgggcugaggggcgaugcaggggccaagggcgagaaggggcaccccggacugauaggcuugauuggaccuccaggugaacagggcgagaaaggggauagaggccugccugguccacagggcaguccuggucagaaaggugaaaugggcauacccggcgccagcgggcccaucggaccuggcggcccacccggccuccccggcccagccggaccuaagggagcuaagggcgcuacuggcccgggaggaccgaagggcgaaaagggcgugcagggaccacccggucauccuggaccaccaggggaagucauucagccccugccgauccagaugccaaagaagacucgacguagcguggaugggagucgauugaugcaggaggaugaagccauccccacaggcggcgccccuggaucuccuggcggacuagaagaaauuuucggcagccuggacucgcuacgagaagaaaucgaacagaugcggagaccaacagguacacaagacuccccagccaggacaugucaggauuugaaacucugucacccugaacucccagauggcgaauacuggguggacccuaaccagggcugugcuagagacgccuuucguguauuuuguaauuuuaccgcuggcggagagaccugcguuacuccucgggacgauguuacacaguuuagcuaugucgacuccgaaggaaguccagugggagucgugcaacugaccuuucuccgucuacucaguguauccgcacaucaagauguguccuauccaugcucaggcgcugcucgggacggaccauuaagacugcgaggugcgaacgaggaugaacugucgcccgaaaccucuccauacgugaaggaguuucgagauggaugucagacccagcagggcagaacaguccucgagguuagaacaccagucuuagaacaguugcccguacucgaugccuccuuuucugaccugggcgcgccuccgaggagggguggcgugcugcuugggccuguuuguuucaugggauag

SEQ ID NO: 232667 - RNA, 5211 nt, Artificial Sequence
  derived and/or modified sequence
auggaaagauguucuagaugccaccgacugcuguugcugcugccccucguccucgggcugucagccgcuccuggcugggccggggcgccucccguggauguccucagagcauuaagguucccuagucugcccgaugggguccgaagggccaagggcauuuguccagccgacguggccuauagaguggcacgaccagcacaguuguccgcaccaacacgacaguuauuccccggcggauucccuaaggauuucucauuacugaccgugguuaggacacgacccggauugcaggcuccucuauuaacucuguacagugcucaagguguucggcagcuuggccuagaacuggggcgacccguccguuuccucuaugaagaucaaaccggacgaccacagccuccuagccagccaguguuucgcggucuuucccuggccgauggaaaauggcaucgaguugcuguagcggucaaaggacagaguguaacuuugauagucgauuguaaaaagcgagugacacgaccccucccccguuccgccagaccuguauuagauacccacggggugaucauauucggagcaaggauacucgaugaggagguguucgaaggagauguacaagaauuggcaauaguccccggagugcaagcagcauaugaaagcugcgaacagaaggaauuagagugugagggcgggcagagagaaagaccccagaaccagcaaccucaccgugcucagagaagcccgcagcaacaaccuucccgccugcaccguccccaaaaccaggaaccccagucucaaccaaccgagucucuguacuacgacuauaagcccccuuauuacgacgucaugaccaccggaacaacucccgacuaucaggacccuacucccggugaggaggaagaaauccuugagaguucuuugcugccaccucuggaggaggaacagaccgaucuucaggucccccccaccgccgaucgguuucaggcagaggaguauggugagggaggcaccgaccccccugagggcccuuacgauuacaccuacggguauggagacgauuacagagaagaaacggaauuaggcccagcauugagugcagaaacagcccauucuggcgccgcggcacauggaccacgcgggcuaaagggagagaaaggcgaacccgccguucuugaacccggaaugcugguugaaggacccccuggcccugaggggccugcagggcuaaucgggccccccggaauucagggaaauccgggaccggugggcgauccgggagaaagaggaccaccuggcagagccggacugccgggauccgauggagccccuggcccucccgguacaucuuugaugcugccauuucgguucggaagcggcgggggagacaaggguccaguuguggcggcacaggaggcucaggcgcaggcaauauuacagcaggcacgcuuggcucuccgcggccccccaggcccuauggguuacacaggacggccuggcccacuaggacaaccuggaucccccggccugaaaggugagaguggugacuugggaccccaaggaccucguggcccacagggacuuaccgggccacccggcaaagcagguaggagggggagagcuggagcugauggagcacgcgggaugcccggcgaccccggcgugaaaggugacagaggauucgauggccuuccuggguugcccggcgagaaagggcacaggggagacacaggagcgcaaggauugccuggcccuccuggggaagacggagaaagaggggacgacggcgagauuggcccaagaggucugcccggggaaagcggaccaaggggacugcuuggucccaaagggcccccagggaucccggggccaccuggaguacgcggaauggauggcccucagggccccaaaggcuccuuaggaccucaaggcgaaccuggaccaccuggacaacaggguacccccggaacccagggacucccaggcccccaaggagcgauuggcccccacggagagaaagguccucagggcaaaccagggcugccuggcaugccaggaucagacggaccuccgggacacccuggcaaggaagguccacccgggacuaaagguaaucagggacccagcgguccacagggaccucugggguacccaggaccucgaggcguaaaaggcgucgacgguauuagaggcuugaaggggcacaagggcgaaaagggcgaggaugguuucccuggauuuaaaggugauauuggcguaaagggcgacagaggagagguaggagugccaggcucgcgcggggaggacggaccagaagguccaaagggaagaaccgggcccacaggagacccaggaccucccgggcuuaugggcgaaaagggcaaacuuggagucccaggauuaccagguuaccccggucggcagggaccaaaaggaucacucgguuuuccagguuuccccggcgcuucaggugagaaaggugcucgcggacugucugguaaaucaggcccacggggugaaaggggccccaccgggccacggggacagagagguccacgcggagcgacaggcaagagcggggcuaaggggacuagcggcggugacgggccucacggcccccccggcgagagaggccuccccggcccccaagggcccaauggguuuccagggccaaaaggucccccaggcccccccgguaaggacggccugccuggacauccuggccagcgaggugaagucggcuuccaaggcaagacggggccucccggaccacccggaguaguuggcccacagggggccgcuggugagacagggccaaugggagagagaggucacccuggacccccgggacccccaggagaacagggacugccgggcacugcgggaaaggagggcacuaaaggggacccggggccuccuggcgcaccuggaaaggauggaccugcgggucugcgggguuuucccggagagagaggacuaccaggaaccgccggcggcccugggcucaaggggaacgaaggaccgaguggccccccuggcccagcggguagucccggggagcguggcgcugcaggcucaggcggacccaucgggccucccggacgccccggaccgcagggaccacccggagcagccggggagaagggaguucccggcgagaaaggaccuauuggcccaacggguagagauggcgugcagggcccuguagggcugccaggaccggccggucccccuggcguggcuggcgaggacggcgacaaaggggagguaggcgaccccggucagaaagguacuaagggaaacaaaggagaacauggaccucccggacccccuggaccaauuggaccggucggucagccuggggcagcuggggccgacggcgagccaggcgcacgaggcccucaagggcauuuuggggcuaaaggugacgaaggaacuagaggauuuaauggccccccaggaccaaucggacuccagggccugccaggccccagcggagagaaaggugaaaccggcgaugugggaccuauggggccaccuggaccuccugggccgcggggccccgcgggaccgaauggcgcagauggaccacagggaccgccgggcggcguuggcaaucugggaccacccggugaaaaaggcgaaccuggagagagcggaucaccugguauccaaggcgagccaggagugaagggcccaagaggcgaacgcggagaaaaaggagaaagcggacagcccggggaaccaggaccuccaggaccaaagggccccaccggagacgaugguccaaagggcaauccagguccgguaggcuucccaggggauccugggccgccgggugaggguggaccgcgggggcaagacggcgcaaagggugauaggggagaggacggggagcccggccagccagggagcccuggaccgacaggcgaaaacggcccuccaggaccauuggggaagcgcggaccggccggaucgcccggaagcgaaggccgacaaggcggaaaaggagcaaaaggggaccccggagcuaucggagccccaggaaaaacuggccccguugggcccgccgggccggcuggaaagccgggaccugacggccuacgaggccugccagggagcguuggacagcaaggaagaccaggagcuaccgggcaagcaggaccaccagguccuguugggccaccuggccugcccggauuaagaggcgaugcuggugccaaaggggaaaaagggcauccaggacuaauuggacuuauuggacccccgggagagcagggggagaagggggacagagggcucccgggcccccaggguucaccugggcagaaaggagaaauggguauuccuggggcgagugggccuaucggucccggcggaccuccuggacugcccggaccugcggggccuaaaggagcaaaaggcgccaccggaccuggcggcccuaaaggcgaaaagggagugcagggcccaccugggcauccaggcccuccuggggagguuauccaaccuuuaccaauucaaaugccaaagaagaccagaagaucuguggaugggagcagauuaaugcaggaggaugaagcgauacccaccggcggcgccccuggaagccccggcggccucgaggaaauuuuugguucucucgacucacuuagggaagaaauugagcaaaugcggcgcccaacgggaacccaggacucucccgcgcgcaccugccaggaucugaaacugugccacccagagcugccagacggagaauauuggguagauccaaaccagggaugugcaagggaugccuucagagucuuuugcaacuucacugcagguggcgaaaccugugucaccccccgcgaugacgucacccaauuuucauacguagacucagaaggaagcccugugggugucguccagcuuacauuucuucgccugcucagugucucagcccaccaggauguuagcuaucccuguagcggagcugcucgcgacggcccauuaagacuccggggcgccaacgaggaugagcuuucaccagagacuagcccuuacgugaaagaauuuagagacggcugccaaacccaacaaggccgaaccguauuagagguuagaacacccguguuggaacaguuaccgguucuugacgcuucuuuuuccgaccuuggcgccccucccagacgcggagguguguuacuugguccagucugcuucaugggauag

SEQ ID NO: 232668 - RNA, 5070 nt, Artificial Sequence
  derived and/or modified sequence
auggagcggugcagucguugucaccgucugcuucugcuguuaccucugguacuuggacuuucugccgcucccgggugggcgggggcucccccgguggacguccugcgcgcauuaagauucccuucgcuaccagauggcguccguagagcuaaaggcauaugcccugcugauguugcauaucguguugcacgcccugcgcagcuuuccgcacccaccagacaacuuuucccaggagguuuccccaaggauuucagucugcucacagucguacgaacacggccuggacugcaagccccacugcucacuuuguacuccgcccagggcgugcgacaacugggauuagaguuaggccgcccagugcguuucuuguacgaagaccagacaggaagaccucaaccuccuucucagccagucuuccgcggccucaguuuagcagaugggaaauggcaccgggucgcugucgcggugaagggacaaucaguuacccugaucguugauuguaagaaaagagucacaagaccccuucccagaucugccaggccagugcuggacacgcauggcgugaucaucuucggagccaggauuuuggaugaggaagucuucgaaggagacguucaggaguuggcaaucgugccgggugugcaggcagccuaugaaucuugcgagcagaaggaacuggaaugugagggcggacagagagaacguccacagaaucagcagccucauagggcgcagagauccccacagcagcaaccgucacgucuacaccgcccccaaaaucaggagccccagucccaagaacagacagaucugcagguuccaccaaccgcugauagguuucaagcagaagaauauggagagggagggacagaccccccugaggggccuuaugacuauacauacggauacggugaugauuauagggaagagacggaguugggaccggcacucucugcagaaacugcucacaguggugcugcggcccauggaccucgcggacugaaaggggaaaaaggcgagcccgcugugcuagaaccugggaugcugguggagggcccacccggacccgagggaccugcuggccucaucggcccaccuggcauccaaggaaauccuggcccagucggcgauccgggagaacgcggaccuccaggaagagcuggccuaccaggcuccgacggugcaccuggaccaccuggaacgaguuuaauguuaccauucagauucgguucaggaggaggagauaaggggccagugguggcagcacaggaggcacaggcccaggcaauccuucagcaggccaggcuggcccuaaggggaccgccuggacccaugggcuauacaggcagaccugguccgcuggggcagcccggauccccagggcucaaaggugagaguggcgaccuagggccucaaggucccaggggcccccaaggauuaacugguccaccaggcaaggcugggcgacgaggaagggccggggcugacggugcaagagggaugccuggcgacccaggagugaaaggcgauagaggcuuugacggacugcccggccugccaggugagaaaggccaccgaggcgauacuggagcacagggacuuccugguccuccaggugaggauggagagagaggagaugacggugagaucggaccccgcggacucccaggagaauccggaccccgggggcuucugggcccuaagggacccccugggaucccggggccaccaggugugcgcgguauggacggaccccaggggccaaagggaagcuuaggaccucagggcgaaccagggccgcccggacagcaaggcacaccuggaacacagggauugcccggaccacagggcgcaaucggcccacauggagaaaaagggccgcaaggcaagcccgguuugcccggcaugccaggaucagacgguccucccgggcacccagguaaagaaggcccaccagguaccaagggaaaucagggucccucgggcccucaggguccccugggcuaccccggaccuagaggagugaagggaguggacgguauccgcggccucaaggggcacaaaggugagaaaggcgaggacggcuucccaggcuucaaaggugauaucgguguuaaaggggacagaggcgaaguugguguaccuggcagccggggugaggauggccccgaagguccuaaaggucggaccggcccgaccggugauccagguccgccuggacugaugggugaaaaaggaaagcuuggcguuccaggucucccuggguacccuggacggcagggcccuaagggaucauuaggcuuuccuggcuuuccuggggcuucaggggagaaaggggcuagaggacuaucuggaaagagcgggccucggggugagcgaggcccaaccggaccccgugggcagcguggcccacguggagcuacaggcaagucaggggcaaaaggaacuagcgggggcgauggcccacacggaccacccggugagcgcggucuuccaggcccccaaggucccaacggcuuuccagggccaaaggguccuccggguccuccagggaaagauggucuaccagggcacccaggccagcggggcgaaguugguuuucaaggcaaaaccggcccuccaggcccuccaggagugguuggaccacagggggcugcuggugaaacuggcccaaugggagagcgcggccacccaggccccccggggccccccggcgagcagggccugccaggaacugcagguaaggaaggcacaaaaggagaucccgggcccccaggcgcacccgggaaggacggccccgccggauuaagaggguuuccaggagagcgcggucucccugggaccgcuggcgggccaggccuuaaaggaaaugaaggaccaaguggacccccuggucccgcaggcagcccuggggagcguggugcggcgggcagcggaggaccaauugggccaccaggcagacccggaccacaaggaccuccgggggcggcgggcgaaaaggggguaccaggagagaagggaccaauugguccaacugguagagacggcguucaaggaccgguuggacugccuggcccagcaggaccacccgguguggcaggagaggacggcgauaagggugaagugggugauccaggacagaagggaacgaagggaaacaaaggcgagcacggcccaccuggcccgccgggcccaaucggaccugugggacagccuggggcugccggcgcugacggugaaccuggcgcuagaggaccccaagggcauuucggcgcuaagggggaugagggaacacggggauucaauggaccaccuggaccuaucggccuacagggccuucccggucccucaggagaaaagggagagacaggagauguuggcccaaugggaccacccgggccccccggaccuagaggucccgccggcccaaauggugccgauggaccccaggggccuccagggggagucgguaaucuuggcccuccgggugaaaagggagaaccuggcgagagcgguaguccggggauacagggugaaccaggcgugaagggcccuaggggcgaaaggggcgaaaagggcgaaaguggccagccaggagagccugggccuccuggcccaaaaggcccaacuggggacgacggacccaaaggaaaccccggaccagucggcuuccccggugacccaggaccaccaggugaaggaggaccucgcgggcaggauggugccaaaggggauaggggcgaagacggcgaaccuggccaacccggcucuccugggcccaccggcgaaaauggccccccaggaccucucggcaaaaggggaccugcuggaucgcccggcagcgagggacggcagggaggcaagggagcuaagggggacccuggagccauuggcgcgccuggaaaaacuggucccguaggcccugccggacccgccggaaagccaggccccgauggacugagaggauugcccgggucugucggacagcaaggaagacccggugcaacaggccaagccggucccccaggaccagugggcccaccaggacucccuggacugcgcggagacgcuggugcuaagggcgagaagggucacccaggguuaaucgggcucaucgggccaccuggagaacaaggggaaaaaggagaucgagggcugccaggaccacagggauccccaggccaaaagggugagauggguauuccaggcgcaucgggaccaaucggaccgggaggcccuccaggauuaccuggaccagccggcccuaaaggagcuaaaggcgccacggggccgggcgggcccaaaggcgagaaaggugugcagggcccacccggucauccaggacccccaggagaggugauacagccacucccaauccagaugcccaaaaagacucggcgauccguggauggcagucggcugaugcaggaggaugaggcuaucccuacaggcggcgccccuggaagcccgggcggacuagaggaaauauuuggaucccucgacucucuucgugaagaaauugaacagaugcgcaggcccacuggaacacaggacagcccagcccguacuugucaggaccucaaguugugucauccugagcugccugacggggaauauugggucgaccccaaccaagggugcgcccgugacgcguucagaguguucuguaacuucacugcaggaggggagaccugcgucacgcccagggacgacguuacccaauucuccuauguagacucagaaggguccccagucggaguuguucaacuaaccuuucuccggcuucuaucagugucagcucaucaggauguguccuacccuuguucaggagcagcaagagauggacccuuacgccugagaggcgcuaaugaggacgagcuauccccagaaacuagucccuaugugaaggaauuccgcgacggaugccagacacagcagggccgcaccgugcucgagguccgcacucccguccuagaacaguugccagugcucgaugccagcuucagcgaccucggggccccgccgcgcagagggggugugcuucuggguccuguguguuuuaugggguag

SEQ ID NO: 232669 - RNA, 5148 nt, Artificial Sequence
  derived and/or modified sequence
auggaacgauguucccgcugucaucgucuacuucugcuuuuaccucuuguauuagggcucuccgcugccccugggugggccggcgccccccccguggauguauugcgcgcccuucgcuucccgagcuuaccggauggagugcggagagcgaaagggaucugcccagcugauguggcuuauaggguugcuagaccugcacaacucagcgcaccaacccggcagcucuucccuggcggcuuuccuaaagacuucucccugcucacuguggucaggacucgucccgggcuccaggcuccccugcucacuuuauauucagcccagggugugagacaguuaggauuggagcucggcagacccguucgguuuuuguaugaggaucagaccggcaggccacaacccccaucccagccagucuuucgggguuugucccuggccgaugguaaauggcaccgcguugcuguggcagugaaaggacagaguguaacucuuaucgucgacuguaagaagcgugugacucggccgcuuccccgaucugcaaggccaguacuggacacgcauggcgugauaauuuuuggagcacggauucuggacgaagaagucuucgaaggcgacguccaagagcucgccaucgucccuggcguccaagccgccuaugaauccugcgagcagaaagaacuagaaugugagggcgggcaaagagagaggccgcaaaaucagcaaccacaucgcgcccagaggucaccucagcaacagccaucucgccugcaucggccccagaaccaggagccucaaagccaaccaacugagucccuuuauuacgacuauaagccucccuauuaugacgugaugacaaccgguaccacacccgauuaccaggagcaaaccgaucuccaaguuccgccuaccgcagauagauuucaagccgaagaguauggugagggagguacugacccuccugaaggaccuuacgauuacacuuacgguuacggugaugacuaucgcgaagagacagaguugggcccugcacucucugcagaaacggcacauucuggggccgccgcucauggacccagggggcugaagggggagaagggagaaccugcugugcuagagccuggcaugcuaguugaaggaccuccugguccugaggggccggcaggauugauuggcccucccggcauccaaggaaacccuggcccgguuggagauccaggcgaacggggaccuccaggucgagcagguuuaccagguuccgauggcgccccagguccccccggcaccagucuaauguuaccguucagauucggcagcggcgguggagacaagggccccgucguggcggcacaggaagcucaggcacaggcaauccuccagcaggcaagacuugcucugagggggccgcccggaccaaugggauauacaggacggccaggaccccugggccagccgggcagccccggccugaaaggggaaucaggagaucugggcccccagggaccaaggggaccccaagggcugacaggaccaccuggaaaggcuggacggagagguagggccggagcugauggagcaagaggcaugccgggagaccccgguguuaaaggggaucgcggauucgacggacugccuggcuuaccaggagagaaaggacaucgcggagauacaggugcccagggacugcccggcccuccgggcgaggacggagagaggggggacgacggugagauaggaccacgugguuugccaggcgaaucaggcccacgcggcuugcuugguccuaaggggcccccugguauacccggcccgcccggcguuagaggaauggauggaccucaaggcccuaaggggucucugggaccacagggcgagccuggcccaccuggucagcaaggcacuccuggaacacaaggcuuaccuggcccccaaggagcuauuggaccucacggcgaaaaagggccacaaggaaagccgggucugcccggaaugccuggcagcgauggaccaccuggccauccugggaaggagggcccgccuggaacaaaggggaaucaaggaccauccggcccccagggaccucugggauauccuggcccccggggcguaaaagguguggacgguaucagaggacugaaggggcacaaaggagaaaagggagaagacggcuucccuggauuuaagggcgacauuggcguaaaaggcgaucgcggcgaagugggagugccuggcagucgcggcgaagacggccccgagggucccaaaggccgcacaggacccaccggagaccccggaccaccaggcuugaugggagagaagggaaagcucggaguuccgggccuuccuggauaccccggccggcagggucccaaggguucgcuuggcuuuccaggguucccaggcgcaaguggcgagaagggcgcaaggggucugagcggaaagagugguccacggggcgaaagaggcccuacaggcccuaggggacagagaggcccacgcggggccacugggaagaguggggcaaaaggcacgucuggcggcgauggaccacacggcccacccggggaacgggggcuuccggguccucaaggucccaauggcuuccccgguccaaaagguccuccaggcccgcccggcaaagacggccugccgggccacccaggacagagaggugaggugggauuucagggaaagaccggcccuccagggccaccuggugucguaggaccucaaggggcagcaggcgagaccggccccaugggugagcggggccacccaggcccccccgggcccccgggcgaacagggccuaccaggcaccgcugguaaagaggggaccaaaggggaccccggaccuccaggagcgccagguaaagacggacccgccggacugaggggcuucccaggggagaggggccuaccaggaacagcaggagggccugggcuuaaggguaacgagggccccuccggaccuccaggaccggccggcaguccuggugaacgaggggccgcagggucuggaggaccuaucggacccccaggcaggccaggaccacaagguccccccggggccgcuggagagaaaggaguccccggcgagaagggacccauugggcccacggggagggacggcgugcagggacccgugggccugcccgggccugccggaccaccuggaguagcaggagaggacggagacaagggggaaguaggcgaccccggacagaaaggaaccaaaggcaacaaaggagaacacggccccccaggaccaccuggccccauaggaccagucggacaaccuggcgccgccggggccgauggggaaccaggagccagaggaccucagggacacuuuggagcuaaaggcgaugaaggaacaagaggauuuaacgggccucccggcccaauuggccugcaaggucugccaggaccuaguggcgaaaaaggcgagacgggagacguuggcccgaugggaccuccgggccccccuggcccacgaggaccugccggcccuaauggagcugacggcccccagggccccccuggcggcgugggaaaccucggcccacccggagaaaaaggggaaccuggggaguccggauccccuggaauacagggcgaaccggguguaaaaggccccagaggagagcgcggcgaaaagggagaaucuggccagccaggugagccuggaccacccgggccuaaggggccaacuggcgacgauggaccaaaaggcaauccuggaccggucggguucccaggagacccuggaccucccggggaagguggcccacgaggucaggacggagcaaagggcgauagaggcgaagacggggaaccagggcaacccggcucaccuggcccuacuggcgaaaaugguccaccaggcccacuggggaagcgcggcccugcaggcucccccggcucggaaggccgacaaggagggaaaggggcaaaaggcgaccccggcgccaucggggccccuggaaaaacuggccccguaggucccgccggcccugccgggaagcccggaccagauggacugcggggucucccggggagcgugggccaacagggucgacccggcgccaccggacaagccggaccaccaggcccagucgguccuccaggacuccccggacuacguggagaugccggcgcaaagggagaaaagggucacccggggcugauuggacuaaucggaccucccggcgagcagggcgaaaaaggagauagaggguuaccagggccccaggguucacccggccagaagggagaaauggggauaccuggagcuucaggucccaucgggccugggggaccuccaggacugcccggcccggccggaccuaaaggcgcaaagggggcaacagggccaggcggcccaaagggagagaaaggugugcagggccccccaggacauccuggcccacccggagagguuauccagccacugccaauucagaugccuaagaaaacuagacgguccguggauggaucucggcuuaugcaggaagaugaagcuauucccaccggcggcgcccccggaucaccgggcggccuggaggagauuuuuggaagucuggauagccuaagggaggagaucgaacaaaugagaaggccaacaggaacacaggacagcccagcccgaaccugccaagauuugaaacugugccaccccgaguugcccgauggagaguacuggguggacccaaaucagggcugcgcccgcgaugccuuuagaguguucugcaauuucacugccggcggcgagacuugugugacucccagagacgaugugacccaguucucuuauguagauagcgagggauccccugugggcguggugcaacucaccuucuuacgccugcugucuguaagugcccaccaggacgugucguacccuugcucaggcgcagcacgcgaugguccccuuagacuccgaggagcuaacgaagacgaguuauccccagagacauccccauaugugaaggaguuucgugauggaugccagacccaacaagggcgaacuguguuggagguuaggacaccuguacuagaacaacuaccgguacuggacgcuaguuuuagugauuuaggagccccuccucgaagggguggcguacugcuggguccgguuugcuucaugggcuag

SEQ ID NO: 232670 - protein, 1650 aa, Artificial Sequence
  derived and/or modified sequence
MERCSRCHRLLLLLPLVLGLSAAPGWAGAPPVDVLRALRFPSLPDGVRRAKGICPADVAYRVARPAQLSAPTRQLFPGGFPKDFSLLTVVRTRPGLQAPLLTLYSAQGVRQLGLELGRPVRFLYEDQTGRPQPPSQPVFRGLSLADGKWHRVAVAVKGQSVTLIVDCKKRVTRPLPRSARPVLDTHGVIIFGARILDEEVFEGDVQELAIVPGVQAAYESCEQKELECEGGQRERPQNQQPHRAQRSPQQQPSRLHRPQNQEPQSQDPTPGEEEEILESSLLPPLEEAAHGPRGLKGEKGEPAVLEPGMLVEGPPGPEGPAGLIGPPGIQGNPGPVGDPGERGPPGRAGLPGSDGAPGPPGTSLMLPFRFGSGGGDKGPVVAAQEAQAQAILQQARLALRGPPGPMGYTGRPGPLGQPGSPGLKGESGDLGPQGPRGPQGLTGPPGKAGRRGRAGADGARGMPGDPGVKGDRGFDGLPGLPGEKGHRGDTGAQGLPGPPGEDGERGDDGEIGPRGLPGESGPRGLLGPKGPPGIPGPPGVRGMDGPQGPKGSLGPQGEPGPPGQQGTPGTQGLPGPQGAIGPHGEKGPQGKPGLPGMPGSDGPPGHPGKEGPPGTKGNQGPSGPQGPLGYPGPRGVKGVDGIRGLKGHKGEKGEDGFPGFKGDIGVKGDRGEVGVPGSRGEDGPEGPKGRTGPTGDPGPPGLMGEKGKLGVPGLPGYPGRQGPKGSLGFPGFPGASGEKGARGLSGKSGPRGERGPTGPRGQRGPRGATGKSGAKGTSGGDGPHGPPGERGLPGPQGPNGFPGPKGPPGPPGKDGLPGHPGQRGEVGFQGKTGPPGPPGVVGPQGAAGETGPMGERGHPGPPGPPGEQGLPGTAGKEGTKGDPGPPGAPGKDGPAGLRGFPGERGLPGTAGGPGLKGNEGPSGPPGPAGSPGERGAAGSGGPIGPPGRPGPQGPPGAAGEKGVPGEKGPIGPTGRDGVQGPVGLPGPAGPPGVAGEDGDKGEVGDPGQKGTKGNKGEHGPPGPPGPIGPVGQPGAAGADGEPGARGPQGHFGAKGDEGTRGFNGPPGPIGLQGLPGPSGEKGETGDVGPMGPPGPPGPRGPAGPNGADGPQGPPGGVGNLGPPGEKGEPGESGSPGIQGEPGVKGPRGERGEKGESGQPGEPGPPGPKGPTGDDGPKGNPGPVGFPGDPGPPGEGGPRGQDGAKGDRGEDGEPGQPGSPGPTGENGPPGPLGKRGPAGSPGSEGRQGGKGAKGDPGAIGAPGKTGPVGPAGPAGKPGPDGLRGLPGSVGQQGRPGATGQAGPPGPVGPPGLPGLRGDAGAKGEKGHPGLIGLIGPPGEQGEKGDRGLPGPQGSPGQKGEMGIPGASGPIGPGGPPGLPGPAGPKGAKGATGPGGPKGEKGVQGPPGHPGPPGEVIQPLPIQMPKKTRRSVDGSRLMQEDEAIPTGGAPGSPGGLEEIFGSLDSLREEIEQMRRPTGTQDSPARTCQDLKLCHPELPDGEYWVDPNQGCARDAFRVFCNFTAGGETCVTPRDDVTQFSYVDSEGSPVGVVQLTFLRLLSVSAHQDVSYPCSGAARDGPLRLRGANEDELSPETSPYVKEFRDGCQTQQGRTVLEVRTPVLEQLPVLDASFSDLGAPPRRGGVLLGPVCFMG

SEQ ID NO: 232671 - protein, 1650 aa, Artificial Sequence
  derived and/or modified sequence
MERCSRCHRLLLLLPLVLGLSAAPGWAGAPPVDVLRALRFPSLPDGVRRAKGICPADVAYRVARPAQLSAPTRQLFPGGFPKDFSLLTVVRTRPGLQAPLLTLYSAQGVRQLGLELGRPVRFLYEDQTGRPQPPSQPVFRGLSLADGKWHRVAVAVKGQSVTLIVDCKKRVTRPLPRSARPVLDTHGVIIFGARILDEEVFEGDVQELAIVPGVQAAYESCEQKELECEGGQRERPQNQQPHRAQRSPQQQPSRLHRPQNQEPQSQDPTPGEEEEILESSLLPPLEEAAHGPRGLKGEKGEPAVLEPGMLVEGPPGPEGPAGLIGPPGIQGNPGPVGDPGERGPPGRAGLPGSDGAPGPPGTSLMLPFRFGSGGGDKGPVVAAQEAQAQAILQQARLALRGPPGPMGYTGRPGPLGQPGSPGLKGESGDLGPQGPRGPQGLTGPPGKAGRRGRAGADGARGMPGDPGVKGDRGFDGLPGLPGEKGHRGDTGAQGLPGPPGEDGERGDDGEIGPRGLPGESGPRGLLGPKGPPGIPGPPGVRGMDGPQGPKGSLGPQGEPGPPGQQGTPGTQGLPGPQGAIGPHGEKGPQGKPGLPGMPGSDGPPGHPGKEGPPGTKGNQGPSGPQGPLGYPGPRGVKGVDGIRGLKGHKGEKGEDGFPGFKGDIGVKGDRGEVGVPGSRGEDGPEGPKGRTGPTGDPGPPGLMGEKGKLGVPGLPGYPGRQGPKGSLGFPGFPGASGEKGARGLSGKSGPRGERGPTGPRGQRGPRGATGKSGAKGTSGGDGPHGPPGERGLPGPQGPNGFPGPKGPLGPPGKDGLPGHPGQRGEVGFQGKTGPPGPPGVVGPQGAAGETGPMGERGHPGPPGPPGEQGLPGTAGKEGTKGDPGPPGAPGKDGPAGLRGFPGERGLPGTAGGPGLKGNEGPSGPPGPAGSPGERGAAGSGGPIGPPGRPGPQGPPGAAGEKGVPGEKGPIGPTGRDGVQGPVGLPGPAGPPGVAGEDGDKGEVGDPGQKGTKGNKGEHGPPGPPGPIGPVGQPGAAGADGEPGARGPQGHFGAKGDEGTRGFNGPPGPIGLQGLPGPSGEKGETGDVGPMGPPGPPGPRGPAGPNGADGPQGPPGGVGNLGPPGEKGEPGESGSPGIQGEPGVKGPRGERGEKGESGQPGEPGPPGPKGPTGDDGPKGNPGPVGFPGDPGPPGEGGPRGQDGAKGDRGEDGEPGQPGSPGPTGENGPPGPLGKRGPAGSPGSEGRQGGKGAKGDPGAIGAPGKTGPVGPAGPAGKPGPDGLRGLPGSVGQQGRPGATGQAGPPGPVGPPGLPGLRGDAGAKGEKGHPGLIGLIGPPGEQGEKGDRGLPGPQGSPGQKGEMGIPGASGPIGPGGPPGLPGPAGPKGAKGATGPGGPKGEKGVQGPPGHPGPPGEVIQPLPIQMPKKTRRSVDGSRLMQEDEAIPTGGAPGSPGGLEEIFGSLDSLREEIEQMRRPTGTQDSPARTCQDLKLCHPELPDGEYWVDPNQGCARDAFRVFCNFTAGGETCVTPRDDVTQFSYVDSEGSPVGVVQLTFLRLLSVSAHQDVSYPCSGAARDGPLRLRGANEDELSPETSPYVKEFRDGCQTQQGRTVLEVRTPVLEQLPVLDASFSDLGAPPRRGGVLLGPVCFMG

SEQ ID NO: 232672 - protein, 1650 aa, Artificial Sequence
  derived and/or modified sequence
MERCSRCHRLLLLLPLVLGLSAAPGWAGAPPVDVLRALRFPSLPDGVRRAKGICPADVAYRVARPAQLSAPTRQLFPGGFPKDFSLLTVVRTRPGLQAPLLTLYSAQGVRQLGLELGPPVRFLYEDQTGRPQPPSQPVFRGLSLADGKWHRVAVAVKGQSVTLIVDCKKRVTRPLPRSARPVLDTHGVIIFGARILDEEVFEGDVQELAIVPGVQAAYESCEQKELECEGGQRERPQNQQPHRAQRSPQQQPSRLHRPQNQEPQSQDPTPGEEEEILESSLLPPLEEAAHGPRGLKGEKGEPAVLEPGMLVEGPPGPEGPAGLIGPPGIQGNPGPVGDPGERGPPGRAGLPGSDGAPGPPGTSLMLPFRFGSGGGDKGPVVAAQEAQAQAILQQARLALRGPPGPMGYTGRPGPLGQPGSPGLKGESGDLGPQGPRGPQGLTGPPGKAGRRGRAGADGARGMPGDPGVKGDRGFDGLPGLPGEKGHRGDTGAQGLPGPPGEDGERGDDGEIGPRGLPGESGPRGLLGPKGPPGIPGPPGVRGMDGPQGPKGSLGPQGEPGPPGQQGTPGTQGLPGPQGAIGPHGEKGPQGKPGLPGMPGSDGPPGHPGKEGPPGTKGNQGPSGPQGPLGYPGPRGVKGVDGIRGLKGHKGEKGEDGFPGFKGDIGVKGDRGEVGVPGSRGEDGPEGPKGRTGPTGDPGPPGLMGEKGKLGVPGLPGYPGRQGPKGSLGFPGFPGASGEKGARGLSGKSGPRGERGPTGPRGQRGPRGATGKSGAKGTSGGDGPHGPPGERGLPGPQGPNGFPGPKGPPGPPGKDGLPGHPGQRGEVGFQGKTGPPGPPGVVGPQGAAGETGPMGERGHPGPPGPPGEQGLPGTAGKEGTKGDPGPPGAPGKDGPAGLRGFPGERGLPGTAGGPGLKGNEGPSGPPGPAGSPGERGAAGSGGPIGPPGRPGPQGPPGAAGEKGVPGEKGPIGPTGRDGVQGPVGLPGPAGPPGVAGEDGDKGEVGDPGQKGTKGNKGEHGPPGPPGPIGPVGQPGAAGADGEPGARGPQGHFGAKGDEGTRGFNGPPGPIGLQGLPGPSGEKGETGDVGPMGPPGPPGPRGPAGPNGADGPQGPPGGVGNLGPPGEKGEPGESGSPGIQGEPGVKGPRGERGEKGESGQPGEPGPPGPKGPTGDDGPKGNPGPVGFPGDPGPPGEGGPRGQDGAKGDRGEDGEPGQPGSPGPTGENGPPGPLGKRGPAGSPGSEGRQGGKGAKGDPGAIGAPGKTGPVGPAGPAGKPGPDGLRGLPGSVGQQGRPGATGQAGPPGPVGPPGLPGLRGDAGAKGEKGHPGLIGLIGPPGEQGEKGDRGLPGPQGSPGQKGEMGIPGASGPIGPGGPPGLPGPAGPKGAKGATGPGGPKGEKGVQGPPGHPGPPGEVIQPLPIQMPKKTRRSVDGSRLMQEDEAIPTGGAPGSPGGLEEIFGSLDSLREEIEQMRRPTGTQDSPARTCQDLKLCHPELPDGEYWVDPNQGCARDAFRVFCNFTAGGETCVTPRDDVTQFSYVDSEGSPVGVVQLTFLRLLSVSAHQDVSYPCSGAARDGPLRLRGANEDELSPETSPYVKEFRDGCQTQQGRTVLEVRTPVLEQLPVLDASFSDLGAPPRRGGVLLGPVCFMG

SEQ ID NO: 232673 - protein, 1623 aa, Artificial Sequence
  derived and/or modified sequence
  misc_feature (1)..(1): Xaa can be any naturally occurring amino acid
XAPPVDVLRALRFPSLPDGVRRAKGICPADVAYRVARPAQLSAPTRQLFPGGFPKDFSLLTVVRTRPGLQAPLLTLYSAQGVRQLGLELGRPVRFLYEDQTGRPQPPSQPVFRGLSLADGKWHRVAVAVKGQSVTLIVDCKKRVTRPLPRSARPVLDTHGVIIFGARILDEEVFEGDVQELAIVPGVQAAYESCEQKELECEGGQRERPQNQQPHRAQRSPQQQPSRLHRPQNQEPQSQDPTPGEEEEILESSLLPPLEEAAHGPRGLKGEKGEPAVLEPGMLVEGPPGPEGPAGLIGPPGIQGNPGPVGDPGERGPPGRAGLPGSDGAPGPPGTSLMLPFRFGSGGGDKGPVVAAQEAQAQAILQQARLALRGPPGPMGYTGRPGPLGQPGSPGLKGESGDLGPQGPRGPQGLTGPPGKAGRRGRAGADGARGMPGDPGVKGDRGFDGLPGLPGEKGHRGDTGAQGLPGPPGEDGERGDDGEIGPRGLPGESGPRGLLGPKGPPGIPGPPGVRGMDGPQGPKGSLGPQGEPGPPGQQGTPGTQGLPGPQGAIGPHGEKGPQGKPGLPGMPGSDGPPGHPGKEGPPGTKGNQGPSGPQGPLGYPGPRGVKGVDGIRGLKGHKGEKGEDGFPGFKGDIGVKGDRGEVGVPGSRGEDGPEGPKGRTGPTGDPGPPGLMGEKGKLGVPGLPGYPGRQGPKGSLGFPGFPGASGEKGARGLSGKSGPRGERGPTGPRGQRGPRGATGKSGAKGTSGGDGPHGPPGERGLPGPQGPNGFPGPKGPPGPPGKDGLPGHPGQRGEVGFQGKTGPPGPPGVVGPQGAAGETGPMGERGHPGPPGPPGEQGLPGTAGKEGTKGDPGPPGAPGKDGPAGLRGFPGERGLPGTAGGPGLKGNEGPSGPPGPAGSPGERGAAGSGGPIGPPGRPGPQGPPGAAGEKGVPGEKGPIGPTGRDGVQGPVGLPGPAGPPGVAGEDGDKGEVGDPGQKGTKGNKGEHGPPGPPGPIGPVGQPGAAGADGEPGARGPQGHFGAKGDEGTRGFNGPPGPIGLQGLPGPSGEKGETGDVGPMGPPGPPGPRGPAGPNGADGPQGPPGGVGNLGPPGEKGEPGESGSPGIQGEPGVKGPRGERGEKGESGQPGEPGPPGPKGPTGDDGPKGNPGPVGFPGDPGPPGEGGPRGQDGAKGDRGEDGEPGQPGSPGPTGENGPPGPLGKRGPAGSPGSEGRQGGKGAKGDPGAIGAPGKTGPVGPAGPAGKPGPDGLRGLPGSVGQQGRPGATGQAGPPGPVGPPGLPGLRGDAGAKGEKGHPGLIGLIGPPGEQGEKGDRGLPGPQGSPGQKGEMGIPGASGPIGPGGPPGLPGPAGPKGAKGATGPGGPKGEKGVQGPPGHPGPPGEVIQPLPIQMPKKTRRSVDGSRLMQEDEAIPTGGAPGSPGGLEEIFGSLDSLREEIEQMRRPTGTQDSPARTCQDLKLCHPELPDGEYWVDPNQGCARDAFRVFCNFTAGGETCVTPRDDVTQFSYVDSEGSPVGVVQLTFLRLLSVSAHQDVSYPCSGAARDGPLRLRGANEDELSPETSPYVKEFRDGCQTQQGRTVLEVRTPVLEQLPVLDASFSDLGAPPRRGGVLLGPVCFMG

SEQ ID NO: 232674 - DNA, 4953 bp, Artificial Sequence
  derived and/or modified sequence
atggagagatgcagcagatgccacagactgctgctgctgctgcccctggtgctgggcctgagcgccgcccccggctgggccggcgccccccccgtggacgtgctgagagccctgagattccccagcctgcccgacggcgtgagaagagccaagggcatctgccccgccgacgtggcctacagagtggccagacccgcccagctgagcgcccccaccagacagctgttccccggcggcttccccaaggacttcagcctgctgaccgtggtgagaaccagacccggcctgcaggcccccctgctgaccctgtacagcgcccagggcgtgagacagctgggcctggagctgggcagacccgtgagattcctgtacgaggaccagaccggcagaccccagccccccagccagcccgtgttcagaggcctgagcctggccgacggcaagtggcacagagtggccgtggccgtgaagggccagagcgtgaccctgatcgtggactgcaagaagagagtgaccagacccctgcccagaagcgccagacccgtgctggacacccacggcgtgatcatcttcggcgccagaatcctggacgaggaggtgttcgagggcgacgtgcaggagctggccatcgtgcccggcgtgcaggccgcctacgagagctgcgagcagaaggagctggagtgcgagggcggccagagagagagaccccagaaccagcagccccacagagcccagagaagcccccagcagcagcccagcagactgcacagaccccagaaccaggagccccagagccaggaccccacccccggcgaggaggaggagatcctggagagcagcctgctgccccccctggaggaggccgcccacggccccagaggcctgaagggcgagaagggcgagcccgccgtgctggagcccggcatgctggtggagggcccccccggccccgagggccccgccggcctgatcggcccccccggcatccagggcaaccccggccccgtgggcgaccccggcgagagaggcccccccggcagagccggcctgcccggcagcgacggcgcccccggcccccccggcaccagcctgatgctgcccttcagattcggcagcggcggcggcgacaagggccccgtggtggccgcccaggaggcccaggcccaggccatcctgcagcaggccagactggccctgagaggcccccccggccccatgggctacaccggcagacccggccccctgggccagcccggcagccccggcctgaagggcgagagcggcgacctgggcccccagggccccagaggcccccagggcctgaccggcccccccggcaaggccggcagaagaggcagagccggcgccgacggcgccagaggcatgcccggcgaccccggcgtgaagggcgacagaggcttcgacggcctgcccggcctgcccggcgagaagggccacagaggcgacaccggcgcccagggcctgcccggcccccccggcgaggacggcgagagaggcgacgacggcgagatcggccccagaggcctgcccggcgagagcggccccagaggcctgctgggccccaagggcccccccggcatccccggcccccccggcgtgagaggcatggacggcccccagggccccaagggcagcctgggcccccagggcgagcccggcccccccggccagcagggcacccccggcacccagggcctgcccggcccccagggcgccatcggcccccacggcgagaagggcccccagggcaagcccggcctgcccggcatgcccggcagcgacggcccccccggccaccccggcaaggagggcccccccggcaccaagggcaaccagggccccagcggcccccagggccccctgggctaccccggccccagaggcgtgaagggcgtggacggcatcagaggcctgaagggccacaagggcgagaagggcgaggacggcttccccggcttcaagggcgacatcggcgtgaagggcgacagaggcgaggtgggcgtgcccggcagcagaggcgaggacggccccgagggccccaagggcagaaccggccccaccggcgaccccggcccccccggcctgatgggcgagaagggcaagctgggcgtgcccggcctgcccggctaccccggcagacagggccccaagggcagcctgggcttccccggcttccccggcgccagcggcgagaagggcgccagaggcctgagcggcaagagcggccccagaggcgagagaggccccaccggccccagaggccagagaggccccagaggcgccaccggcaagagcggcgccaagggcaccagcggcggcgacggcccccacggcccccccggcgagagaggcctgcccggcccccagggccccaacggcttccccggccccaagggcccccccggcccccccggcaaggacggcctgcccggccaccccggccagagaggcgaggtgggcttccagggcaagaccggcccccccggcccccccggcgtggtgggcccccagggcgccgccggcgagaccggccccatgggcgagagaggccaccccggcccccccggcccccccggcgagcagggcctgcccggcaccgccggcaaggagggcaccaagggcgaccccggcccccccggcgcccccggcaaggacggccccgccggcctgagaggcttccccggcgagagaggcctgcccggcaccgccggcggccccggcctgaagggcaacgagggccccagcggcccccccggccccgccggcagccccggcgagagaggcgccgccggcagcggcggccccatcggcccccccggcagacccggcccccagggcccccccggcgccgccggcgagaagggcgtgcccggcgagaagggccccatcggccccaccggcagagacggcgtgcagggccccgtgggcctgcccggccccgccggcccccccggcgtggccggcgaggacggcgacaagggcgaggtgggcgaccccggccagaagggcaccaagggcaacaagggcgagcacggcccccccggcccccccggccccatcggccccgtgggccagcccggcgccgccggcgccgacggcgagcccggcgccagaggcccccagggccacttcggcgccaagggcgacgagggcaccagaggcttcaacggcccccccggccccatcggcctgcagggcctgcccggccccagcggcgagaagggcgagaccggcgacgtgggccccatgggcccccccggcccccccggccccagaggccccgccggccccaacggcgccgacggcccccagggcccccccggcggcgtgggcaacctgggcccccccggcgagaagggcgagcccggcgagagcggcagccccggcatccagggcgagcccggcgtgaagggccccagaggcgagagaggcgagaagggcgagagcggccagcccggcgagcccggcccccccggccccaagggccccaccggcgacgacggccccaagggcaaccccggccccgtgggcttccccggcgaccccggcccccccggcgagggcggccccagaggccaggacggcgccaagggcgacagaggcgaggacggcgagcccggccagcccggcagccccggccccaccggcgagaacggcccccccggccccctgggcaagagaggccccgccggcagccccggcagcgagggcagacagggcggcaagggcgccaagggcgaccccggcgccatcggcgcccccggcaagaccggccccgtgggccccgccggccccgccggcaagcccggccccgacggcctgagaggcctgcccggcagcgtgggccagcagggcagacccggcgccaccggccaggccggcccccccggccccgtgggcccccccggcctgcccggcctgagaggcgacgccggcgccaagggcgagaagggccaccccggcctgatcggcctgatcggcccccccggcgagcagggcgagaagggcgacagaggcctgcccggcccccagggcagccccggccagaagggcgagatgggcatccccggcgccagcggccccatcggccccggcggcccccccggcctgcccggccccgccggccccaagggcgccaagggcgccaccggccccggcggccccaagggcgagaagggcgtgcagggcccccccggccaccccggcccccccggcgaggtgatccagcccctgcccatccagatgcccaagaagaccagaagaagcgtggacggcagcagactgatgcaggaggacgaggccatccccaccggcggcgcccccggcagccccggcggcctggaggagatcttcggcagcctggacagcctgagagaggagatcgagcagatgagaagacccaccggcacccaggacagccccgccagaacctgccaggacctgaagctgtgccaccccgagctgcccgacggcgagtactgggtggaccccaaccagggctgcgccagagacgccttcagagtgttctgcaacttcaccgccggcggcgagacctgcgtgacccccagagacgacgtgacccagttcagctacgtggacagcgagggcagccccgtgggcgtggtgcagctgaccttcctgagactgctgagcgtgagcgcccaccaggacgtgagctacccctgcagcggcgccgccagagacggccccctgagactgagaggcgccaacgaggacgagctgagccccgagaccagcccctacgtgaaggagttcagagacggctgccagacccagcagggcagaaccgtgctggaggtgagaacccccgtgctggagcagctgcccgtgctggacgccagcttcagcgacctgggcgccccccccagaagaggcggcgtgctgctgggccccgtgtgcttcatgggctag

SEQ ID NO: 232675 - DNA, 4968 bp, Artificial Sequence
  derived and/or modified sequence
atggagagatgcagcagatgccacagactgctgctgctgctgcccctggtgctgggcctgagcgccgcccccggctgggccggcgccccccccgtggacgtgctgagagccctgagattccccagcctgcccgacggcgtgagaagagccaagggcatctgccccgccgacgtggcctacagagtggccagacccgcccagctgagcgcccccaccagacagctgttccccggcggcttccccaaggacttcagcctgctgaccgtggtgagaaccagacccggcctgcaggcccccctgctgaccctgtacagcgcccagggcgtgagacagctgggcctggagctgggcagacccgtgagattcctgtacgaggaccagaccggcagaccccagccccccagccagcccgtgttcagaggcctgagcctggccgacggcaagtggcacagagtggccgtggccgtgaagggccagagcgtgaccctgatcgtggactgcaagaagagagtgaccagacccctgcccagaagcgccagacccgtgctggacacccacggcgtgatcatcttcggcgccagaatcctggacgaggaggtgttcgagggcgacgtgcaggagctggccatcgtgcccggcgtgcaggccgcctacgagagctgcgagcagaaggagctggagtgcgagggcggccagagagagagaccccagaaccagcagccccacagagcccagagaagcccccagcagcagcccagcagactgcacagaccccagaaccaggagccccagagccagcccaccgagagcctgtactacgactacgagcccccctactacgacgtgatgaccaccggcaccacccccgactaccaggccgcccacggccccagaggcctgaagggcgagaagggcgagcccgccgtgctggagcccggcatgctggtggagggcccccccggccccgagggccccgccggcctgatcggcccccccggcatccagggcaaccccggccccgtgggcgaccccggcgagagaggcccccccggcagagccggcctgcccggcagcgacggcgcccccggcccccccggcaccagcctgatgctgcccttcagattcggcagcggcggcggcgacaagggccccgtggtggccgcccaggaggcccaggcccaggccatcctgcagcaggccagactggccctgagaggcccccccggccccatgggctacaccggcagacccggccccctgggccagcccggcagccccggcctgaagggcgagagcggcgacctgggcccccagggccccagaggcccccagggcctgaccggcccccccggcaaggccggcagaagaggcagagccggcgccgacggcgccagaggcatgcccggcgaccccggcgtgaagggcgacagaggcttcgacggcctgcccggcctgcccggcgagaagggccacagaggcgacaccggcgcccagggcctgcccggcccccccggcgaggacggcgagagaggcgacgacggcgagatcggccccagaggcctgcccggcgagagcggccccagaggcctgctgggccccaagggcccccccggcatccccggcccccccggcgtgagaggcatggacggcccccagggccccaagggcagcctgggcccccagggcgagcccggcccccccggccagcagggcacccccggcacccagggcctgcccggcccccagggcgccatcggcccccacggcgagaagggcccccagggcaagcccggcctgcccggcatgcccggcagcgacggcccccccggccaccccggcaaggagggcccccccggcaccaagggcaaccagggccccagcggcccccagggccccctgggctaccccggccccagaggcgtgaagggcgtggacggcatcagaggcctgaagggccacaagggcgagaagggcgaggacggcttccccggcttcaagggcgacatcggcgtgaagggcgacagaggcgaggtgggcgtgcccggcagcagaggcgaggacggccccgagggccccaagggcagaaccggccccaccggcgaccccggcccccccggcctgatgggcgagaagggcaagctgggcgtgcccggcctgcccggctaccccggcagacagggccccaagggcagcctgggcttccccggcttccccggcgccagcggcgagaagggcgccagaggcctgagcggcaagagcggccccagaggcgagagaggccccaccggccccagaggccagagaggccccagaggcgccaccggcaagagcggcgccaagggcaccagcggcggcgacggcccccacggcccccccggcgagagaggcctgcccggcccccagggccccaacggcttccccggccccaagggcccccccggcccccccggcaaggacggcctgcccggccaccccggccagagaggcgaggtgggcttccagggcaagaccggcccccccggcccccccggcgtggtgggcccccagggcgccgccggcgagaccggccccatgggcgagagaggccaccccggcccccccggcccccccggcgagcagggcctgcccggcaccgccggcaaggagggcaccaagggcgaccccggcccccccggcgcccccggcaaggacggccccgccggcctgagaggcttccccggcgagagaggcctgcccggcaccgccggcggccccggcctgaagggcaacgagggccccagcggcccccccggccccgccggcagccccggcgagagaggcgccgccggcagcggcggccccatcggcccccccggcagacccggcccccagggcccccccggcgccgccggcgagaagggcgtgcccggcgagaagggccccatcggccccaccggcagagacggcgtgcagggccccgtgggcctgcccggccccgccggcccccccggcgtggccggcgaggacggcgacaagggcgaggtgggcgaccccggccagaagggcaccaagggcaacaagggcgagcacggcccccccggcccccccggccccatcggccccgtgggccagcccggcgccgccggcgccgacggcgagcccggcgccagaggcccccagggccacttcggcgccaagggcgacgagggcaccagaggcttcaacggcccccccggccccatcggcctgcagggcctgcccggccccagcggcgagaagggcgagaccggcgacgtgggccccatgggcccccccggcccccccggccccagaggccccgccggccccaacggcgccgacggcccccagggcccccccggcggcgtgggcaacctgggcccccccggcgagaagggcgagcccggcgagagcggcagccccggcatccagggcgagcccggcgtgaagggccccagaggcgagagaggcgagaagggcgagagcggccagcccggcgagcccggcccccccggccccaagggccccaccggcgacgacggccccaagggcaaccccggccccgtgggcttccccggcgaccccggcccccccggcgagggcggccccagaggccaggacggcgccaagggcgacagaggcgaggacggcgagcccggccagcccggcagccccggccccaccggcgagaacggcccccccggccccctgggcaagagaggccccgccggcagccccggcagcgagggcagacagggcggcaagggcgccaagggcgaccccggcgccatcggcgcccccggcaagaccggccccgtgggccccgccggccccgccggcaagcccggccccgacggcctgagaggcctgcccggcagcgtgggccagcagggcagacccggcgccaccggccaggccggcccccccggccccgtgggcccccccggcctgcccggcctgagaggcgacgccggcgccaagggcgagaagggccaccccggcctgatcggcctgatcggcccccccggcgagcagggcgagaagggcgacagaggcctgcccggcccccagggcagccccggccagaagggcgagatgggcatccccggcgccagcggccccatcggccccggcggcccccccggcctgcccggccccgccggccccaagggcgccaagggcgccaccggccccggcggccccaagggcgagaagggcgtgcagggcccccccggccaccccggcccccccggcgaggtgatccagcccctgcccatccagatgcccaagaagaccagaagaagcgtggacggcagcagactgatgcaggaggacgaggccatccccaccggcggcgcccccggcagccccggcggcctggaggagatcttcggcagcctggacagcctgagagaggagatcgagcagatgagaagacccaccggcacccaggacagccccgccagaacctgccaggacctgaagctgtgccaccccgagctgcccgacggcgagtactgggtggaccccaaccagggctgcgccagagacgccttcagagtgttctgcaacttcaccgccggcggcgagacctgcgtgacccccagagacgacgtgacccagttcagctacgtggacagcgagggcagccccgtgggcgtggtgcagctgaccttcctgagactgctgagcgtgagcgcccaccaggacgtgagctacccctgcagcggcgccgccagagacggccccctgagactgagaggcgccaacgaggacgagctgagccccgagaccagcccctacgtgaaggagttcagagacggctgccagacccagcagggcagaaccgtgctggaggtgagaacccccgtgctggagcagctgcccgtgctggacgccagcttcagcgacctgggcgccccccccagaagaggcggcgtgctgctgggccccgtgtgcttcatgggctag

SEQ ID NO: 232676 - DNA, 4953 bp, Artificial Sequence
  derived and/or modified sequence
atggagagatgcagcagatgccacagactgctgctgctgctgcccctggtgctgggcctgagcgccgcccccggctgggccggcgccccccccgtggacgtgctgagagccctgagattccccagcctgcccgacggcgtgagaagagccaagggcatctgccccgccgacgtggcctacagagtggccagacccgcccagctgagcgcccccaccagacagctgttccccggcggcttccccaaggacttcagcctgctgaccgtggtgagaaccagacccggcctgcaggcccccctgctgaccctgtacagcgcccagggcgtgagacagctgggcctggagctgggcagacccgtgagattcctgtacgaggaccagaccggcagaccccagccccccagccagcccgtgttcagaggcctgagcctggccgacggcaagtggcacagagtggccgtggccgtgaagggccagagcgtgaccctgatcgtggactgcaagaagagagtgaccagacccctgcccagaagcgccagacccgtgctggacacccacggcgtgatcatcttcggcgccagaatcctggacgaggaggtgttcgagggcgacgtgcaggagctggccatcgtgcccggcgtgcaggccgcctacgagagctgcgagcagaaggagctggagtgcgagggcggccagagagagagaccccagaaccagcagccccacagagcccagagaagcccccagcagcagcccagcagactgcacagaccccagaaccaggagccccagagccaggaccccacccccggcgaggaggaggagatcctggagagcagcctgctgccccccctggaggaggccgcccacggccccagaggcctgaagggcgagaagggcgagcccgccgtgctggagcccggcatgctggtggagggcccccccggccccgagggccccgccggcctgatcggcccccccggcatccagggcaaccccggccccgtgggcgaccccggcgagagaggcccccccggcagagccggcctgcccggcagcgacggcgcccccggcccccccggcaccagcctgatgctgcccttcagattcggcagcggcggcggcgacaagggccccgtggtggccgcccaggaggcccaggcccaggccatcctgcagcaggccagactggccctgagaggcccccccggccccatgggctacaccggcagacccggccccctgggccagcccggcagccccggcctgaagggcgagagcggcgacctgggcccccagggccccagaggcccccagggcctgaccggcccccccggcaaggccggcagaagaggcagagccggcgccgacggcgccagaggcatgcccggcgaccccggcgtgaagggcgacagaggcttcgacggcctgcccggcctgcccggcgagaagggccacagaggcgacaccggcgcccagggcctgcccggcccccccggcgaggacggcgagagaggcgacgacggcgagatcggccccagaggcctgcccggcgagagcggccccagaggcctgctgggccccaagggcccccccggcatccccggcccccccggcgtgagaggcatggacggcccccagggccccaagggcagcctgggcccccagggcgagcccggcccccccggccagcagggcacccccggcacccagggcctgcccggcccccagggcgccatcggcccccacggcgagaagggcccccagggcaagcccggcctgcccggcatgcccggcagcgacggcccccccggccaccccggcaaggagggcccccccggcaccaagggcaaccagggccccagcggcccccagggccccctgggctaccccggccccagaggcgtgaagggcgtggacggcatcagaggcctgaagggccacaagggcgagaagggcgaggacggcttccccggcttcaagggcgacatcggcgtgaagggcgacagaggcgaggtgggcgtgcccggcagcagaggcgaggacggccccgagggccccaagggcagaaccggccccaccggcgaccccggcccccccggcctgatgggcgagaagggcaagctgggcgtgcccggcctgcccggctaccccggcagacagggccccaagggcagcctgggcttccccggcttccccggcgccagcggcgagaagggcgccagaggcctgagcggcaagagcggccccagaggcgagagaggccccaccggccccagaggccagagaggccccagaggcgccaccggcaagagcggcgccaagggcaccagcggcggcgacggcccccacggcccccccggcgagagaggcctgcccggcccccagggccccaacggcttccccggccccaagggccccctgggcccccccggcaaggacggcctgcccggccaccccggccagagaggcgaggtgggcttccagggcaagaccggcccccccggcccccccggcgtggtgggcccccagggcgccgccggcgagaccggccccatgggcgagagaggccaccccggcccccccggcccccccggcgagcagggcctgcccggcaccgccggcaaggagggcaccaagggcgaccccggcccccccggcgcccccggcaaggacggccccgccggcctgagaggcttccccggcgagagaggcctgcccggcaccgccggcggccccggcctgaagggcaacgagggccccagcggcccccccggccccgccggcagccccggcgagagaggcgccgccggcagcggcggccccatcggcccccccggcagacccggcccccagggcccccccggcgccgccggcgagaagggcgtgcccggcgagaagggccccatcggccccaccggcagagacggcgtgcagggccccgtgggcctgcccggccccgccggcccccccggcgtggccggcgaggacggcgacaagggcgaggtgggcgaccccggccagaagggcaccaagggcaacaagggcgagcacggcccccccggcccccccggccccatcggccccgtgggccagcccggcgccgccggcgccgacggcgagcccggcgccagaggcccccagggccacttcggcgccaagggcgacgagggcaccagaggcttcaacggcccccccggccccatcggcctgcagggcctgcccggccccagcggcgagaagggcgagaccggcgacgtgggccccatgggcccccccggcccccccggccccagaggccccgccggccccaacggcgccgacggcccccagggcccccccggcggcgtgggcaacctgggcccccccggcgagaagggcgagcccggcgagagcggcagccccggcatccagggcgagcccggcgtgaagggccccagaggcgagagaggcgagaagggcgagagcggccagcccggcgagcccggcccccccggccccaagggccccaccggcgacgacggccccaagggcaaccccggccccgtgggcttccccggcgaccccggcccccccggcgagggcggccccagaggccaggacggcgccaagggcgacagaggcgaggacggcgagcccggccagcccggcagccccggccccaccggcgagaacggcccccccggccccctgggcaagagaggccccgccggcagccccggcagcgagggcagacagggcggcaagggcgccaagggcgaccccggcgccatcggcgcccccggcaagaccggccccgtgggccccgccggccccgccggcaagcccggccccgacggcctgagaggcctgcccggcagcgtgggccagcagggcagacccggcgccaccggccaggccggcccccccggccccgtgggcccccccggcctgcccggcctgagaggcgacgccggcgccaagggcgagaagggccaccccggcctgatcggcctgatcggcccccccggcgagcagggcgagaagggcgacagaggcctgcccggcccccagggcagccccggccagaagggcgagatgggcatccccggcgccagcggccccatcggccccggcggcccccccggcctgcccggccccgccggccccaagggcgccaagggcgccaccggccccggcggccccaagggcgagaagggcgtgcagggcccccccggccaccccggcccccccggcgaggtgatccagcccctgcccatccagatgcccaagaagaccagaagaagcgtggacggcagcagactgatgcaggaggacgaggccatccccaccggcggcgcccccggcagccccggcggcctggaggagatcttcggcagcctggacagcctgagagaggagatcgagcagatgagaagacccaccggcacccaggacagccccgccagaacctgccaggacctgaagctgtgccaccccgagctgcccgacggcgagtactgggtggaccccaaccagggctgcgccagagacgccttcagagtgttctgcaacttcaccgccggcggcgagacctgcgtgacccccagagacgacgtgacccagttcagctacgtggacagcgagggcagccccgtgggcgtggtgcagctgaccttcctgagactgctgagcgtgagcgcccaccaggacgtgagctacccctgcagcggcgccgccagagacggccccctgagactgagaggcgccaacgaggacgagctgagccccgagaccagcccctacgtgaaggagttcagagacggctgccagacccagcagggcagaaccgtgctggaggtgagaacccccgtgctggagcagctgcccgtgctggacgccagcttcagcgacctgggcgccccccccagaagaggcggcgtgctgctgggccccgtgtgcttcatgggctag

SEQ ID NO: 232677 - DNA, 5031 bp, Artificial Sequence
  derived and/or modified sequence
atggagagatgcagcagatgccacagactgctgctgctgctgcccctggtgctgggcctgagcgccgcccccggctgggccggcgccccccccgtggacgtgctgagagccctgagattccccagcctgcccgacggcgtgagaagagccaagggcatctgccccgccgacgtggcctacagagtggccagacccgcccagctgagcgcccccaccagacagctgttccccggcggcttccccaaggacttcagcctgctgaccgtggtgagaaccagacccggcctgcaggcccccctgctgaccctgtacagcgcccagggcgtgagacagctgggcctggagctgggcagacccgtgagattcctgtacgaggaccagaccggcagaccccagccccccagccagcccgtgttcagaggcctgagcctggccgacggcaagtggcacagagtggccgtggccgtgaagggccagagcgtgaccctgatcgtggactgcaagaagagagtgaccagacccctgcccagaagcgccagacccgtgctggacacccacggcgtgatcatcttcggcgccagaatcctggacgaggaggtgttcgagggcgacgtgcaggagctggccatcgtgcccggcgtgcaggccgcctacgagagctgcgagcagaaggagctggagtgcgagggcggccagagagagagaccccagaaccagcagccccacagagcccagagaagcccccagcagcagcccagcagactgcacagaccccagaaccaggagccccagagccagcccaccgagagcctgtactacgactacgagcccccctactacgacgtgatgaccaccggcaccacccccgactaccaggaccccacccccggcgaggaggaggagatcctggagagcagcctgctgccccccctggaggaggccgcccacggccccagaggcctgaagggcgagaagggcgagcccgccgtgctggagcccggcatgctggtggagggcccccccggccccgagggccccgccggcctgatcggcccccccggcatccagggcaaccccggccccgtgggcgaccccggcgagagaggcccccccggcagagccggcctgcccggcagcgacggcgcccccggcccccccggcaccagcctgatgctgcccttcagattcggcagcggcggcggcgacaagggccccgtggtggccgcccaggaggcccaggcccaggccatcctgcagcaggccagactggccctgagaggcccccccggccccatgggctacaccggcagacccggccccctgggccagcccggcagccccggcctgaagggcgagagcggcgacctgggcccccagggccccagaggcccccagggcctgaccggcccccccggcaaggccggcagaagaggcagagccggcgccgacggcgccagaggcatgcccggcgaccccggcgtgaagggcgacagaggcttcgacggcctgcccggcctgcccggcgagaagggccacagaggcgacaccggcgcccagggcctgcccggcccccccggcgaggacggcgagagaggcgacgacggcgagatcggccccagaggcctgcccggcgagagcggccccagaggcctgctgggccccaagggcccccccggcatccccggcccccccggcgtgagaggcatggacggcccccagggccccaagggcagcctgggcccccagggcgagcccggcccccccggccagcagggcacccccggcacccagggcctgcccggcccccagggcgccatcggcccccacggcgagaagggcccccagggcaagcccggcctgcccggcatgcccggcagcgacggcccccccggccaccccggcaaggagggcccccccggcaccaagggcaaccagggccccagcggcccccagggccccctgggctaccccggccccagaggcgtgaagggcgtggacggcatcagaggcctgaagggccacaagggcgagaagggcgaggacggcttccccggcttcaagggcgacatcggcgtgaagggcgacagaggcgaggtgggcgtgcccggcagcagaggcgaggacggccccgagggccccaagggcagaaccggccccaccggcgaccccggcccccccggcctgatgggcgagaagggcaagctgggcgtgcccggcctgcccggctaccccggcagacagggccccaagggcagcctgggcttccccggcttccccggcgccagcggcgagaagggcgccagaggcctgagcggcaagagcggccccagaggcgagagaggccccaccggccccagaggccagagaggccccagaggcgccaccggcaagagcggcgccaagggcaccagcggcggcgacggcccccacggcccccccggcgagagaggcctgcccggcccccagggccccaacggcttccccggccccaagggcccccccggcccccccggcaaggacggcctgcccggccaccccggccagagaggcgaggtgggcttccagggcaagaccggcccccccggcccccccggcgtggtgggcccccagggcgccgccggcgagaccggccccatgggcgagagaggccaccccggcccccccggcccccccggcgagcagggcctgcccggcaccgccggcaaggagggcaccaagggcgaccccggcccccccggcgcccccggcaaggacggccccgccggcctgagaggcttccccggcgagagaggcctgcccggcaccgccggcggccccggcctgaagggcaacgagggccccagcggcccccccggccccgccggcagccccggcgagagaggcgccgccggcagcggcggccccatcggcccccccggcagacccggcccccagggcccccccggcgccgccggcgagaagggcgtgcccggcgagaagggccccatcggccccaccggcagagacggcgtgcagggccccgtgggcctgcccggccccgccggcccccccggcgtggccggcgaggacggcgacaagggcgaggtgggcgaccccggccagaagggcaccaagggcaacaagggcgagcacggcccccccggcccccccggccccatcggccccgtgggccagcccggcgccgccggcgccgacggcgagcccggcgccagaggcccccagggccacttcggcgccaagggcgacgagggcaccagaggcttcaacggcccccccggccccatcggcctgcagggcctgcccggccccagcggcgagaagggcgagaccggcgacgtgggccccatgggcccccccggcccccccggccccagaggccccgccggccccaacggcgccgacggcccccagggcccccccggcggcgtgggcaacctgggcccccccggcgagaagggcgagcccggcgagagcggcagccccggcatccagggcgagcccggcgtgaagggccccagaggcgagagaggcgagaagggcgagagcggccagcccggcgagcccggcccccccggccccaagggccccaccggcgacgacggccccaagggcaaccccggccccgtgggcttccccggcgaccccggcccccccggcgagggcggccccagaggccaggacggcgccaagggcgacagaggcgaggacggcgagcccggccagcccggcagccccggccccaccggcgagaacggcccccccggccccctgggcaagagaggccccgccggcagccccggcagcgagggcagacagggcggcaagggcgccaagggcgaccccggcgccatcggcgcccccggcaagaccggccccgtgggccccgccggccccgccggcaagcccggccccgacggcctgagaggcctgcccggcagcgtgggccagcagggcagacccggcgccaccggccaggccggcccccccggccccgtgggcccccccggcctgcccggcctgagaggcgacgccggcgccaagggcgagaagggccaccccggcctgatcggcctgatcggcccccccggcgagcagggcgagaagggcgacagaggcctgcccggcccccagggcagccccggccagaagggcgagatgggcatccccggcgccagcggccccatcggccccggcggcccccccggcctgcccggccccgccggccccaagggcgccaagggcgccaccggccccggcggccccaagggcgagaagggcgtgcagggcccccccggccaccccggcccccccggcgaggtgatccagcccctgcccatccagatgcccaagaagaccagaagaagcgtggacggcagcagactgatgcaggaggacgaggccatccccaccggcggcgcccccggcagccccggcggcctggaggagatcttcggcagcctggacagcctgagagaggagatcgagcagatgagaagacccaccggcacccaggacagccccgccagaacctgccaggacctgaagctgtgccaccccgagctgcccgacggcgagtactgggtggaccccaaccagggctgcgccagagacgccttcagagtgttctgcaacttcaccgccggcggcgagacctgcgtgacccccagagacgacgtgacccagttcagctacgtggacagcgagggcagccccgtgggcgtggtgcagctgaccttcctgagactgctgagcgtgagcgcccaccaggacgtgagctacccctgcagcggcgccgccagagacggccccctgagactgagaggcgccaacgaggacgagctgagccccgagaccagcccctacgtgaaggagttcagagacggctgccagacccagcagggcagaaccgtgctggaggtgagaacccccgtgctggagcagctgcccgtgctggacgccagcttcagcgacctgggcgccccccccagaagaggcggcgtgctgctgggccccgtgtgcttcatgggctag

SEQ ID NO: 232678 - DNA, 4953 bp, Artificial Sequence
  derived and/or modified sequence
atggagagatgcagcagatgccacagactgctgctgctgctgcccctggtgctgggcctgagcgccgcccccggctgggccggcgccccccccgtggacgtgctgagagccctgagattccccagcctgcccgacggcgtgagaagagccaagggcatctgccccgccgacgtggcctacagagtggccagacccgcccagctgagcgcccccaccagacagctgttccccggcggcttccccaaggacttcagcctgctgaccgtggtgagaaccagacccggcctgcaggcccccctgctgaccctgtacagcgcccagggcgtgagacagctgggcctggagctgggcccccccgtgagattcctgtacgaggaccagaccggcagaccccagccccccagccagcccgtgttcagaggcctgagcctggccgacggcaagtggcacagagtggccgtggccgtgaagggccagagcgtgaccctgatcgtggactgcaagaagagagtgaccagacccctgcccagaagcgccagacccgtgctggacacccacggcgtgatcatcttcggcgccagaatcctggacgaggaggtgttcgagggcgacgtgcaggagctggccatcgtgcccggcgtgcaggccgcctacgagagctgcgagcagaaggagctggagtgcgagggcggccagagagagagaccccagaaccagcagccccacagagcccagagaagcccccagcagcagcccagcagactgcacagaccccagaaccaggagccccagagccaggaccccacccccggcgaggaggaggagatcctggagagcagcctgctgccccccctggaggaggccgcccacggccccagaggcctgaagggcgagaagggcgagcccgccgtgctggagcccggcatgctggtggagggcccccccggccccgagggccccgccggcctgatcggcccccccggcatccagggcaaccccggccccgtgggcgaccccggcgagagaggcccccccggcagagccggcctgcccggcagcgacggcgcccccggcccccccggcaccagcctgatgctgcccttcagattcggcagcggcggcggcgacaagggccccgtggtggccgcccaggaggcccaggcccaggccatcctgcagcaggccagactggccctgagaggcccccccggccccatgggctacaccggcagacccggccccctgggccagcccggcagccccggcctgaagggcgagagcggcgacctgggcccccagggccccagaggcccccagggcctgaccggcccccccggcaaggccggcagaagaggcagagccggcgccgacggcgccagaggcatgcccggcgaccccggcgtgaagggcgacagaggcttcgacggcctgcccggcctgcccggcgagaagggccacagaggcgacaccggcgcccagggcctgcccggcccccccggcgaggacggcgagagaggcgacgacggcgagatcggccccagaggcctgcccggcgagagcggccccagaggcctgctgggccccaagggcccccccggcatccccggcccccccggcgtgagaggcatggacggcccccagggccccaagggcagcctgggcccccagggcgagcccggcccccccggccagcagggcacccccggcacccagggcctgcccggcccccagggcgccatcggcccccacggcgagaagggcccccagggcaagcccggcctgcccggcatgcccggcagcgacggcccccccggccaccccggcaaggagggcccccccggcaccaagggcaaccagggccccagcggcccccagggccccctgggctaccccggccccagaggcgtgaagggcgtggacggcatcagaggcctgaagggccacaagggcgagaagggcgaggacggcttccccggcttcaagggcgacatcggcgtgaagggcgacagaggcgaggtgggcgtgcccggcagcagaggcgaggacggccccgagggccccaagggcagaaccggccccaccggcgaccccggcccccccggcctgatgggcgagaagggcaagctgggcgtgcccggcctgcccggctaccccggcagacagggccccaagggcagcctgggcttccccggcttccccggcgccagcggcgagaagggcgccagaggcctgagcggcaagagcggccccagaggcgagagaggccccaccggccccagaggccagagaggccccagaggcgccaccggcaagagcggcgccaagggcaccagcggcggcgacggcccccacggcccccccggcgagagaggcctgcccggcccccagggccccaacggcttccccggccccaagggcccccccggcccccccggcaaggacggcctgcccggccaccccggccagagaggcgaggtgggcttccagggcaagaccggcccccccggcccccccggcgtggtgggcccccagggcgccgccggcgagaccggccccatgggcgagagaggccaccccggcccccccggcccccccggcgagcagggcctgcccggcaccgccggcaaggagggcaccaagggcgaccccggcccccccggcgcccccggcaaggacggccccgccggcctgagaggcttccccggcgagagaggcctgcccggcaccgccggcggccccggcctgaagggcaacgagggccccagcggcccccccggccccgccggcagccccggcgagagaggcgccgccggcagcggcggccccatcggcccccccggcagacccggcccccagggcccccccggcgccgccggcgagaagggcgtgcccggcgagaagggccccatcggccccaccggcagagacggcgtgcagggccccgtgggcctgcccggccccgccggcccccccggcgtggccggcgaggacggcgacaagggcgaggtgggcgaccccggccagaagggcaccaagggcaacaagggcgagcacggcccccccggcccccccggccccatcggccccgtgggccagcccggcgccgccggcgccgacggcgagcccggcgccagaggcccccagggccacttcggcgccaagggcgacgagggcaccagaggcttcaacggcccccccggccccatcggcctgcagggcctgcccggccccagcggcgagaagggcgagaccggcgacgtgggccccatgggcccccccggcccccccggccccagaggccccgccggccccaacggcgccgacggcccccagggcccccccggcggcgtgggcaacctgggcccccccggcgagaagggcgagcccggcgagagcggcagccccggcatccagggcgagcccggcgtgaagggccccagaggcgagagaggcgagaagggcgagagcggccagcccggcgagcccggcccccccggccccaagggccccaccggcgacgacggccccaagggcaaccccggccccgtgggcttccccggcgaccccggcccccccggcgagggcggccccagaggccaggacggcgccaagggcgacagaggcgaggacggcgagcccggccagcccggcagccccggccccaccggcgagaacggcccccccggccccctgggcaagagaggccccgccggcagccccggcagcgagggcagacagggcggcaagggcgccaagggcgaccccggcgccatcggcgcccccggcaagaccggccccgtgggccccgccggccccgccggcaagcccggccccgacggcctgagaggcctgcccggcagcgtgggccagcagggcagacccggcgccaccggccaggccggcccccccggccccgtgggcccccccggcctgcccggcctgagaggcgacgccggcgccaagggcgagaagggccaccccggcctgatcggcctgatcggcccccccggcgagcagggcgagaagggcgacagaggcctgcccggcccccagggcagccccggccagaagggcgagatgggcatccccggcgccagcggccccatcggccccggcggcccccccggcctgcccggccccgccggccccaagggcgccaagggcgccaccggccccggcggccccaagggcgagaagggcgtgcagggcccccccggccaccccggcccccccggcgaggtgatccagcccctgcccatccagatgcccaagaagaccagaagaagcgtggacggcagcagactgatgcaggaggacgaggccatccccaccggcggcgcccccggcagccccggcggcctggaggagatcttcggcagcctggacagcctgagagaggagatcgagcagatgagaagacccaccggcacccaggacagccccgccagaacctgccaggacctgaagctgtgccaccccgagctgcccgacggcgagtactgggtggaccccaaccagggctgcgccagagacgccttcagagtgttctgcaacttcaccgccggcggcgagacctgcgtgacccccagagacgacgtgacccagttcagctacgtggacagcgagggcagccccgtgggcgtggtgcagctgaccttcctgagactgctgagcgtgagcgcccaccaggacgtgagctacccctgcagcggcgccgccagagacggccccctgagactgagaggcgccaacgaggacgagctgagccccgagaccagcccctacgtgaaggagttcagagacggctgccagacccagcagggcagaaccgtgctggaggtgagaacccccgtgctggagcagctgcccgtgctggacgccagcttcagcgacctgggcgccccccccagaagaggcggcgtgctgctgggccccgtgtgcttcatgggctag

SEQ ID NO: 232679 - DNA, 4872 bp, Artificial Sequence
  derived and/or modified sequence
tgagccccccccgtggacgtgctgagagccctgagattccccagcctgcccgacggcgtgagaagagccaagggcatctgccccgccgacgtggcctacagagtggccagacccgcccagctgagcgcccccaccagacagctgttccccggcggcttccccaaggacttcagcctgctgaccgtggtgagaaccagacccggcctgcaggcccccctgctgaccctgtacagcgcccagggcgtgagacagctgggcctggagctgggcagacccgtgagattcctgtacgaggaccagaccggcagaccccagccccccagccagcccgtgttcagaggcctgagcctggccgacggcaagtggcacagagtggccgtggccgtgaagggccagagcgtgaccctgatcgtggactgcaagaagagagtgaccagacccctgcccagaagcgccagacccgtgctggacacccacggcgtgatcatcttcggcgccagaatcctggacgaggaggtgttcgagggcgacgtgcaggagctggccatcgtgcccggcgtgcaggccgcctacgagagctgcgagcagaaggagctggagtgcgagggcggccagagagagagaccccagaaccagcagccccacagagcccagagaagcccccagcagcagcccagcagactgcacagaccccagaaccaggagccccagagccaggaccccacccccggcgaggaggaggagatcctggagagcagcctgctgccccccctggaggaggccgcccacggccccagaggcctgaagggcgagaagggcgagcccgccgtgctggagcccggcatgctggtggagggcccccccggccccgagggccccgccggcctgatcggcccccccggcatccagggcaaccccggccccgtgggcgaccccggcgagagaggcccccccggcagagccggcctgcccggcagcgacggcgcccccggcccccccggcaccagcctgatgctgcccttcagattcggcagcggcggcggcgacaagggccccgtggtggccgcccaggaggcccaggcccaggccatcctgcagcaggccagactggccctgagaggcccccccggccccatgggctacaccggcagacccggccccctgggccagcccggcagccccggcctgaagggcgagagcggcgacctgggcccccagggccccagaggcccccagggcctgaccggcccccccggcaaggccggcagaagaggcagagccggcgccgacggcgccagaggcatgcccggcgaccccggcgtgaagggcgacagaggcttcgacggcctgcccggcctgcccggcgagaagggccacagaggcgacaccggcgcccagggcctgcccggcccccccggcgaggacggcgagagaggcgacgacggcgagatcggccccagaggcctgcccggcgagagcggccccagaggcctgctgggccccaagggcccccccggcatccccggcccccccggcgtgagaggcatggacggcccccagggccccaagggcagcctgggcccccagggcgagcccggcccccccggccagcagggcacccccggcacccagggcctgcccggcccccagggcgccatcggcccccacggcgagaagggcccccagggcaagcccggcctgcccggcatgcccggcagcgacggcccccccggccaccccggcaaggagggcccccccggcaccaagggcaaccagggccccagcggcccccagggccccctgggctaccccggccccagaggcgtgaagggcgtggacggcatcagaggcctgaagggccacaagggcgagaagggcgaggacggcttccccggcttcaagggcgacatcggcgtgaagggcgacagaggcgaggtgggcgtgcccggcagcagaggcgaggacggccccgagggccccaagggcagaaccggccccaccggcgaccccggcccccccggcctgatgggcgagaagggcaagctgggcgtgcccggcctgcccggctaccccggcagacagggccccaagggcagcctgggcttccccggcttccccggcgccagcggcgagaagggcgccagaggcctgagcggcaagagcggccccagaggcgagagaggccccaccggccccagaggccagagaggccccagaggcgccaccggcaagagcggcgccaagggcaccagcggcggcgacggcccccacggcccccccggcgagagaggcctgcccggcccccagggccccaacggcttccccggccccaagggcccccccggcccccccggcaaggacggcctgcccggccaccccggccagagaggcgaggtgggcttccagggcaagaccggcccccccggcccccccggcgtggtgggcccccagggcgccgccggcgagaccggccccatgggcgagagaggccaccccggcccccccggcccccccggcgagcagggcctgcccggcaccgccggcaaggagggcaccaagggcgaccccggcccccccggcgcccccggcaaggacggccccgccggcctgagaggcttccccggcgagagaggcctgcccggcaccgccggcggccccggcctgaagggcaacgagggccccagcggcccccccggccccgccggcagccccggcgagagaggcgccgccggcagcggcggccccatcggcccccccggcagacccggcccccagggcccccccggcgccgccggcgagaagggcgtgcccggcgagaagggccccatcggccccaccggcagagacggcgtgcagggccccgtgggcctgcccggccccgccggcccccccggcgtggccggcgaggacggcgacaagggcgaggtgggcgaccccggccagaagggcaccaagggcaacaagggcgagcacggcccccccggcccccccggccccatcggccccgtgggccagcccggcgccgccggcgccgacggcgagcccggcgccagaggcccccagggccacttcggcgccaagggcgacgagggcaccagaggcttcaacggcccccccggccccatcggcctgcagggcctgcccggccccagcggcgagaagggcgagaccggcgacgtgggccccatgggcccccccggcccccccggccccagaggccccgccggccccaacggcgccgacggcccccagggcccccccggcggcgtgggcaacctgggcccccccggcgagaagggcgagcccggcgagagcggcagccccggcatccagggcgagcccggcgtgaagggccccagaggcgagagaggcgagaagggcgagagcggccagcccggcgagcccggcccccccggccccaagggccccaccggcgacgacggccccaagggcaaccccggccccgtgggcttccccggcgaccccggcccccccggcgagggcggccccagaggccaggacggcgccaagggcgacagaggcgaggacggcgagcccggccagcccggcagccccggccccaccggcgagaacggcccccccggccccctgggcaagagaggccccgccggcagccccggcagcgagggcagacagggcggcaagggcgccaagggcgaccccggcgccatcggcgcccccggcaagaccggccccgtgggccccgccggccccgccggcaagcccggccccgacggcctgagaggcctgcccggcagcgtgggccagcagggcagacccggcgccaccggccaggccggcccccccggccccgtgggcccccccggcctgcccggcctgagaggcgacgccggcgccaagggcgagaagggccaccccggcctgatcggcctgatcggcccccccggcgagcagggcgagaagggcgacagaggcctgcccggcccccagggcagccccggccagaagggcgagatgggcatccccggcgccagcggccccatcggccccggcggcccccccggcctgcccggccccgccggccccaagggcgccaagggcgccaccggccccggcggccccaagggcgagaagggcgtgcagggcccccccggccaccccggcccccccggcgaggtgatccagcccctgcccatccagatgcccaagaagaccagaagaagcgtggacggcagcagactgatgcaggaggacgaggccatccccaccggcggcgcccccggcagccccggcggcctggaggagatcttcggcagcctggacagcctgagagaggagatcgagcagatgagaagacccaccggcacccaggacagccccgccagaacctgccaggacctgaagctgtgccaccccgagctgcccgacggcgagtactgggtggaccccaaccagggctgcgccagagacgccttcagagtgttctgcaacttcaccgccggcggcgagacctgcgtgacccccagagacgacgtgacccagttcagctacgtggacagcgagggcagccccgtgggcgtggtgcagctgaccttcctgagactgctgagcgtgagcgcccaccaggacgtgagctacccctgcagcggcgccgccagagacggccccctgagactgagaggcgccaacgaggacgagctgagccccgagaccagcccctacgtgaaggagttcagagacggctgccagacccagcagggcagaaccgtgctggaggtgagaacccccgtgctggagcagctgcccgtgctggacgccagcttcagcgacctgggcgccccccccagaagaggcggcgtgctgctgggccccgtgtgcttcatgggctag

SEQ ID NO: 232680 - DNA, 4968 bp, Artificial Sequence
  derived and/or modified sequence
atggagagatgcagcagatgccacagactgctgctgctgctgcccctggtgctgggcctgagcgccgcccccggctgggccggcgccccccccgtggacgtgctgagagccctgagattccccagcctgcccgacggcgtgagaagagccaagggcatctgccccgccgacgtggcctacagagtggccagacccgcccagctgagcgcccccaccagacagctgttccccggcggcttccccaaggacttcagcctgctgaccgtggtgagaaccagacccggcctgcaggcccccctgctgaccctgtacagcgcccagggcgtgagacagctgggcctggagctgggcagacccgtgagattcctgtacgaggaccagaccggcagaccccagccccccagccagcccgtgttcagaggcctgagcctggccgacggcaagtggcacagagtggccgtggccgtgaagggccagagcgtgaccctgatcgtggactgcaagaagagagtgaccagacccctgcccagaagcgccagacccgtgctggacacccacggcgtgatcatcttcggcgccagaatcctggacgaggaggtgttcgagggcgacgtgcaggagctggccatcgtgcccggcgtgcaggccgcctacgagagctgcgagcagaaggagctggagtgcgagggcggccagagagagagaccccagaaccagcagccccacagagcccagagaagcccccagcagcagcccagcagactgcacagaccccagaaccaggagccccagagccagcccaccgagagcctgtactacgactacgagcccccctactacgacgtgatgaccaccggcaccacccccgactaccaggccgcccacggccccagaggcctgaagggcgagaagggcgagcccgccgtgctggagcccggcatgctggtggagggcccccccggccccgagggccccgccggcctgatcggcccccccggcatccagggcaaccccggccccgtgggcgaccccggcgagagaggcccccccggcagagccggcctgcccggcagcgacggcgcccccggcccccccggcaccagcctgatgctgcccttcagattcggcagcggcggcggcgacaagggccccgtggtggccgcccaggaggcccaggcccaggccatcctgcagcaggccagactggccctgagaggcccccccggccccatgggctacaccggcagacccggccccctgggccagcccggcagccccggcctgaagggcgagagcggcgacctgggcccccagggccccagaggcccccagggcctgaccggcccccccggcaaggccggcagaagaggcagagccggcgccgacggcgccagaggcatgcccggcgaccccggcgtgaagggcgacagaggcttcgacggcctgcccggcctgcccggcgagaagggccacagaggcgacaccggcgcccagggcctgcccggcccccccggcgaggacggcgagagaggcgacgacggcgagatcggccccagaggcctgcccggcgagagcggccccagaggcctgctgggccccaagggcccccccggcatccccggcccccccggcgtgagaggcatggacggcccccagggccccaagggcagcctgggcccccagggcgagcccggcccccccggccagcagggcacccccggcacccagggcctgcccggcccccagggcgccatcggcccccacggcgagaagggcccccagggcaagcccggcctgcccggcatgcccggcagcgacggcccccccggccaccccggcaaggagggcccccccggcaccaagggcaaccagggccccagcggcccccagggccccctgggctaccccggccccagaggcgtgaagggcgtggacggcatcagaggcctgaagggccacaagggcgagaagggcgaggacggcttccccggcttcaagggcgacatcggcgtgaagggcgacagaggcgaggtgggcgtgcccggcagcagaggcgaggacggccccgagggccccaagggcagaaccggccccaccggcgaccccggcccccccggcctgatgggcgagaagggcaagctgggcgtgcccggcctgcccggctaccccggcagacagggccccaagggcagcctgggcttccccggcttccccggcgccagcggcgagaagggcgccagaggcctgagcggcaagagcggccccagaggcgagagaggccccaccggccccagaggccagagaggccccagaggcgccaccggcaagagcggcgccaagggcaccagcggcggcgacggcccccacggcccccccggcgagagaggcctgcccggcccccagggccccaacggcttccccggccccaagggccccctgggcccccccggcaaggacggcctgcccggccaccccggccagagaggcgaggtgggcttccagggcaagaccggcccccccggcccccccggcgtggtgggcccccagggcgccgccggcgagaccggccccatgggcgagagaggccaccccggcccccccggcccccccggcgagcagggcctgcccggcaccgccggcaaggagggcaccaagggcgaccccggcccccccggcgcccccggcaaggacggccccgccggcctgagaggcttccccggcgagagaggcctgcccggcaccgccggcggccccggcctgaagggcaacgagggccccagcggcccccccggccccgccggcagccccggcgagagaggcgccgccggcagcggcggccccatcggcccccccggcagacccggcccccagggcccccccggcgccgccggcgagaagggcgtgcccggcgagaagggccccatcggccccaccggcagagacggcgtgcagggccccgtgggcctgcccggccccgccggcccccccggcgtggccggcgaggacggcgacaagggcgaggtgggcgaccccggccagaagggcaccaagggcaacaagggcgagcacggcccccccggcccccccggccccatcggccccgtgggccagcccggcgccgccggcgccgacggcgagcccggcgccagaggcccccagggccacttcggcgccaagggcgacgagggcaccagaggcttcaacggcccccccggccccatcggcctgcagggcctgcccggccccagcggcgagaagggcgagaccggcgacgtgggccccatgggcccccccggcccccccggccccagaggccccgccggccccaacggcgccgacggcccccagggcccccccggcggcgtgggcaacctgggcccccccggcgagaagggcgagcccggcgagagcggcagccccggcatccagggcgagcccggcgtgaagggccccagaggcgagagaggcgagaagggcgagagcggccagcccggcgagcccggcccccccggccccaagggccccaccggcgacgacggccccaagggcaaccccggccccgtgggcttccccggcgaccccggcccccccggcgagggcggccccagaggccaggacggcgccaagggcgacagaggcgaggacggcgagcccggccagcccggcagccccggccccaccggcgagaacggcccccccggccccctgggcaagagaggccccgccggcagccccggcagcgagggcagacagggcggcaagggcgccaagggcgaccccggcgccatcggcgcccccggcaagaccggccccgtgggccccgccggccccgccggcaagcccggccccgacggcctgagaggcctgcccggcagcgtgggccagcagggcagacccggcgccaccggccaggccggcccccccggccccgtgggcccccccggcctgcccggcctgagaggcgacgccggcgccaagggcgagaagggccaccccggcctgatcggcctgatcggcccccccggcgagcagggcgagaagggcgacagaggcctgcccggcccccagggcagccccggccagaagggcgagatgggcatccccggcgccagcggccccatcggccccggcggcccccccggcctgcccggccccgccggccccaagggcgccaagggcgccaccggccccggcggccccaagggcgagaagggcgtgcagggcccccccggccaccccggcccccccggcgaggtgatccagcccctgcccatccagatgcccaagaagaccagaagaagcgtggacggcagcagactgatgcaggaggacgaggccatccccaccggcggcgcccccggcagccccggcggcctggaggagatcttcggcagcctggacagcctgagagaggagatcgagcagatgagaagacccaccggcacccaggacagccccgccagaacctgccaggacctgaagctgtgccaccccgagctgcccgacggcgagtactgggtggaccccaaccagggctgcgccagagacgccttcagagtgttctgcaacttcaccgccggcggcgagacctgcgtgacccccagagacgacgtgacccagttcagctacgtggacagcgagggcagccccgtgggcgtggtgcagctgaccttcctgagactgctgagcgtgagcgcccaccaggacgtgagctacccctgcagcggcgccgccagagacggccccctgagactgagaggcgccaacgaggacgagctgagccccgagaccagcccctacgtgaaggagttcagagacggctgccagacccagcagggcagaaccgtgctggaggtgagaacccccgtgctggagcagctgcccgtgctggacgccagcttcagcgacctgggcgccccccccagaagaggcggcgtgctgctgggccccgtgtgcttcatgggctag

SEQ ID NO: 232681 - DNA, 4968 bp, Artificial Sequence
  derived and/or modified sequence
atggagagatgcagcagatgccacagactgctgctgctgctgcccctggtgctgggcctgagcgccgcccccggctgggccggcgccccccccgtggacgtgctgagagccctgagattccccagcctgcccgacggcgtgagaagagccaagggcatctgccccgccgacgtggcctacagagtggccagacccgcccagctgagcgcccccaccagacagctgttccccggcggcttccccaaggacttcagcctgctgaccgtggtgagaaccagacccggcctgcaggcccccctgctgaccctgtacagcgcccagggcgtgagacagctgggcctggagctgggcagacccgtgagattcctgtacgaggaccagaccggcagaccccagccccccagccagcccgtgttcagaggcctgagcctggccgacggcaagtggcacagagtggccgtggccgtgaagggccagagcgtgaccctgatcgtggactgcaagaagagagtgaccagacccctgcccagaagcgccagacccgtgctggacacccacggcgtgatcatcttcggcgccagaatcctggacgaggaggtgttcgagggcgacgtgcaggagctggccatcgtgcccggcgtgcaggccgcctacgagagctgcgagcagaaggagctggagtgcgagggcggccagagagagagaccccagaaccagcagccccacagagcccagagaagcccccagcagcagcccagcagactgcacagaccccagaaccaggagccccagagccagcccaccgagagcctgtactacgactacaagcccccctactacgacgtgatgaccaccggcaccacccccgactaccaggccgcccacggccccagaggcctgaagggcgagaagggcgagcccgccgtgctggagcccggcatgctggtggagggcccccccggccccgagggccccgccggcctgatcggcccccccggcatccagggcaaccccggccccgtgggcgaccccggcgagagaggcccccccggcagagccggcctgcccggcagcgacggcgcccccggcccccccggcaccagcctgatgctgcccttcagattcggcagcggcggcggcgacaagggccccgtggtggccgcccaggaggcccaggcccaggccatcctgcagcaggccagactggccctgagaggcccccccggccccatgggctacaccggcagacccggccccctgggccagcccggcagccccggcctgaagggcgagagcggcgacctgggcccccagggccccagaggcccccagggcctgaccggcccccccggcaaggccggcagaagaggcagagccggcgccgacggcgccagaggcatgcccggcgaccccggcgtgaagggcgacagaggcttcgacggcctgcccggcctgcccggcgagaagggccacagaggcgacaccggcgcccagggcctgcccggcccccccggcgaggacggcgagagaggcgacgacggcgagatcggccccagaggcctgcccggcgagagcggccccagaggcctgctgggccccaagggcccccccggcatccccggcccccccggcgtgagaggcatggacggcccccagggccccaagggcagcctgggcccccagggcgagcccggcccccccggccagcagggcacccccggcacccagggcctgcccggcccccagggcgccatcggcccccacggcgagaagggcccccagggcaagcccggcctgcccggcatgcccggcagcgacggcccccccggccaccccggcaaggagggcccccccggcaccaagggcaaccagggccccagcggcccccagggccccctgggctaccccggccccagaggcgtgaagggcgtggacggcatcagaggcctgaagggccacaagggcgagaagggcgaggacggcttccccggcttcaagggcgacatcggcgtgaagggcgacagaggcgaggtgggcgtgcccggcagcagaggcgaggacggccccgagggccccaagggcagaaccggccccaccggcgaccccggcccccccggcctgatgggcgagaagggcaagctgggcgtgcccggcctgcccggctaccccggcagacagggccccaagggcagcctgggcttccccggcttccccggcgccagcggcgagaagggcgccagaggcctgagcggcaagagcggccccagaggcgagagaggccccaccggccccagaggccagagaggccccagaggcgccaccggcaagagcggcgccaagggcaccagcggcggcgacggcccccacggcccccccggcgagagaggcctgcccggcccccagggccccaacggcttccccggccccaagggcccccccggcccccccggcaaggacggcctgcccggccaccccggccagagaggcgaggtgggcttccagggcaagaccggcccccccggcccccccggcgtggtgggcccccagggcgccgccggcgagaccggccccatgggcgagagaggccaccccggcccccccggcccccccggcgagcagggcctgcccggcaccgccggcaaggagggcaccaagggcgaccccggcccccccggcgcccccggcaaggacggccccgccggcctgagaggcttccccggcgagagaggcctgcccggcaccgccggcggccccggcctgaagggcaacgagggccccagcggcccccccggccccgccggcagccccggcgagagaggcgccgccggcagcggcggccccatcggcccccccggcagacccggcccccagggcccccccggcgccgccggcgagaagggcgtgcccggcgagaagggccccatcggccccaccggcagagacggcgtgcagggccccgtgggcctgcccggccccgccggcccccccggcgtggccggcgaggacggcgacaagggcgaggtgggcgaccccggccagaagggcaccaagggcaacaagggcgagcacggcccccccggcccccccggccccatcggccccgtgggccagcccggcgccgccggcgccgacggcgagcccggcgccagaggcccccagggccacttcggcgccaagggcgacgagggcaccagaggcttcaacggcccccccggccccatcggcctgcagggcctgcccggccccagcggcgagaagggcgagaccggcgacgtgggccccatgggcccccccggcccccccggccccagaggccccgccggccccaacggcgccgacggcccccagggcccccccggcggcgtgggcaacctgggcccccccggcgagaagggcgagcccggcgagagcggcagccccggcatccagggcgagcccggcgtgaagggccccagaggcgagagaggcgagaagggcgagagcggccagcccggcgagcccggcccccccggccccaagggccccaccggcgacgacggccccaagggcaaccccggccccgtgggcttccccggcgaccccggcccccccggcgagggcggccccagaggccaggacggcgccaagggcgacagaggcgaggacggcgagcccggccagcccggcagccccggccccaccggcgagaacggcccccccggccccctgggcaagagaggccccgccggcagccccggcagcgagggcagacagggcggcaagggcgccaagggcgaccccggcgccatcggcgcccccggcaagaccggccccgtgggccccgccggccccgccggcaagcccggccccgacggcctgagaggcctgcccggcagcgtgggccagcagggcagacccggcgccaccggccaggccggcccccccggccccgtgggcccccccggcctgcccggcctgagaggcgacgccggcgccaagggcgagaagggccaccccggcctgatcggcctgatcggcccccccggcgagcagggcgagaagggcgacagaggcctgcccggcccccagggcagccccggccagaagggcgagatgggcatccccggcgccagcggccccatcggccccggcggcccccccggcctgcccggccccgccggccccaagggcgccaagggcgccaccggccccggcggccccaagggcgagaagggcgtgcagggcccccccggccaccccggcccccccggcgaggtgatccagcccctgcccatccagatgcccaagaagaccagaagaagcgtggacggcagcagactgatgcaggaggacgaggccatccccaccggcggcgcccccggcagccccggcggcctggaggagatcttcggcagcctggacagcctgagagaggagatcgagcagatgagaagacccaccggcacccaggacagccccgccagaacctgccaggacctgaagctgtgccaccccgagctgcccgacggcgagtactgggtggaccccaaccagggctgcgccagagacgccttcagagtgttctgcaacttcaccgccggcggcgagacctgcgtgacccccagagacgacgtgacccagttcagctacgtggacagcgagggcagccccgtgggcgtggtgcagctgaccttcctgagactgctgagcgtgagcgcccaccaggacgtgagctacccctgcagcggcgccgccagagacggccccctgagactgagaggcgccaacgaggacgagctgagccccgagaccagcccctacgtgaaggagttcagagacggctgccagacccagcagggcagaaccgtgctggaggtgagaacccccgtgctggagcagctgcccgtgctggacgccagcttcagcgacctgggcgccccccccagaagaggcggcgtgctgctgggccccgtgtgcttcatgggctag

SEQ ID NO: 232682 - DNA, 5031 bp, Artificial Sequence
  derived and/or modified sequence
atggagagatgcagcagatgccacagactgctgctgctgctgcccctggtgctgggcctgagcgccgcccccggctgggccggcgccccccccgtggacgtgctgagagccctgagattccccagcctgcccgacggcgtgagaagagccaagggcatctgccccgccgacgtggcctacagagtggccagacccgcccagctgagcgcccccaccagacagctgttccccggcggcttccccaaggacttcagcctgctgaccgtggtgagaaccagacccggcctgcaggcccccctgctgaccctgtacagcgcccagggcgtgagacagctgggcctggagctgggcccccccgtgagattcctgtacgaggaccagaccggcagaccccagccccccagccagcccgtgttcagaggcctgagcctggccgacggcaagtggcacagagtggccgtggccgtgaagggccagagcgtgaccctgatcgtggactgcaagaagagagtgaccagacccctgcccagaagcgccagacccgtgctggacacccacggcgtgatcatcttcggcgccagaatcctggacgaggaggtgttcgagggcgacgtgcaggagctggccatcgtgcccggcgtgcaggccgcctacgagagctgcgagcagaaggagctggagtgcgagggcggccagagagagagaccccagaaccagcagccccacagagcccagagaagcccccagcagcagcccagcagactgcacagaccccagaaccaggagccccagagccagcccaccgagagcctgtactacgactacaagcccccctactacgacgtgatgaccaccggcaccacccccgactaccaggaccccacccccggcgaggaggaggagatcctggagagcagcctgctgccccccctggaggaggccgcccacggccccagaggcctgaagggcgagaagggcgagcccgccgtgctggagcccggcatgctggtggagggcccccccggccccgagggccccgccggcctgatcggcccccccggcatccagggcaaccccggccccgtgggcgaccccggcgagagaggcccccccggcagagccggcctgcccggcagcgacggcgcccccggcccccccggcaccagcctgatgctgcccttcagattcggcagcggcggcggcgacaagggccccgtggtggccgcccaggaggcccaggcccaggccatcctgcagcaggccagactggccctgagaggcccccccggccccatgggctacaccggcagacccggccccctgggccagcccggcagccccggcctgaagggcgagagcggcgacctgggcccccagggccccagaggcccccagggcctgaccggcccccccggcaaggccggcagaagaggcagagccggcgccgacggcgccagaggcatgcccggcgaccccggcgtgaagggcgacagaggcttcgacggcctgcccggcctgcccggcgagaagggccacagaggcgacaccggcgcccagggcctgcccggcccccccggcgaggacggcgagagaggcgacgacggcgagatcggccccagaggcctgcccggcgagagcggccccagaggcctgctgggccccaagggcccccccggcatccccggcccccccggcgtgagaggcatggacggcccccagggccccaagggcagcctgggcccccagggcgagcccggcccccccggccagcagggcacccccggcacccagggcctgcccggcccccagggcgccatcggcccccacggcgagaagggcccccagggcaagcccggcctgcccggcatgcccggcagcgacggcccccccggccaccccggcaaggagggcccccccggcaccaagggcaaccagggccccagcggcccccagggccccctgggctaccccggccccagaggcgtgaagggcgtggacggcatcagaggcctgaagggccacaagggcgagaagggcgaggacggcttccccggcttcaagggcgacatcggcgtgaagggcgacagaggcgaggtgggcgtgcccggcagcagaggcgaggacggccccgagggccccaagggcagaaccggccccaccggcgaccccggcccccccggcctgatgggcgagaagggcaagctgggcgtgcccggcctgcccggctaccccggcagacagggccccaagggcagcctgggcttccccggcttccccggcgccagcggcgagaagggcgccagaggcctgagcggcaagagcggccccagaggcgagagaggccccaccggccccagaggccagagaggccccagaggcgccaccggcaagagcggcgccaagggcaccagcggcggcgacggcccccacggcccccccggcgagagaggcctgcccggcccccagggccccaacggcttccccggccccaagggcccccccggcccccccggcaaggacggcctgcccggccaccccggccagagaggcgaggtgggcttccagggcaagaccggcccccccggcccccccggcgtggtgggcccccagggcgccgccggcgagaccggccccatgggcgagagaggccaccccggcccccccggcccccccggcgagcagggcctgcccggcaccgccggcaaggagggcaccaagggcgaccccggcccccccggcgcccccggcaaggacggccccgccggcctgagaggcttccccggcgagagaggcctgcccggcaccgccggcggccccggcctgaagggcaacgagggccccagcggcccccccggccccgccggcagccccggcgagagaggcgccgccggcagcggcggccccatcggcccccccggcagacccggcccccagggcccccccggcgccgccggcgagaagggcgtgcccggcgagaagggccccatcggccccaccggcagagacggcgtgcagggccccgtgggcctgcccggccccgccggcccccccggcgtggccggcgaggacggcgacaagggcgaggtgggcgaccccggccagaagggcaccaagggcaacaagggcgagcacggcccccccggcccccccggccccatcggccccgtgggccagcccggcgccgccggcgccgacggcgagcccggcgccagaggcccccagggccacttcggcgccaagggcgacgagggcaccagaggcttcaacggcccccccggccccatcggcctgcagggcctgcccggccccagcggcgagaagggcgagaccggcgacgtgggccccatgggcccccccggcccccccggccccagaggccccgccggccccaacggcgccgacggcccccagggcccccccggcggcgtgggcaacctgggcccccccggcgagaagggcgagcccggcgagagcggcagccccggcatccagggcgagcccggcgtgaagggccccagaggcgagagaggcgagaagggcgagagcggccagcccggcgagcccggcccccccggccccaagggccccaccggcgacgacggccccaagggcaaccccggccccgtgggcttccccggcgaccccggcccccccggcgagggcggccccagaggccaggacggcgccaagggcgacagaggcgaggacggcgagcccggccagcccggcagccccggccccaccggcgagaacggcccccccggccccctgggcaagagaggccccgccggcagccccggcagcgagggcagacagggcggcaagggcgccaagggcgaccccggcgccatcggcgcccccggcaagaccggccccgtgggccccgccggccccgccggcaagcccggccccgacggcctgagaggcctgcccggcagcgtgggccagcagggcagacccggcgccaccggccaggccggcccccccggccccgtgggcccccccggcctgcccggcctgagaggcgacgccggcgccaagggcgagaagggccaccccggcctgatcggcctgatcggcccccccggcgagcagggcgagaagggcgacagaggcctgcccggcccccagggcagccccggccagaagggcgagatgggcatccccggcgccagcggccccatcggccccggcggcccccccggcctgcccggccccgccggccccaagggcgccaagggcgccaccggccccggcggccccaagggcgagaagggcgtgcagggcccccccggccaccccggcccccccggcgaggtgatccagcccctgcccatccagatgcccaagaagaccagaagaagcgtggacggcagcagactgatgcaggaggacgaggccatccccaccggcggcgcccccggcagccccggcggcctggaggagatcttcggcagcctggacagcctgagagaggagatcgagcagatgagaagacccaccggcacccaggacagccccgccagaacctgccaggacctgaagctgtgccaccccgagctgcccgacggcgagtactgggtggaccccaaccagggctgcgccagagacgccttcagagtgttctgcaacttcaccgccggcggcgagacctgcgtgacccccagagacgacgtgacccagttcagctacgtggacagcgagggcagccccgtgggcgtggtgcagctgaccttcctgagactgctgagcgtgagcgcccaccaggacgtgagctacccctgcagcggcgccgccagagacggccccctgagactgagaggcgccaacgaggacgagctgagccccgagaccagcccctacgtgaaggagttcagagacggctgccagacccagcagggcagaaccgtgctggaggtgagaacccccgtgctggagcagctgcccgtgctggacgccagcttcagcgacctgggcgccccccccagaagaggcggcgtgctgctgggccccgtgtgcttcatgggctag

SEQ ID NO: 232683 - DNA, 5031 bp, Artificial Sequence
  derived and/or modified sequence
atggagagatgcagcagatgccacagactgctgctgctgctgcccctggtgctgggcctgagcgccgcccccggctgggccggcgccccccccgtggacgtgctgagagccctgagattccccagcctgcccgacggcgtgagaagagccaagggcatctgccccgccgacgtggcctacagagtggccagacccgcccagctgagcgcccccaccagacagctgttccccggcggcttccccaaggacttcagcctgctgaccgtggtgagaaccagacccggcctgcaggcccccctgctgaccctgtacagcgcccagggcgtgagacagctgggcctggagctgggcagacccgtgagattcctgtacgaggaccagaccggcagaccccagccccccagccagcccgtgttcagaggcctgagcctggccgacggcaagtggcacagagtggccgtggccgtgaagggccagagcgtgaccctgatcgtggactgcaagaagagagtgaccagacccctgcccagaagcgccagacccgtgctggacacccacggcgtgatcatcttcggcgccagaatcctggacgaggaggtgttcgagggcgacgtgcaggagctggccatcgtgcccggcgtgcaggccgcctacgagagctgcgagcagaaggagctggagtgcgagggcggccagagagagagaccccagaaccagcagccccacagagcccagagaagcccccagcagcagcccagcagactgcacagaccccagaaccaggagccccagagccagcccaccgagagcctgtactacgactacaagcccccctactacgacgtgatgaccaccggcaccacccccgactaccaggaccccacccccggcgaggaggaggagatcctggagagcagcctgctgccccccctggaggaggccgcccacggccccagaggcctgaagggcgagaagggcgagcccgccgtgctggagcccggcatgctggtggagggcccccccggccccgagggccccgccggcctgatcggcccccccggcatccagggcaaccccggccccgtgggcgaccccggcgagagaggcccccccggcagagccggcctgcccggcagcgacggcgcccccggcccccccggcaccagcctgatgctgcccttcagattcggcagcggcggcggcgacaagggccccgtggtggccgcccaggaggcccaggcccaggccatcctgcagcaggccagactggccctgagaggcccccccggccccatgggctacaccggcagacccggccccctgggccagcccggcagccccggcctgaagggcgagagcggcgacctgggcccccagggccccagaggcccccagggcctgaccggcccccccggcaaggccggcagaagaggcagagccggcgccgacggcgccagaggcatgcccggcgaccccggcgtgaagggcgacagaggcttcgacggcctgcccggcctgcccggcgagaagggccacagaggcgacaccggcgcccagggcctgcccggcccccccggcgaggacggcgagagaggcgacgacggcgagatcggccccagaggcctgcccggcgagagcggccccagaggcctgctgggccccaagggcccccccggcatccccggcccccccggcgtgagaggcatggacggcccccagggccccaagggcagcctgggcccccagggcgagcccggcccccccggccagcagggcacccccggcacccagggcctgcccggcccccagggcgccatcggcccccacggcgagaagggcccccagggcaagcccggcctgcccggcatgcccggcagcgacggcccccccggccaccccggcaaggagggcccccccggcaccaagggcaaccagggccccagcggcccccagggccccctgggctaccccggccccagaggcgtgaagggcgtggacggcatcagaggcctgaagggccacaagggcgagaagggcgaggacggcttccccggcttcaagggcgacatcggcgtgaagggcgacagaggcgaggtgggcgtgcccggcagcagaggcgaggacggccccgagggccccaagggcagaaccggccccaccggcgaccccggcccccccggcctgatgggcgagaagggcaagctgggcgtgcccggcctgcccggctaccccggcagacagggccccaagggcagcctgggcttccccggcttccccggcgccagcggcgagaagggcgccagaggcctgagcggcaagagcggccccagaggcgagagaggccccaccggccccagaggccagagaggccccagaggcgccaccggcaagagcggcgccaagggcaccagcggcggcgacggcccccacggcccccccggcgagagaggcctgcccggcccccagggccccaacggcttccccggccccaagggcccccccggcccccccggcaaggacggcctgcccggccaccccggccagagaggcgaggtgggcttccagggcaagaccggcccccccggcccccccggcgtggtgggcccccagggcgccgccggcgagaccggccccatgggcgagagaggccaccccggcccccccggcccccccggcgagcagggcctgcccggcaccgccggcaaggagggcaccaagggcgaccccggcccccccggcgcccccggcaaggacggccccgccggcctgagaggcttccccggcgagagaggcctgcccggcaccgccggcggccccggcctgaagggcaacgagggccccagcggcccccccggccccgccggcagccccggcgagagaggcgccgccggcagcggcggccccatcggcccccccggcagacccggcccccagggcccccccggcgccgccggcgagaagggcgtgcccggcgagaagggccccatcggccccaccggcagagacggcgtgcagggccccgtgggcctgcccggccccgccggcccccccggcgtggccggcgaggacggcgacaagggcgaggtgggcgaccccggccagaagggcaccaagggcaacaagggcgagcacggcccccccggcccccccggccccatcggccccgtgggccagcccggcgccgccggcgccgacggcgagcccggcgccagaggcccccagggccacttcggcgccaagggcgacgagggcaccagaggcttcaacggcccccccggccccatcggcctgcagggcctgcccggccccagcggcgagaagggcgagaccggcgacgtgggccccatgggcccccccggcccccccggccccagaggccccgccggccccaacggcgccgacggcccccagggcccccccggcggcgtgggcaacctgggcccccccggcgagaagggcgagcccggcgagagcggcagccccggcatccagggcgagcccggcgtgaagggccccagaggcgagagaggcgagaagggcgagagcggccagcccggcgagcccggcccccccggccccaagggccccaccggcgacgacggccccaagggcaaccccggccccgtgggcttccccggcgaccccggcccccccggcgagggcggccccagaggccaggacggcgccaagggcgacagaggcgaggacggcgagcccggccagcccggcagccccggccccaccggcgagaacggcccccccggccccctgggcaagagaggccccgccggcagccccggcagcgagggcagacagggcggcaagggcgccaagggcgaccccggcgccatcggcgcccccggcaagaccggccccgtgggccccgccggccccgccggcaagcccggccccgacggcctgagaggcctgcccggcagcgtgggccagcagggcagacccggcgccaccggccaggccggcccccccggccccgtgggcccccccggcctgcccggcctgagaggcgacgccggcgccaagggcgagaagggccaccccggcctgatcggcctgatcggcccccccggcgagcagggcgagaagggcgacagaggcctgcccggcccccagggcagccccggccagaagggcgagatgggcatccccggcgccagcggccccatcggccccggcggcccccccggcctgcccggccccgccggccccaagggcgccaagggcgccaccggccccggcggccccaagggcgagaagggcgtgcagggcccccccggccaccccggcccccccggcgaggtgatccagcccctgcccatccagatgcccaagaagaccagaagaagcgtggacggcagcagactgatgcaggaggacgaggccatccccaccggcggcgcccccggcagccccggcggcctggaggagatcttcggcagcctggacagcctgagagaggagatcgagcagatgagaagacccaccggcacccaggacagccccgccagaacctgccaggacctgaagctgtgccaccccgagctgcccgacggcgagtactgggtggaccccaaccagggctgcgccagagacgccttcagagtgttctgcaacttcaccgccggcggcgagacctgcgtgacccccagagacgacgtgacccagttcagctacgtggacagcgagggcagccccgtgggcgtggtgcagctgaccttcctgagactgctgagcgtgagcgcccaccaggacgtgagctacccctgcagcggcgccgccagagacggccccctgagactgagaggcgccaacgaggacgagctgagccccgagaccagcccctacgtgaaggagttcagagacggctgccagacccagcagggcagaaccgtgctggaggtgagaacccccgtgctggagcagctgcccgtgctggacgccagcttcagcgacctgggcgccccccccagaagaggcggcgtgctgctgggccccgtgtgcttcatgggctag

SEQ ID NO: 232684 - DNA, 5031 bp, Artificial Sequence
  derived and/or modified sequence
atggagagatgcagcagatgccacagactgctgctgctgctgcccctggtgctgggcctgagcgccgcccccggctgggccggcgccccccccgtggacgtgctgagagccctgagattccccagcctgcccgacggcgtgagaagagccaagggcatctgccccgccgacgtggcctacagagtggccagacccgcccagctgagcgcccccaccagacagctgttccccggcggcttccccaaggacttcagcctgctgaccgtggtgagaaccagacccggcctgcaggcccccctgctgaccctgtacagcgcccagggcgtgagacagctgggcctggagctgggcagacccgtgagattcctgtacgaggaccagaccggcagaccccagccccccagccagcccgtgttcagaggcctgagcctggccgacggcaagtggcacagagtggccgtggccgtgaagggccagagcgtgaccctgatcgtggactgcaagaagagagtgaccagacccctgcccagaagcgccagacccgtgctggacacccacggcgtgatcatcttcggcgccagaatcctggacgaggaggtgttcgagggcgacgtgcaggagctggccatcgtgcccggcgtgcaggccgcctacgagagctgcgagcagaaggagctggagtgcgagggcggccagagagagagaccccagaaccagcagccccacagagcccagagaagcccccagcagcagcccagcagactgcacagaccccagaaccaggagccccagagccagcccaccgagagcctgtactacgactacgagcccccctactacgacgtgatgaccaccggcaccacccccgactaccaggaccccacccccggcgaggaggaggagatcctggagagcagcctgctgccccccctggaggaggccgcccacggccccagaggcctgaagggcgagaagggcgagcccgccgtgctggagcccggcatgctggtggagggcccccccggccccgagggccccgccggcctgatcggcccccccggcatccagggcaaccccggccccgtgggcgaccccggcgagagaggcccccccggcagagccggcctgcccggcagcgacggcgcccccggcccccccggcaccagcctgatgctgcccttcagattcggcagcggcggcggcgacaagggccccgtggtggccgcccaggaggcccaggcccaggccatcctgcagcaggccagactggccctgagaggcccccccggccccatgggctacaccggcagacccggccccctgggccagcccggcagccccggcctgaagggcgagagcggcgacctgggcccccagggccccagaggcccccagggcctgaccggcccccccggcaaggccggcagaagaggcagagccggcgccgacggcgccagaggcatgcccggcgaccccggcgtgaagggcgacagaggcttcgacggcctgcccggcctgcccggcgagaagggccacagaggcgacaccggcgcccagggcctgcccggcccccccggcgaggacggcgagagaggcgacgacggcgagatcggccccagaggcctgcccggcgagagcggccccagaggcctgctgggccccaagggcccccccggcatccccggcccccccggcgtgagaggcatggacggcccccagggccccaagggcagcctgggcccccagggcgagcccggcccccccggccagcagggcacccccggcacccagggcctgcccggcccccagggcgccatcggcccccacggcgagaagggcccccagggcaagcccggcctgcccggcatgcccggcagcgacggcccccccggccaccccggcaaggagggcccccccggcaccaagggcaaccagggccccagcggcccccagggccccctgggctaccccggccccagaggcgtgaagggcgtggacggcatcagaggcctgaagggccacaagggcgagaagggcgaggacggcttccccggcttcaagggcgacatcggcgtgaagggcgacagaggcgaggtgggcgtgcccggcagcagaggcgaggacggccccgagggccccaagggcagaaccggccccaccggcgaccccggcccccccggcctgatgggcgagaagggcaagctgggcgtgcccggcctgcccggctaccccggcagacagggccccaagggcagcctgggcttccccggcttccccggcgccagcggcgagaagggcgccagaggcctgagcggcaagagcggccccagaggcgagagaggccccaccggccccagaggccagagaggccccagaggcgccaccggcaagagcggcgccaagggcaccagcggcggcgacggcccccacggcccccccggcgagagaggcctgcccggcccccagggccccaacggcttccccggccccaagggccccctgggcccccccggcaaggacggcctgcccggccaccccggccagagaggcgaggtgggcttccagggcaagaccggcccccccggcccccccggcgtggtgggcccccagggcgccgccggcgagaccggccccatgggcgagagaggccaccccggcccccccggcccccccggcgagcagggcctgcccggcaccgccggcaaggagggcaccaagggcgaccccggcccccccggcgcccccggcaaggacggccccgccggcctgagaggcttccccggcgagagaggcctgcccggcaccgccggcggccccggcctgaagggcaacgagggccccagcggcccccccggccccgccggcagccccggcgagagaggcgccgccggcagcggcggccccatcggcccccccggcagacccggcccccagggcccccccggcgccgccggcgagaagggcgtgcccggcgagaagggccccatcggccccaccggcagagacggcgtgcagggccccgtgggcctgcccggccccgccggcccccccggcgtggccggcgaggacggcgacaagggcgaggtgggcgaccccggccagaagggcaccaagggcaacaagggcgagcacggcccccccggcccccccggccccatcggccccgtgggccagcccggcgccgccggcgccgacggcgagcccggcgccagaggcccccagggccacttcggcgccaagggcgacgagggcaccagaggcttcaacggcccccccggccccatcggcctgcagggcctgcccggccccagcggcgagaagggcgagaccggcgacgtgggccccatgggcccccccggcccccccggccccagaggccccgccggccccaacggcgccgacggcccccagggcccccccggcggcgtgggcaacctgggcccccccggcgagaagggcgagcccggcgagagcggcagccccggcatccagggcgagcccggcgtgaagggccccagaggcgagagaggcgagaagggcgagagcggccagcccggcgagcccggcccccccggccccaagggccccaccggcgacgacggccccaagggcaaccccggccccgtgggcttccccggcgaccccggcccccccggcgagggcggccccagaggccaggacggcgccaagggcgacagaggcgaggacggcgagcccggccagcccggcagccccggccccaccggcgagaacggcccccccggccccctgggcaagagaggccccgccggcagccccggcagcgagggcagacagggcggcaagggcgccaagggcgaccccggcgccatcggcgcccccggcaagaccggccccgtgggccccgccggccccgccggcaagcccggccccgacggcctgagaggcctgcccggcagcgtgggccagcagggcagacccggcgccaccggccaggccggcccccccggccccgtgggcccccccggcctgcccggcctgagaggcgacgccggcgccaagggcgagaagggccaccccggcctgatcggcctgatcggcccccccggcgagcagggcgagaagggcgacagaggcctgcccggcccccagggcagccccggccagaagggcgagatgggcatccccggcgccagcggccccatcggccccggcggcccccccggcctgcccggccccgccggccccaagggcgccaagggcgccaccggccccggcggccccaagggcgagaagggcgtgcagggcccccccggccaccccggcccccccggcgaggtgatccagcccctgcccatccagatgcccaagaagaccagaagaagcgtggacggcagcagactgatgcaggaggacgaggccatccccaccggcggcgcccccggcagccccggcggcctggaggagatcttcggcagcctggacagcctgagagaggagatcgagcagatgagaagacccaccggcacccaggacagccccgccagaacctgccaggacctgaagctgtgccaccccgagctgcccgacggcgagtactgggtggaccccaaccagggctgcgccagagacgccttcagagtgttctgcaacttcaccgccggcggcgagacctgcgtgacccccagagacgacgtgacccagttcagctacgtggacagcgagggcagccccgtgggcgtggtgcagctgaccttcctgagactgctgagcgtgagcgcccaccaggacgtgagctacccctgcagcggcgccgccagagacggccccctgagactgagaggcgccaacgaggacgagctgagccccgagaccagcccctacgtgaaggagttcagagacggctgccagacccagcagggcagaaccgtgctggaggtgagaacccccgtgctggagcagctgcccgtgctggacgccagcttcagcgacctgggcgccccccccagaagaggcggcgtgctgctgggccccgtgtgcttcatgggctag

SEQ ID NO: 232685 - DNA, 4968 bp, Artificial Sequence
  derived and/or modified sequence
atggagagatgcagcagatgccacagactgctgctgctgctgcccctggtgctgggcctgagcgccgcccccggctgggccggcgccccccccgtggacgtgctgagagccctgagattccccagcctgcccgacggcgtgagaagagccaagggcatctgccccgccgacgtggcctacagagtggccagacccgcccagctgagcgcccccaccagacagctgttccccggcggcttccccaaggacttcagcctgctgaccgtggtgagaaccagacccggcctgcaggcccccctgctgaccctgtacagcgcccagggcgtgagacagctgggcctggagctgggcccccccgtgagattcctgtacgaggaccagaccggcagaccccagccccccagccagcccgtgttcagaggcctgagcctggccgacggcaagtggcacagagtggccgtggccgtgaagggccagagcgtgaccctgatcgtggactgcaagaagagagtgaccagacccctgcccagaagcgccagacccgtgctggacacccacggcgtgatcatcttcggcgccagaatcctggacgaggaggtgttcgagggcgacgtgcaggagctggccatcgtgcccggcgtgcaggccgcctacgagagctgcgagcagaaggagctggagtgcgagggcggccagagagagagaccccagaaccagcagccccacagagcccagagaagcccccagcagcagcccagcagactgcacagaccccagaaccaggagccccagagccagcccaccgagagcctgtactacgactacaagcccccctactacgacgtgatgaccaccggcaccacccccgactaccaggccgcccacggccccagaggcctgaagggcgagaagggcgagcccgccgtgctggagcccggcatgctggtggagggcccccccggccccgagggccccgccggcctgatcggcccccccggcatccagggcaaccccggccccgtgggcgaccccggcgagagaggcccccccggcagagccggcctgcccggcagcgacggcgcccccggcccccccggcaccagcctgatgctgcccttcagattcggcagcggcggcggcgacaagggccccgtggtggccgcccaggaggcccaggcccaggccatcctgcagcaggccagactggccctgagaggcccccccggccccatgggctacaccggcagacccggccccctgggccagcccggcagccccggcctgaagggcgagagcggcgacctgggcccccagggccccagaggcccccagggcctgaccggcccccccggcaaggccggcagaagaggcagagccggcgccgacggcgccagaggcatgcccggcgaccccggcgtgaagggcgacagaggcttcgacggcctgcccggcctgcccggcgagaagggccacagaggcgacaccggcgcccagggcctgcccggcccccccggcgaggacggcgagagaggcgacgacggcgagatcggccccagaggcctgcccggcgagagcggccccagaggcctgctgggccccaagggcccccccggcatccccggcccccccggcgtgagaggcatggacggcccccagggccccaagggcagcctgggcccccagggcgagcccggcccccccggccagcagggcacccccggcacccagggcctgcccggcccccagggcgccatcggcccccacggcgagaagggcccccagggcaagcccggcctgcccggcatgcccggcagcgacggcccccccggccaccccggcaaggagggcccccccggcaccaagggcaaccagggccccagcggcccccagggccccctgggctaccccggccccagaggcgtgaagggcgtggacggcatcagaggcctgaagggccacaagggcgagaagggcgaggacggcttccccggcttcaagggcgacatcggcgtgaagggcgacagaggcgaggtgggcgtgcccggcagcagaggcgaggacggccccgagggccccaagggcagaaccggccccaccggcgaccccggcccccccggcctgatgggcgagaagggcaagctgggcgtgcccggcctgcccggctaccccggcagacagggccccaagggcagcctgggcttccccggcttccccggcgccagcggcgagaagggcgccagaggcctgagcggcaagagcggccccagaggcgagagaggccccaccggccccagaggccagagaggccccagaggcgccaccggcaagagcggcgccaagggcaccagcggcggcgacggcccccacggcccccccggcgagagaggcctgcccggcccccagggccccaacggcttccccggccccaagggcccccccggcccccccggcaaggacggcctgcccggccaccccggccagagaggcgaggtgggcttccagggcaagaccggcccccccggcccccccggcgtggtgggcccccagggcgccgccggcgagaccggccccatgggcgagagaggccaccccggcccccccggcccccccggcgagcagggcctgcccggcaccgccggcaaggagggcaccaagggcgaccccggcccccccggcgcccccggcaaggacggccccgccggcctgagaggcttccccggcgagagaggcctgcccggcaccgccggcggccccggcctgaagggcaacgagggccccagcggcccccccggccccgccggcagccccggcgagagaggcgccgccggcagcggcggccccatcggcccccccggcagacccggcccccagggcccccccggcgccgccggcgagaagggcgtgcccggcgagaagggccccatcggccccaccggcagagacggcgtgcagggccccgtgggcctgcccggccccgccggcccccccggcgtggccggcgaggacggcgacaagggcgaggtgggcgaccccggccagaagggcaccaagggcaacaagggcgagcacggcccccccggcccccccggccccatcggccccgtgggccagcccggcgccgccggcgccgacggcgagcccggcgccagaggcccccagggccacttcggcgccaagggcgacgagggcaccagaggcttcaacggcccccccggccccatcggcctgcagggcctgcccggccccagcggcgagaagggcgagaccggcgacgtgggccccatgggcccccccggcccccccggccccagaggccccgccggccccaacggcgccgacggcccccagggcccccccggcggcgtgggcaacctgggcccccccggcgagaagggcgagcccggcgagagcggcagccccggcatccagggcgagcccggcgtgaagggccccagaggcgagagaggcgagaagggcgagagcggccagcccggcgagcccggcccccccggccccaagggccccaccggcgacgacggccccaagggcaaccccggccccgtgggcttccccggcgaccccggcccccccggcgagggcggccccagaggccaggacggcgccaagggcgacagaggcgaggacggcgagcccggccagcccggcagccccggccccaccggcgagaacggcccccccggccccctgggcaagagaggccccgccggcagccccggcagcgagggcagacagggcggcaagggcgccaagggcgaccccggcgccatcggcgcccccggcaagaccggccccgtgggccccgccggccccgccggcaagcccggccccgacggcctgagaggcctgcccggcagcgtgggccagcagggcagacccggcgccaccggccaggccggcccccccggccccgtgggcccccccggcctgcccggcctgagaggcgacgccggcgccaagggcgagaagggccaccccggcctgatcggcctgatcggcccccccggcgagcagggcgagaagggcgacagaggcctgcccggcccccagggcagccccggccagaagggcgagatgggcatccccggcgccagcggccccatcggccccggcggcccccccggcctgcccggccccgccggccccaagggcgccaagggcgccaccggccccggcggccccaagggcgagaagggcgtgcagggcccccccggccaccccggcccccccggcgaggtgatccagcccctgcccatccagatgcccaagaagaccagaagaagcgtggacggcagcagactgatgcaggaggacgaggccatccccaccggcggcgcccccggcagccccggcggcctggaggagatcttcggcagcctggacagcctgagagaggagatcgagcagatgagaagacccaccggcacccaggacagccccgccagaacctgccaggacctgaagctgtgccaccccgagctgcccgacggcgagtactgggtggaccccaaccagggctgcgccagagacgccttcagagtgttctgcaacttcaccgccggcggcgagacctgcgtgacccccagagacgacgtgacccagttcagctacgtggacagcgagggcagccccgtgggcgtggtgcagctgaccttcctgagactgctgagcgtgagcgcccaccaggacgtgagctacccctgcagcggcgccgccagagacggccccctgagactgagaggcgccaacgaggacgagctgagccccgagaccagcccctacgtgaaggagttcagagacggctgccagacccagcagggcagaaccgtgctggaggtgagaacccccgtgctggagcagctgcccgtgctggacgccagcttcagcgacctgggcgccccccccagaagaggcggcgtgctgctgggccccgtgtgcttcatgggctag

SEQ ID NO: 232686 - DNA, 4953 bp, Artificial Sequence
  derived and/or modified sequence
atggaacgttgttccaggtgccatcggcttctcctgctcctccccttggtcctgggtttaagcgctgctccaggttgggcaggcgccccgcctgtagacgtgctgagagcccttaggtttccatccctgcctgacggcgttcggcgggcgaaggggatttgtcctgcagatgtagcctatcgggtggctaggccagcgcaactctccgctcccacgaggcaactcttccctggtggcttccccaaagatttctctttgctgaccgtggttcgaacgcgcccaggcctccaggcgcctttacttaccttatacagtgcacagggcgtcagacagctcggactcgaactcgggaggccagttcggtttctgtacgaggaccagaccggccggccacaacccccaagccagccagtcttcagggggctaagtctggccgacggtaaatggcatcgggtggctgtggctgtgaaaggccagtcagtcaccttgatcgttgattgcaagaaacgagtaaccaggcctctaccacgttctgcgaggccagtactggacacccacggcgtcatcatttttggagctcggattctcgatgaggaggtgttcgagggagacgttcaggaactggcgatagtgcccggcgtgcaggccgcttatgagagttgtgaacagaaagagctggagtgtgagggtgggcagcgggaaagaccccagaatcagcagcctcaccgcgcacaaaggagtccacagcagcagccaagtaggcttcatcgtccccagaatcaggagcctcagtctcaggatcctactcccggtgaggaggaagagattctggaatcatcgttgctgccaccactggaggaagcggcccatgggccaagaggcttgaagggagagaagggagagcctgcagtcctcgaaccggggatgctggtggaaggtccacccggtcccgaaggccccgcaggcctcatcggtccacctggcatccagggaaacccaggtccggttggcgatcccggagagcgcgggccgcccggaagggccgggctccccggatctgatggggctcctggaccccccgggacctcactcatgctgccctttaggttcggttccggcggcggagacaaaggccccgtggtcgcagcgcaggaggcccaggcccaggccattctccagcaagcccggctagctctccgaggcccccccgggccaatgggctacaccgggcggcccgggcccctgggtcagccaggctcaccaggattaaagggagaatccggggatcttggcccccaggggcccagaggtccacagggactgactggcccacctggcaaagcaggcaggagaggaagggctggtgcagacggggctcggggtatgcctggcgacccaggggtcaagggggaccgcggtttcgacgggctgcctgggctccctggcgagaagggccataggggagatacaggggcccagggcctgccaggtcctccaggagaagatggcgagcggggagatgacggagaaattggcccaagaggattacccggcgaaagcggaccaagggggctattagggccaaagggcccaccaggaatccccgggcctccaggcgtgcgagggatggatggcccccaaggtccaaaaggctcccttgggccccagggcgaacccggacccccgggtcagcaggggacccctggaacgcaagggctgcccggcccccagggcgccatcgggccacacggcgagaagggcccccaaggcaagcctggtctgccaggaatgcctggatctgatggccccccgggccaccccggcaaagagggacccccagggacaaagggcaaccagggaccctctggccctcaaggccccttaggttatcctggtccacggggcgtgaagggcgtggatggtattcgcggactcaaaggtcacaagggggagaagggtgaggatggtttccccgggttcaaaggcgacataggcgtgaaaggcgacaggggggaggtgggggtgcctgggagtagaggggaagacggacctgaagggccaaagggcagaaccgggcccaccggcgatcctggtcctcccggactaatgggagagaagggtaagttaggggtcccggggcttcctggctaccctgggaggcagggccccaaaggctccttggggttcccaggcttccccggggcctcaggcgaaaagggcgcaagaggcctgtcgggaaaaagcggtccacggggagagagaggtccaacggggccaagaggacagcggggaccccgaggagcaactgggaaaagtggcgccaaggggacctcgggtggtgacggccctcacggcccacccggggagcggggcctgcccggacctcagggccccaacgggtttcccgggcccaaaggcccccctggaccccccggaaaggatgggctccctgggcaccctggacagcgtggtgaagtggggtttcaaggcaagacaggccccccagggcctccaggagtggttggaccccagggcgccgctggagagactggccccatgggcgaaagaggccaccctggccccccaggccctcccggggagcaaggcctccctggtacagctggtaaagaggggaccaaaggtgacccaggccctccgggcgctcctggaaaagacggtccagccgggttgcgcggatttcccggtgagagaggcttgccagggactgcaggggggccgggcctgaaaggtaatgagggaccttctgggccaccagggcctgccgggtcaccgggagaacgcggtgccgctggaagcggggggcccattggcccaccaggaagacctggaccacagggccccccgggagcagcaggagagaagggggttccaggagagaagggacctatcggtcctactggtcgggatggggttcaagggcccgtgggcctccccgggcctgctggcccccctggcgtggctggcgaagatggggacaagggcgaggtaggagaccccggccagaaagggaccaaagggaataagggcgagcatggacctcccggccctcccggacccatagggcccgtcggacaacccggcgccgctggcgccgatggagaacctggggctagaggcccacagggacatttcggggctaagggagacgaaggaacgcggggatttaatggtccccccgggcccatcggactccaaggactgcctggccctagcggtgagaaaggcgagaccggagacgttggaccaatgggcccacccggccctcccggaccgcggggaccagccggtcccaatggggcggacggaccacaggggccacccggcggggtgggtaaccttggccctcccggggaaaaaggagagccaggggagagcggctctccaggcattcaaggtgaacccggtgtgaaagggccccggggagagcggggcgagaaaggggaaagtgggcagcctggagagcccggcccaccaggccctaaggggccgacaggcgacgatggaccgaagggcaaccccggcccagtgggcttccccggcgaccccgggccgcctggagagggaggtcccagaggtcaggacggagctaagggtgaccggggagaggatggagagcccggccagccaggaagtccaggccccacaggggagaacggaccacctggcccactgggcaagcgcggcccagcaggttccccggggtccgagggtaggcaggggggcaaaggggccaagggagatcctggagccataggtgcaccggggaaaacaggacccgtgggccccgcaggacctgcaggcaagcctggtcccgacgggttaagaggtctgccagggagcgtcggacagcaggggagacccggggcaacaggacaggctggtcctcccggaccggtagggccccccggcttaccagggctaagaggcgacgccggagcaaagggagagaaaggccatccaggcctcatcggcctcatcggcccacccggcgagcagggtgagaaaggtgaccggggattgcccggcccgcaaggctccccaggccaaaaaggggagatggggatcccaggcgcaagtgggccaattggccccggtggccctcctggcctcccaggtcccgcaggacccaagggagcaaaaggcgccactgggccaggcggccctaagggcgaaaaaggagttcagggccctcccggtcacccagggccccctggagaagttatacagcccttgccgatacagatgcctaagaagacacgtcgctctgtcgatggctcacgactgatgcaggaggacgaagccatcccaacaggtggcgcaccggggtcacccggggggctcgaggagatcttcggatcactggattcccttagagaagagatcgagcaaatgcgtaggcctaccgggacacaagatagccccgctcggacttgccaggatctgaagctgtgccaccctgagcttcctgacggggagtactgggttgacccaaatcagggatgcgctcgagatgcattcagggtgttctgcaattttaccgccgggggggaaacctgcgtgactcctcgtgacgacgtgacccagtttagctatgtggattcagaaggaagccctgtcggtgttgtccaacttacatttcttcgcttattgagcgtctccgcccaccaggatgtctcatatccatgttctggggcagctagagacggccccctgagacttcgaggcgccaacgaagacgaattatcaccggagacctccccttacgtgaaagagtttcgcgacgggtgtcaaacccagcagggccgcacagtgcttgaagttcggacccccgtcctagagcaactgcctgtgcttgacgcgagtttttctgacctgggcgctcctcctcgtcgcgggggtgtcctgttggggccagtctgctttatgggctag

SEQ ID NO: 232687 - DNA, 4968 bp, Artificial Sequence
  derived and/or modified sequence
atggagcgctgttcacgctgtcatcggttgttactactgttgcctctggttctgggcctgtcagcggcaccagggtgggcaggggcacccccagtcgatgtgcttagagctttaaggtttccctcactccctgacggcgtgcggagggctaaaggaatatgccctgcggacgtggcttatcgagttgcacgcccggcgcagctcagcgcccctacacggcagttattcccaggagggttccctaaagacttctccctgctgaccgtggtgcgcaccaggccgggactccaggcccccctgttgaccctgtacagcgcccagggcgtgcgtcagttgggcctcgaactgggccggccagtacgatttctgtatgaggatcaaaccggccgcccgcaaccccccagtcaacccgtgtttagaggactatctctggccgacggaaagtggcaccgcgtggcagtggctgtgaagggccagagtgttaccttaattgtggattgcaagaaaagagtgaccaggccgttgccacgcagcgcccggcctgtgctcgatacccatggtgtcataattttcggtgcaagaatcttggatgaggaagtattcgagggagacgttcaggagctcgccatagtaccaggggtgcaagccgcttatgagagctgcgagcagaaggagttagaatgtgaggggggacaacgagagcgcccacaaaaccagcagccccatcgtgcccagcgttctcctcaacaacagccgtcccgcttgcatcggccacagaatcaggaaccacaatcccagccaaccgaatccctgtattatgattatgaaccgccatactacgatgtcatgaccaccgggacgaccccagattatcaggctgcacatggccctcgaggcttaaagggagagaaaggggaaccagcggtgctggaacccgggatgctggtagaagggcccccaggacctgagggccctgctggacttatcggtccccctggcatccagggtaatcctggacccgtgggtgatccaggcgaaaggggtccaccggggcgtgctggactcccgggttctgatggcgcacccggccctcccggcaccagtctgatgttgcccttcaggttcggaagtggtggtggcgataagggacccgtggtagcagcccaggaagcccaagctcaggccatactgcagcaagctcgactggccctgagaggcccacctggtcccatgggctacacggggcgcccggggcctctgggacagcccggctcacccggcttgaaaggagaatctggggaccttggtccccagggtcctcgaggaccccagggcttaacaggccctcccggaaaagccggacggcggggacgggcaggggccgacggggcccgcggaatgcccggcgaccctggcgtgaaaggtgaccggggtttcgacgggctcccaggcctgcccggggaaaaaggccatagaggggacactggagcccaaggtctccccgggcctcccggtgaagacggagagcgcggagatgacggagagattggacccagaggcttacctggggaatctggtccgcgcggtctactgggccccaaggggccacctggtattccgggtcctcccggcgtgcggggaatggatggcccacaaggccctaaaggttcgcttggaccccagggcgaaccagggccgccaggccagcagggaacacccggtacgcagggcctgccgggcccacagggtgcgatcggcccacacggggaaaaggggcctcaaggtaagccggggttaccaggcatgccaggtagcgatggaccacccggccaccccggcaaagagggtccaccgggaacaaaggggaaccagggcccctctggcccacagggccccctgggctacccaggtccacgtggagtgaagggcgttgacggaattcgtggcttgaagggtcataagggcgagaagggggaggatggatttccagggtttaagggcgatattggggtgaaaggagatcggggggaggtaggggtacccggatctcggggagaggacggaccggagggccctaaagggcggaccggccctaccggtgatccaggccccccgggtctcatgggagagaagggtaaactcggcgtccctgggctgccaggctaccccggccgacagggccctaaaggcagcctggggttccctggattcccaggggcttccggggaaaagggagccaggggactttctggtaaatctggccctagaggcgagcggggccccacgggcccccggggccaaagaggccctcggggggcaactgggaaaagcggcgccaaaggtacctctggcggagatggcccccatggccctccaggggagaggggtctccccggtcctcagggtccaaatggatttcctggtcccaaaggcccccctggtcccccagggaaggacggtctgcctggtcacccgggtcagagaggcgaggtaggattccagggtaaaacagggccccccggaccacccggggtggttggcccccagggggctgcgggggaaacaggacctatgggggaaaggggtcacccagggccacctggtccacctggtgagcaggggctccctgggaccgcaggaaaagaaggcacaaagggggacccgggccctccaggcgcccccggcaaagatggcccggccgggctgagaggtttcccaggagagagaggccttccaggcaccgccggcgggcccggactcaagggaaatgagggccccagtggcccccctgggcccgcagggagccctggcgagcgtggtgccgccggaagcggagggccaattggccctcccggcagaccggggcctcagggccctccaggcgccgcaggggaaaagggagtgcctggcgagaaaggccccatcggaccaacagggagggatggagtccagggccctgttgggctgccaggccccgctggcccgccaggcgtggctggagaggacggcgataaaggtgaagttggagatcctgggcagaaaggcactaaaggaaataagggtgaacacggacctcctgggcctccaggccccatcggcccagtgggccagccaggtgctgccggcgctgacggggagcctggcgccaggggccctcagggtcacttcggtgccaagggggatgaggggacgaggggattcaatgggcctcccgggcctatcgggttgcaaggattgcctgggccaagcggggaaaagggtgagaccggggatgtgggaccaatgggcccacctggcccgccaggtccacggggccctgcgggccccaatggagcggatgggccccaggggcccccgggaggggtgggcaatttaggccccccaggggagaaaggagagccaggagaaagtgggtcccccggcattcagggagaacctggagttaagggtccccggggcgaaaggggtgaaaaaggagaaagcggtcagccaggagaacccgggcctcctgggcctaagggccctaccggtgatgatggacctaaaggcaaccctggacccgtcggctttccgggagacccagggcctcctggggaggggggacctcgggggcaggacggagcgaaaggggatcgcggagaggatggcgagccaggccagcccggctcccctgggccaaccggcgagaatggtcctcctggcccgctgggtaagcggggccccgccgggtcgccaggctcagagggaagacaaggtggcaagggggcgaaaggagatccaggcgcgatcggcgcccctggcaagaccggtccagttggccctgccggcccagcgggaaagcccggacctgacgggctaaggggactgcctggttcagtgggccagcagggtcgaccaggagccacagggcaggccggccctcctggacccgtgggccctcctggcctcccagggcttcggggagacgcaggtgccaaaggcgagaaaggacacccgggcctgatcgggctgatcgggcccccgggcgagcagggagagaagggcgatagaggcctcccaggtcctcagggctctcccggacagaagggcgaaatgggcatcccaggggcaagcggtcccatcggcccgggtgggccacctggccttccaggtcctgcaggcccaaaaggcgccaaaggagctaccgggccagggggcccgaaaggggaaaagggtgtgcaggggcctccaggacaccccggtccccctggagaggttatccaaccactgccaatacagatgccaaaaaagacacgtcggtctgtggacggcagccggttgatgcaagaggacgaggccattccaacaggaggagcccctggatcgcccggaggattggaagaaatcttcgggtctctagattctctgagagaagaaattgagcagatgcgaaggccaaccggcactcaggacagtcccgcccggacttgccaggaccttaagctttgtcatcctgaattgccagacggagaatactgggttgatccaaatcaggggtgtgccagagatgctttccgagtgttctgtaattttaccgctggtggtgagacctgtgtgactccgcgggatgacgtcacacagttctcatacgtggattccgaagggagtccagtgggcgtcgttcagctcacctttctgagactgctctccgtttcagcccatcaggatgtgagctacccatgttccggagccgctcgcgacggacctctgcggctccgcggagcgaacgaggacgagctgagccctgaaactagcccttacgtgaaggagttccgcgacggctgtcagacacaacagggacgcactgtcctcgaggttcggacacctgtgttagaacagctacccgtattggacgcttctttttctgatctcggcgcccctccccggagaggcggcgtcctgctcgggcccgtgtgttttatgggatag

SEQ ID NO: 232688 - DNA, 4953 bp, Artificial Sequence
  derived and/or modified sequence
atggagcgatgtagccgatgtcatagacttctactcttattgcccttggtgctgggacttagcgccgcgccgggctgggctggagcacccccagtcgacgtactgagagccctgcgcttccccagcctgcctgacggagtgagacgcgccaaggggatctgccccgcagacgtggcctatagagtcgctcgtccggcgcagcttagcgccccgacacgccagctgtttccaggcggttttccaaaggacttctctctactgaccgtggttagaactaggcccggcttacaggctcctttgttgacactatacagtgcccagggtgttcgccagctaggcttggagcttggccggccggttcgatttctgtacgaggaccaaactggaagacctcagcctccaagccagcctgtgtttaggggcctgagcttagcggacgggaaatggcatcgggtggccgtcgccgtgaaaggacagtctgtgactctgattgtggattgcaagaagcgcgtgacccggccattaccaagatcagccagaccagttttggatacacacggtgtaattatcttcggagcccgtatattagatgaagaggtctttgaaggagatgtgcaggaactcgcaatagttccgggagtgcaagcagcctatgagagctgtgagcagaaggaactcgagtgcgaaggagggcagcgggaacgtcctcagaaccagcagcctcaccgagcccagagatcaccccaacagcagcctagccgacttcaccgcccacagaatcaggagccacaatctcaagatcctaccccaggcgaagaagaagagatcctggaatcttccctcctgcctccactggaggaggccgcccatgggccgcgtggtctcaagggagagaagggagaaccagcagtcctcgaacccggaatgctggtggagggccccccagggccggagggacccgcgggccttatcggccccccgggaatacagggtaacccgggccctgtaggtgacccaggcgaaaggggccccccagggcgcgcaggactgcccggctcagacggcgcgccgggtccacccggcaccagtctgatgctcccttttcgctttgggagtggtgggggggacaaagggcctgtggtggccgctcaggaagcccaggcccaggctatcctgcagcaggccagactggctcttagggggccccccgggcccatggggtataccgggcgaccaggcccactgggacagcccggctcgcctggattgaagggcgaaagcggcgatctcgggcctcaggggccgagaggaccccagggactcacggggccgcccggcaaagcagggcgtaggggccgggcaggggcggacggcgctaggggtatgcccggcgacccaggagtaaaaggagatcgcggattcgatggtttgcctgggctgcccggggagaagggtcacaggggggataccggtgcccaagggctgcccggaccgccaggggaggacggggaacgcggtgacgacggcgagattggaccgaggggcttgccaggcgaatccggaccaagaggcctgttgggaccgaagggcccacccgggatcccaggaccccccggagtgcgcggaatggacggcccacagggaccgaagggcagcttaggcccgcagggggagcccggtcctcccggacagcaggggacccccggcacgcagggactccctggtcctcagggtgcaatcggaccacacggggagaaaggtccccagggaaagcccgggctgcccggcatgcccggctccgatggcccaccgggccatcctggcaaagaaggtccaccaggcactaaaggaaatcagggaccatccgggccccagggccctctgggctaccctggtccccgaggcgtgaaaggagttgacggcatccggggcttaaaagggcacaagggagagaagggggaggatggcttcccaggtttcaaaggggacatcggcgtcaagggtgaccggggcgaagtgggagtcccagggagtagaggcgaggatggccccgaaggacctaaaggcaggactggacccaccggagatcctggccctcccggactcatgggcgaaaagggcaagctaggcgtccccggcttacccggctatcccggcaggcagggccctaagggctccctcggctttcccggctttcccggcgctagcggagagaagggggccaggggtctgtctggaaaatccggtccacgcggggaacgaggccccacaggtcctcgaggacaaaggggtccccgtggcgctaccggcaaatctggagcgaaaggcacctccggcggagacggacctcatggacctcccggtgagcgcgggctccccggacctcagggcccaaacgggttccccggaccgaagggtcccctaggaccaccaggcaaggatgggctgccaggacacccggggcagaggggggaagtgggatttcagggcaaaaccggccctccaggcccccctggagtggtcggaccacagggggccgctggtgagaccggaccaatgggggaacggggacaccccggaccccccggcccccctggggagcagggtttgcctggcactgctggtaaagaagggactaagggggaccctggccccccgggagcccctggaaaggatgggcctgccggcctccgggggtttcccggcgagagaggtttgccaggcactgcaggcggccctggactgaaggggaatgagggcccctccgggccccctggcccagctgggagccccggggaacgcggcgccgccggaagcggcggcccaatcggccctcccggccggcccggcccccaggggccaccaggcgcggcaggcgagaagggcgtccctggcgagaagggcccgataggcccaaccggtcgggacggagtccaaggccccgtaggactgcccggtcctgcaggtccacctggtgtcgccggggaggatggcgataagggcgaagtgggagatcccgggcaaaaagggaccaaaggaaacaaaggtgagcatgggccacccggcccccctgggcccatcggcccagtaggccaacccggtgccgccggcgccgatggggaacctggcgcacgggggcctcagggtcatttcggcgccaaaggcgacgagggaacacgcggttttaatggtccacctggccccatcggtctgcagggactcccgggcccatccggggaaaagggtgagacaggtgacgtgggaccaatgggaccaccagggccccccggcccacgaggcccagccggccctaacggggccgacggaccccagggcccccctggcggtgtggggaacctaggacctccgggagaaaaaggagaaccaggcgagtccggaagtcctggcattcaaggagaaccaggcgtgaagggcccgcgcggcgagcgtggagagaaaggggaaagcgggcagcccggagaaccaggacctccgggaccaaagggccctaccggagacgacggccctaaaggcaaccctggacctgtagggttcccgggtgatccggggccccccggagaaggaggaccccgggggcaggacggagcaaagggagaccgcggcgaggatggtgaacccgggcaacctgggagcccaggacctaccggtgagaacggtcctcccggccccttgggaaagcgcgggccggcaggatcacccggcagcgagggccggcagggcggtaaaggcgccaagggagacccaggagctatcggagccccagggaagacaggcccagtaggccccgccggaccggcagggaagccagggccagatggcctgcgaggcctgcctggctctgtgggccagcagggccgccctggtgccacgggacaagccggcccccctggtcctgtgggccccccagggctgcctggtttgcggggcgacgctggagcgaagggggagaagggccatcctgggctcattggcctgattggcccacccggcgagcagggggagaaaggcgatcgaggacttccgggaccacaaggctcaccagggcaaaagggggagatgggcatccctggtgcctccgggccaattggtcccggaggtcctccagggttgcctggccctgccggacccaagggcgccaaaggcgccactggtcccggaggtcccaaaggcgagaaaggcgtacaggggccccccgggcaccctggcccacctggagaggtcattcagccccttcccatccagatgccaaagaagactcgtcgatcagttgatggaagcagactcatgcaagaagatgaggcaattccaacaggcggtgcccccggctccccgggcggactcgaagaaatctttgggagcctcgattccttacgcgaagaaatcgagcagatgcgacgtccaacaggaacccaagactcgccagcccgcacttgccaggatcttaagctgtgccacccagagctaccagatggagagtattgggtagatcctaaccaagggtgcgcacgggacgcctttagggtgttttgcaacttcaccgctgggggagagacatgcgtaacacctcgcgacgacgtgacccagttttcttatgttgactctgaggggtccccggtgggcgtcgtgcagttaacctttctgcgcctgctgtccgtcagcgctcaccaggatgtaagctatccatgctctggggcagcgcgggatgggcccttaagactcagaggagctaatgaggacgagctgagccctgagaccagcccttatgtgaaggaatttagggatggttgtcagacccagcagggcaggacagtactggaggtgcgcacacctgtgctggagcagctgccagtgctggacgcaagtttcagcgatctcggcgcacccccacgtcggggaggagtcctgcttggccctgtgtgtttcatgggctag

SEQ ID NO: 232689 - DNA, 4953 bp, Artificial Sequence
  derived and/or modified sequence
atggaacgctgttccagatgtcatagactccttttgctgttgccattggtcctggggctttccgctgccccggggtgggcaggagctcctcccgtggatgtccttcgggctctccgatttccatccttaccagatggggtcaggagggccaagggcatttgtcctgccgacgtggcgtacagagttgctcgccctgcccagctgagtgctccaaccagacagctatttccgggggggttccctaaagacttcagcctactgaccgtcgtacgtactcgtcccgggcttcaggcaccactgctaaccctctattccgcgcagggtgtgcgtcagcttgggttagagctggggaggccggtacgtttcctatacgaggaccagaccggaaggcctcaacccccgagtcagcctgtctttagggggttatccctggctgacgggaaatggcatagagtagcggtagccgtcaaaggtcagagtgtgactctcatcgtggattgcaagaaacgggtgacacgtccgcttccaaggagcgcgcggccagtgctcgacacacacggcgtgatcatattcggagctcgcatcttggacgaagaggtgttcgaaggtgatgtccaggaactggccatagtccccggcgtacaggcagcttacgagtcttgcgaacagaaagagttggagtgcgaaggcgggcaacgcgaacgtccccagaaccagcagccacaccgggcccagcggagcccgcagcagcaaccttcacgactgcatcgaccgcaaaatcaagagccgcagtcccaggatcctactccaggagaggaggaagaaatactggaaagcagtcttctgccaccactggaggaggccgcacacgggccgcgggggctgaaaggcgagaaaggggagcctgctgtgctggagcccggaatgcttgtggaagggccacccggccccgagggccctgcgggcctgatcggtccccctggcatccagggaaacccaggtccggttggcgaccctggagaacgcggaccgcccggcagagccggcttaccaggttctgacggcgcaccggggcccccagggacatcgctgatgctacctttcagatttgggtcagggggaggggataaaggtccagtggttgccgcgcaggaggcacaggcccaggctatactgcagcaggccagattagccctcaggggccctcctggaccaatgggctacaccggtcggccagggcctctgggacaaccaggctcccctggccttaagggggaaagtggcgacctcggaccccagggacccaggggcccccagggtctcacgggtcccccaggcaaggccgggcggagaggtcgggctggagctgacggtgcccggggaatgcccggcgatccaggagtgaaaggtgaccggggcttcgatggactcccagggctgccaggggaaaagggccatcggggagatacaggagctcaaggcttgcctgggccccccggtgaggacggtgagagaggagacgacggggagatcggccctcgaggattgcctggcgaatccgggcccagaggtcttctcggacccaaggggcccccaggtatccctggcccgcctggagttaggggcatggacggcccgcaaggccctaagggctcacttgggccccagggtgagcctgggcctcctgggcaacagggcacaccagggacacagggcctgccggggcctcaaggagcaattggtccacacggtgaaaagggcccccagggtaaacccggtctgccgggcatgccgggtagcgacggcccccccggccaccccggtaaagaggggccccccggcacaaagggaaatcagggacccagcggcccccaagggcccctgggctaccccgggcctcgcggggttaaaggagtggacggaatccgggggctcaaaggccataagggcgagaaaggcgaggatggattccccggtttcaagggagatatcggagtcaaaggggatcgtggtgaggtgggggtgcccggatcacgcggcgaagacgggccggaaggacctaagggcaggaccggacctactggcgatcccggacctcccggactgatgggtgaaaaaggcaagttaggggttccagggcttccaggttaccccggcaggcagggccccaaaggctccctcggttttcccggcttcccaggagccagcggcgagaagggggccaggggcctgagcggcaaaagcggtcccagaggggaacgaggacccactggtcctcgcggccaacgcggcccaagaggagctacagggaaatccggcgccaaggggaccagcggcggggatggtccccacggaccacccggcgaaagagggttgcccgggccgcaggggcccaacggcttccctggccccaagggaccccctggcccacctgggaaggacgggctgcctggtcatcctggccagaggggtgaggttggcttccagggcaagaccgggcccccagggccaccaggagtggtgggtccacagggcgctgccggggagaccggacccatgggggaacgcggtcacccaggaccgcccgggcctccaggggagcagggactcccaggcaccgcaggaaaggaggggaccaaaggcgaccctggtccgcccggtgctcccggcaaggacggaccagcaggactgaggggcttccccggagagaggggcctgcctggaaccgcaggtggcccaggactgaaaggaaacgagggaccctctgggccccccggccctgccgggagccccggcgagcgaggagctgccggctccggcggacctattgggcctccgggccgccccgggccacagggccccccgggcgccgccggggagaaaggagtgcccggggagaagggcccaatcgggccaaccggcagggacggggtgcagggaccggtgggactgccaggaccagccggaccgccaggggtagcgggggaggatggagacaaaggcgaggtgggggaccccggccaaaagggcactaaggggaacaaaggtgaacacggacctccagggcctcctggcccgattggccccgtgggccaacccggtgctgctggggccgatggagagcccggtgcgcgagggccccaggggcactttggcgctaagggtgacgagggtactagaggattcaatgggcccccagggcccataggcctgcaaggattgcccggcccctcgggcgaaaagggcgagacgggagatgtcgggccaatgggcccacccggccctcccggacctcgggggcccgccggtccgaacggcgcagacggtccgcagggacccccaggaggcgtggggaacctcgggcctccaggagaaaagggggagcctggtgagagcggcagtcccggcatacagggagagcctggggtaaaaggccccagaggcgagcgcggcgagaaaggcgaatctggacaaccaggggagcccggcccacccggtccaaaaggcccaaccggagacgatgggcccaagggaaaccctggcccagtgggcttccccggggaccctggtccacctggcgagggcgggccacgggggcaagacggggccaagggggaccggggcgaggacggcgaaccggggcagcccgggtctcctggtcctacgggcgagaatggtcctcctgggccattaggaaaacgaggccctgctggctcacctgggagcgaagggaggcagggagggaagggggcaaaaggggaccccggagcaatcggtgccccaggtaaaacgggcccagtcgggccagcgggccctgccggcaagcccggccctgacgggctgcgtggcctgcccggaagtgtgggtcagcaaggccgtccaggagctacaggccaagcaggacccccgggtccagtgggtccaccaggattgccgggactgaggggagacgcgggtgcgaagggagagaaggggcacccagggttaatcggactgattggtcctcccggtgagcaaggagagaagggagacaggggactgcccggccctcagggttccccaggtcagaaaggagaaatgggcattccaggggcatcaggacctatcggcccgggaggcccgcctggtctcccgggtcctgccggtcccaagggcgccaaaggcgccaccggtcctggcggaccaaagggagaaaaaggggtgcaggggccacccgggcaccctggtcctcctggcgaggtcattcagccccttccgattcagatgcccaagaagactaggagatcagtagacggcagccggctgatgcaggaggacgaggctattcccactggcggagcaccaggcagccccggtggactggaggaaatttttggatcacttgactctctgcgagaggagatcgaacaaatgagaaggccaacaggcacccaggactccccggctcgcacctgtcaggacctcaagctgtgtcaccctgaacttcccgatggtgagtactgggtggatcccaatcaagggtgcgcaagggacgctttccgggtgttttgtaacttcacggcgggaggcgagacatgtgtgactcccagagacgatgtgacacagttctcctacgtagactctgaaggatctcctgtgggcgtggtccagttgacttttctacggctgctgagcgtaagcgcccaccaggatgtctcttatccctgttccggcgctgccagagatggacccctaaggcttcgcggcgctaacgaggatgaacttagccccgaaacgagtccctatgtaaaggagtttcgggatggctgtcagacccagcagggtagaaccgtgctggaagtgaggactcctgtactcgagcagttgccggttctggacgccagcttttccgatttaggcgcccctccacgtcgaggcggtgttttgctgggcccggtctgcttcatgggatag

SEQ ID NO: 232690 - DNA, 5031 bp, Artificial Sequence
  derived and/or modified sequence
atggaaagatgttctcgctgtcatcgactgttgctgctcttgcctctggtgcttgggcttagtgctgcacctggttgggccggcgcccctccggtcgacgtgttgagagctctcagatttccatctctaccagacggcgtccggagagctaagggtatctgtccagcggacgtggcctatagagtggcacgcccagctcagttgagcgctccgacacgacagctcttcccgggcggttttcctaaggacttctcactgctaacagtcgtgcggactaggcctgggctacaagctcccctcctgaccctgtatagcgcacagggagtgaggcaactgggcctcgaactgggaagacccgtgcgcttcctttacgaggaccagaccggccgtcctcaaccaccctcccaacctgtgtttcgcggcctgagtcttgcagatggaaagtggcatcgtgtggctgttgcagtgaagggacagtccgtgaccctgatcgttgactgtaaaaaaagagtcacaaggcccttgccgcgctcggcgaggcctgtgttagacacacacggagtgattatctttggtgccagaatcttagatgaagaggtctttgaaggcgacgtgcaagaattagcgatcgttccaggagtgcaggcagcatacgagtcctgtgagcagaaggaattggagtgcgagggtggacagagggagcggcctcagaaccagcagccccatcgagcccagaggtccccacaacagcagccttccaggttacatcggccacagaaccaggagccacagtcacaacccacggagtcgttgtactacgattatgaaccaccctattatgacgtgatgactacgggtactactccagattatcaagaccccacacctggcgaagaagaggagatccttgagtcgagtctgcttcctccgttagaggaggctgctcacgggccacgaggcctcaaaggcgagaagggcgaacctgcggttctggagcctggtatgttggttgagggccccccggggcccgaggggcctgctggcttgattgggccccccggtattcaagggaatccaggtcctgtgggggaccccggcgaacgcggcccacccgggcgggccggactcccagggagcgacggagctccagggccaccagggacttcgttgatgctcccattccggttcggatctggcgggggtgataagggacccgtcgttgctgcccaggaggcccaggcacaggccatcctccaacaggctagactggccctgcggggaccccccgggccaatggggtacacgggtagaccgggccctctaggacaaccgggaagccccgggttgaagggcgaatctggcgacttgggcccgcagggaccccgcggccctcagggattgaccgggccaccaggcaaagccggacggagaggccgggcaggtgcagatggagctaggggaatgcccggtgacccgggagtaaaaggggatcggggatttgatggactgcccgggcttcccggcgagaagggtcatcgcggtgacaccggagcccagggcttgccaggacccccaggcgaggacggcgaaagaggggacgacggggagattggaccccgtggattgccaggtgaaagcggccctaggggactcctcggtcctaaaggcccacctggcataccgggacccccaggagtcagaggtatggacggaccacagggccctaaaggaagtcttggaccgcagggtgagcctggaccacccggacagcagggaacccccggcacacagggactccccgggcctcagggcgccatcgggcctcatggggaaaagggccctcagggcaagccaggcttgcctggcatgccaggtagtgatggcccccctggccaccctggaaaagaaggccctcccggaactaaagggaaccagggcccatccggccctcaggggcctctcggctatcctggtccaaggggagtcaagggggtggacggcatccggggcctgaaagggcacaaaggagaaaaaggcgaggacgggttccctggatttaagggtgatatcggagtaaaaggtgatcgtggtgaagtgggtgtgccaggctcccggggagaagatggtccagagggccctaaaggaaggacgggtccaaccggcgacccggggcctccgggcctgatgggcgagaaaggtaagctaggggtgccgggacttcccggataccctgggcgccaggggccgaaagggtccttaggcttccccggctttccaggcgcctcaggagagaaaggagctagaggactgagtggtaagtccggaccacgaggtgaacgtggcccaacggggccaaggggtcagagaggcccccgcggagcgaccggcaagtcaggggccaaaggtaccagtggcggtgacgggccgcatggccctccaggcgaacggggactgccgggtccccaaggcccaaacgggttccctggccccaaaggtccacccgggccgccagggaaagatggcctgcccggccacccagggcagaggggagaggttggctttcagggtaaaacaggaccacccggcccccccggtgtggtcgggccccagggagccgctggtgaaacggggcctatgggcgaacgcgggcatcccgggccaccgggaccccctggagaacagggcctgcctggcacagccgggaaagagggaacaaaaggcgaccctgggccccctggagctccaggaaaagacggcccggcaggattgcgcgggtttcccggagagagagggctaccaggaactgccggcggaccaggtctgaagggtaatgagggcccctccggcccacctggacccgccggtagcccaggcgagcgtggtgccgccggatctggagggccaatcggtccccccggtcgcccagggcctcaaggtcctcctggggccgctggagaaaagggtgtgcctggtgaaaaggggccaatcggcccaaccggacgcgacggggtgcaaggaccagtgggactgcccggacctgccggacctccaggtgtggcaggggaagacggcgacaaaggagaggtcggagaccctggtcagaaagggaccaagggcaataaaggtgagcacggtcctccgggcccgcctgggcctattggccccgtaggccaacctggcgcggcgggcgctgacggtgagcctggagctcgcggcccacaaggccacttcggcgcaaagggtgacgaggggacccgggggtttaatggcccacccgggcccattggactgcagggactgcctggcccatcaggggaaaaaggggagacaggtgacgttgggcccatgggaccgccaggaccacccggtcccagaggacccgctgggcccaacggagctgacggtccacagggaccacccggaggggtgggcaacctgggacccccgggagagaaaggtgaaccgggagagagtggctcccctgggattcagggggaacccggggtcaagggccctcggggagagaggggggaaaaaggcgagagtgggcaaccaggagaaccaggccccccaggcccgaaggggcccacgggcgacgacggccctaaggggaaccctggtccagtggggttcccgggggaccccgggccccctggggagggtggcccgcgaggacaagatggcgcgaaaggggatagaggagaagacggcgaacctgggcagccgggcagcccgggtcctactggcgaaaatggccctcccggcccattaggcaaacgaggaccagctgggagccccggctcagaggggaggcagggcggtaaaggcgctaaaggcgaccccggggctatcggtgccccagggaagacgggtccggtagggcctgcagggcccgcaggcaaaccgggccccgacggcttgcgggggttgccaggctcagtgggacagcagggcaggcctggggccacaggccaggcagggcctcccggtccagtaggtcctccaggtctgccggggttgaggggggatgccggcgccaagggcgaaaagggacatcctggactcatcggacttatagggccaccaggagagcagggtgaaaaaggcgaccggggacttcccggaccccagggctctccaggacaaaaaggggaaatggggatccccggcgctagtgggcctatcgggcctggtggccctcctggactcccagggcccgcgggccctaagggggccaaaggggcaacggggcctggtgggcccaaaggtgagaagggagtgcaggggcccccaggtcacccagggccacctggtgaggttatacagcctctaccaattcaaatgccaaaaaagaccaggcggtccgtggatggtagccgactcatgcaagaagatgaagccattcctactgggggggccccagggtctcccggaggtctggaagagatattcgggagcctggatagtctgcgtgaggagatcgagcaaatgcgtcggcccacaggaacacaggattcaccggcgcgaacttgtcaggatctcaaactctgccatccagaactaccggacggggagtactgggttgatcccaaccaaggctgcgccagagatgcgtttcgggtgttctgtaatttcactgctggtggcgagacttgcgtgaccccgcgagacgatgtgactcagttctcctacgttgattcggaaggatctcccgttggcgtcgtgcagctgacctttctgcgactgctgtctgtgtcggctcaccaggacgtgagctatccatgcagtggcgctgctagagatggacctctccgtctcaggggcgccaacgaagacgaactgtctccggaaaccagcccttacgtgaaggaattccgtgatggctgccagacccaacagggccgaactgtgttggaagtgcgaacccctgtattagaacaactacccgttctggacgcctcatttagtgatctgggggccccgcctcggagagggggggtcctgcttgggccagtctgttttatgggctag

SEQ ID NO: 232691 - DNA, 4953 bp, Artificial Sequence
  derived and/or modified sequence
atggagagatgctctaggtgtcatcgactgctgctgctattgcccctggtcctcggcctaagcgctgcaccaggttgggctggggcacccccagtggatgttcttagggcactccgctttccctcattacccgatggtgtgcgcagggctaagggaatctgccctgccgacgtggcctaccgtgttgcccggcccgcccagttgtccgcgccaactcgacaattgttccccggaggtttcccgaaagacttctctttgctaacagttgtccgcacaaggccaggccttcaggcccccctcctgaccctctattctgcgcagggcgtgaggcagttagggctagagctggggcctcctgtcagattcttgtatgaggaccagactggacgccctcagcctcccagccagcccgtgttcagagggctgagccttgccgatggcaaatggcatagagtggccgtggctgtcaaaggacagagcgtgaccctgattgtagactgcaaaaagcgcgtgactcggcccctgccacgatctgcccgcccagttctagacacccatggggtgataattttcggcgctcgtattttagacgaagaagtgttcgaaggggacgtgcaagagctggctattgtgcctggcgtgcaggctgcttacgaaagttgtgagcagaaagagctcgaatgtgaggggggtcagagggagcgcccccagaaccagcagccgcaccgggcgcagcggtccccgcagcaacaaccgtctcggctgcatagaccacagaaccaggagcctcagtctcaggatcccactcctggtgaagaagaagaaattctcgagtcctcactgcttccacctctagaagaggcagcccacggcccgcgcggcctgaaaggtgaaaagggcgagccagctgtgctagagcctgggatgctcgtggagggccccccagggccagaaggcccagccggactgataggtcctcccggcatccaaggaaatcctgggcctgtgggcgatccaggggagagggggccccccggtcgcgcaggccttcccggctccgatggcgctccggggcctcccgggacatcccttatgctccccttccgcttcggaagcggcggaggggacaaggggcccgtggttgccgcgcaggaggcccaggctcaggcaattcttcagcaggctagactcgcgctgcggggaccgccaggccctatgggttataccggccggcccgggcctcttggccaacccggctcccctggcctgaaaggcgagtcaggggatctggggcctcaaggccctagaggaccacagggtttaacagggccccccggaaaagcagggcggcgtggcagagccggggcggacggagcaagagggatgcctggcgacccgggggtgaaaggggataggggcttcgacgggttgccagggctgcctggtgagaagggccaccgtggcgatacaggagcgcagggactccccggaccaccaggcgaagatggggagcgtggcgacgacggcgagattggccctaggggcctccctggggagtcaggtcctcggggccttctcggacctaagggtcccccaggcatccccgggcctccgggagtgcgaggtatggacggacctcagggccccaagggaagcctgggcccacagggtgagccggggccccccggtcagcagggaaccccagggactcaagggctgccagggccacaaggcgcgattgggcctcacggggagaagggccctcagggaaagcccggcctaccgggaatgcctggcagtgacggaccaccaggacaccccggtaaagagggtcctcctggcaccaagggaaatcagggtcctagcggcccgcagggcccactaggatatcctgggcctaggggcgtgaaaggcgtagacggcatccgcggcctgaagggccacaagggtgagaaaggggaggatggattccccgggttcaaaggcgatatcggcgtgaagggagacaggggtgaggttggggttcctgggtcacgcggcgaagacgggccagagggaccgaaaggtcgtacgggtcccaccggagatccaggcccacccggcctgatgggagaaaagggcaaactaggcgttcctgggctgcccggttatcctggccggcagggaccaaaaggaagccttggttttcccggtttccctggcgccagtggagagaagggcgccaggggactgagcggcaagagtggtccacgcggggaaaggggtcctactggacctcggggccagaggggaccacggggagcaacagggaagagcggagccaaggggacaagcggcggcgacggtccccatgggcctcctggtgaacgtgggttaccaggcccccagggccctaatggatttcctggccctaagggacctcccggaccacccgggaaagacggcttgcccggtcaccccggccaacgtggtgaggtagggtttcaaggcaagaccggcccccccggtccacctggagttgtcggcccgcagggtgccgccggggaaactggacccatgggagagagaggccacccagggccccctgggccgcctggagagcaggggctacccggtactgctggcaaggagggtaccaagggtgatccaggccctccaggagcccctggtaaagacggccccgccggtctgcgcgggttcccaggtgaaagggggctaccagggacggctggcggacctggactcaaagggaacgaggggccttctggccctcctggcccagcaggcagccctggggaacggggagcagccggatctgggggacctatcggcccacccggacggccaggccctcagggacctcctggagctgccggcgaaaaaggggtgcctggtgagaaggggccaatcgggccaaccggcagggacggagttcagggccccgtgggtctgcccgggcccgctggtcctccaggcgttgccggtgaagatggcgacaagggtgaagttggcgatcccggtcaaaaggggacaaagggaaacaagggagaacacggtccacctggcccccccggcccaatcgggccagtcggccagcccggtgccgccggtgcggatggggagcccggagcgagagggcctcaaggccacttcggcgcaaaaggagacgagggtacaaggggtttcaacggccctccgggcccgattggcctgcagggactgcctggccccagtggagagaaaggcgagacaggcgacgtgggacctatgggaccacctgggcctcccggccctaggggtcctgcggggccaaatggagcagacggcccacaaggaccgccaggaggggtgggtaacctgggacctcccggcgagaaaggagaacctggcgaatccggcagcccagggatccagggcgaacctggcgtgaagggacccaggggagaacgaggtgaaaaaggtgagtcagggcagcctggcgagccaggaccccctggtcccaagggaccaacaggagacgacgggcctaaggggaatcccggtcccgttgggtttcccggcgaccctggacctccaggagaaggcgggcccaggggtcaggacggggccaagggcgaccgtggagaggatggtgagcccggtcagcctgggtcacccggacctaccggcgaaaatgggccccccggacctttgggcaagcgcggacccgccggaagtcccgggagcgaaggccggcagggaggcaagggcgctaagggggacccgggcgccatcggtgccccgggcaaaaccggccccgtgggccccgcggggcccgccggcaaaccaggtccagatggcctccgggggctgccagggtccgtggggcagcagggccggcccggcgctacgggacaagcaggccctcctgggccagtgggcccacccggcctgcctggtctgagaggggatgcgggcgccaagggcgaaaagggccaccccggcctcatcggactaattggtccacccggcgaacagggggaaaagggcgatcggggactgcctgggcctcaagggtcccccggccagaagggcgaaatgggaattcccggagcatccggccctattggacccggaggcccccctggattgcccggacccgccggtcccaaaggcgccaaaggggcaacgggccctggaggaccgaagggagagaaaggcgtgcaggggccaccaggacacccagggccccccggagaggtaatacagccacttccaattcagatgcctaaaaaaactcgccggagcgtggacggaagtcgcctgatgcaggaagacgaggccatccctacggggggggctcccgggtcacctggcggcctcgaggagattttcggctcattggattccctgcgggaggaaatcgagcagatgcgtcggccaacaggcacacaggacagtcccgcacgaacatgtcaggacctgaagttatgtcacccagaactacctgatggtgaatactgggttgacccgaaccagggctgcgccagagatgccttccgcgtgttctgtaacttcaccgccggcggtgagacctgtgtgactccacgagacgacgtcacacagttctcttacgtggattcagaaggctcccctgtgggcgtagttcagttaacatttctgaggttactgtccgtgtcggcacaccaagatgtgtcatatccttgttccggggccgctcgggacggccccctgcgtctgcgcggcgccaacgaggacgagttgtccccagagacttccccatacgttaaggaattccgggacggctgtcagacacaacaggggagaaccgtgctggaagtaagaactcccgtgttggaacagcttcccgtgttggacgccagcttttctgacctgggcgctcccccacgccgggggggcgtgctgctaggcccggtctgcttcatgggctag

SEQ ID NO: 232692 - DNA, 4872 bp, Artificial Sequence
  derived and/or modified sequence
taagcgcccccagtggatgttctgagagcactccgattccccagtctgcctgatggtgtgaggagagccaaggggatctgcccggcagacgtcgcctatcgcgtggcccggcccgctcagttatccgcacctacacggcaactgttcccaggcggattccccaaggatttctccttgctgacagtcgtgaggactcgtcccggcctgcaggcacctcttcttaccctctacagcgcacaaggggtgagacagttaggccttgaactgggaagaccagtgaggttcttgtatgaggaccagacaggaagaccccagccgccatcacagcctgtctttcgcggtctgagcctcgcagacggaaagtggcacagagtcgcagtggccgtcaagggacagtccgtgaccctcatcgtcgactgcaagaagcgagtaacccggcctctaccaaggtccgcaagacccgtgcttgatacccacggggtcattatttttggcgccagaatcctcgatgaagaagtttttgaaggagacgtgcaagagctggccatcgtacctggcgtgcaggcagcttatgaatcttgcgagcaaaaagagctcgagtgcgaaggcgggcagcgcgaacggccgcagaatcagcagccacaccgcgcccagcggtctcctcagcaacagccaagccgcttacataggccacagaatcaggagcctcagtcacaggatccaacccccggggaggaggaagaaatcctagaatcctccttgctgcctcccttggaagaggcagcccacggccctcgaggactcaagggcgaaaagggagagccggccgtccttgagccaggtatgctggttgagggtccccctgggcccgaaggccccgcaggccttatcggccctccaggaatacagggcaaccccggtccggtgggtgaccctggcgagcggggcccaccgggtcgggccgggctgccaggctctgacggagcaccaggtccaccggggacaagccttatgctcccatttagatttggatctggcggcggcgacaaggggccggtggttgccgcccaagaggcgcaggctcaagctattctgcagcaggctcgactagccctgcgaggcccacctgggcctatgggctatacaggtagaccaggcccactcgggcagccggggagccctgggctaaagggcgaatcaggcgacctaggcccccaggggccgcggggcccccaagggcttaccgggccacccggtaaagctggaagaaggggacgcgctggcgccgatggcgcaagaggcatgcctggggaccccggtgttaaaggggatcgtggctttgacgggctgcctggccttcccggcgagaaaggccatcgcggcgatacaggcgcccagggattaccagggccgccgggagaggacggtgaaagaggggatgacggggagataggtccacgtgggctccctggcgagtctggccctcgcgggctcctggggcctaaagggccacctgggattccagggcctccgggcgtgcgagggatggacggtccgcaagggcctaaggggtcacttggcccacagggagaaccggggccgccaggacagcaggggacccctggaactcagggcctcccaggaccccagggagcgattggaccacatggcgaaaaggggcctcagggcaagccgggtttgcccggcatgcccggcagtgatggcccacccggccatccgggaaaggaggggccccccggaaccaaagggaaccagggaccctccgggccccagggccctctaggttacccaggtccgcgaggggtgaaaggagtggatgggatccgggggttaaaaggccacaagggggaaaagggtgaggacgggttccccgggtttaagggagatatcggagtcaaaggagatcggggagaggtgggagtccccggttctcgcggcgaggacggaccagaaggaccaaaaggtcggacaggaccgacgggcgatcccggccctcctggtcttatgggggagaagggtaaactcggtgtccctggcttaccaggctatcccgggaggcagggaccaaaagggtctctgggttttccgggattcccaggagcctccggtgaaaagggcgccaggggactgtcagggaaatcgggcccgagaggagagagggggccgaccggaccacggggccaaaggggcccgcgtggtgccacaggaaaatcaggggcaaaggggaccagcggcggcgacggaccccacggcccccccggcgaaagaggactgcccggaccccaagggcctaacggatttcccggacctaaaggccctccaggcccccctggcaaggatgggctgccagggcaccctgggcagcgcggggaagttggattccagggcaagaccgggcctcccgggccgccaggcgtcgtcggaccccagggggcagccggagagacgggtcctatgggtgaacgaggacaccccggaccacctggaccaccaggcgaacagggtctccccggtaccgctggcaaagaaggcaccaaaggcgatcccggaccacctggcgcaccaggaaaagacgggcctgctggcctcagagggttccctggcgagagaggcctgccaggtacagcagggggtcctggcctgaagggcaacgagggcccaagcggccctccggggcccgccggaagcccaggtgaaaggggtgcagccgggtccggggggcccatcggaccaccgggaaggccaggcccccaaggtccccccggggctgccggggagaagggagttccaggggaaaaggggcccattggtccaacgggtagagacggagttcagggccccgttgggttacctggcccagccggaccaccaggggttgctggtgaggatggcgataagggtgaagtgggagatcctggtcagaaagggaccaaaggcaacaagggagaacacgggcccccagggccccctggacctataggacctgtcgggcaacctggagccgccggggcagatggagaacccggggcaaggggacctcaggggcatttcggcgccaagggagacgagggtactcggggatttaatgggccgccaggaccgatcggcctacaggggttaccaggaccctcgggcgagaagggagaaaccggggatgtaggccctatggggccgcctggcccacccggcccacgaggccccgccgggcctaatggggccgatggcccacaagggccacccgggggcgttggcaaccttggtccgccaggagagaagggggagccgggagaaagcgggagccctgggatccagggtgagcccggcgtcaaggggcctcgaggtgaacgtggggaaaaaggcgagtccggacagccgggcgagcccggtccaccgggaccaaagggtcccactggcgatgacgggcctaaaggcaatcctggcccggtcggctttcctggggatcctggaccacctggtgagggagggcctagaggacaagacggggctaaaggcgaccggggggaagatggtgaacctggccagccgggatctccaggaccaactggggagaacggaccccccggaccactgggcaaaaggggaccggcgggatctcccgggagtgaagggcgccagggcggaaaaggcgctaaaggcgacccaggcgcgatcggggcccctggcaaaacggggcctgtagggccagctggccccgcaggaaagccagggcccgacggcctgcgcggtctcccaggcagcgtaggccagcaggggaggcctggagccaccggccaggctggcccaccggggcctgttgggccacccgggctgcctggcctccgtggtgatgccggcgctaaaggcgagaagggtcaccccggcctgattgggcttatcggtccaccaggggagcagggggaaaaaggagatagagggcttccaggcccccaaggcagtccaggccagaagggcgaaatggggatacccggcgcttccggtcctataggcccaggcggccctcctggcctgcccggcccagccggcccgaagggcgccaagggtgccaccggcccggggggccccaaaggggaaaaaggggttcaaggcccccctgggcaccccggaccacccggggaagtcatacagcccctgcccatccagatgcccaagaaaactcgtcggagcgtagatggcagtaggctgatgcaggaggacgaagccatccctaccggtggagcccccggctcacccgggggcctggaggagatattcggctctctggactccctgagggaagaaattgagcagatgcgtagaccaaccggaacgcaagatagcccagctcggacgtgtcaggatctaaaactgtgtcatcctgagctgcctgacggagagtattgggtggacccaaatcagggttgtgctagggacgcttttagagtgttttgcaacttcactgcagggggggaaacctgcgtcacgcctcgcgacgacgtgactcagttctcatacgtggattccgaagggtcacctgtgggggtggtgcagctaaccttcctgcgactcctatcagtgtccgctcatcaggacgtttcatacccatgctctggagccgctcgcgatggccctctgcggctgagaggggccaacgaggatgagctgagtcctgagaccagcccgtatgtgaaggagttccgcgacggatgccaaacacaacaggggcggacagtgctcgaggtgcgaacaccagtgctggagcaattacctgtactagatgcttccttttctgatcttggggctcctccacgacgaggaggagtcctcttgggcccagtgtgcttcatggggtag

SEQ ID NO: 232693 - DNA, 4953 bp, Artificial Sequence
  derived and/or modified sequence
atggaacgctgctctagatgccatagattactgttattattgcctctcgtcttgggtcttagtgctgcacccggctgggccggagctcctccagtcgacgtgctgcgcgccctgcggtttccctctctgcccgatggagttaggcgcgccaaaggtatctgccctgccgacgtggcgtaccgggtggcgcgaccagctcagcttagtgcccctactcgacagctcttcccgggtggctttccaaaagatttttctctactaaccgtggtgagaactaggcccggactccaggcaccactgctgaccctctatagcgctcaaggcgtgcggcagttggggctcgaattaggaagacccgtccggtttctttatgaagatcagacagggcgccctcagccgccgagtcagcccgtgtttagggggctgtctctggcggacgggaaatggcacagggtggccgtcgctgtgaaaggacagtccgtgacgttaattgtggattgcaaaaagcgagtcacccgccccttgcccagaagtgcccggccagtgcttgacactcacggagtgattatcttcggcgcccgcatattggatgaagaggtcttcgagggcgacgtgcaagagttggcaatcgttcctggggtgcaggccgcttatgagagttgcgagcaaaaggaattggagtgcgagggcggtcagcgggagaggccacagaaccagcaaccccatagagcgcagaggtctccacagcagcagccctcaaggctccacaggccacagaaccaagaaccccagtcacaagacccaacccctggagaggaagaagagattctggaatcaagcctgctgcctccgttagaggaggctgctcacggcccccgtggcctgaagggagagaagggggaaccggctgtactagaacctggaatgctcgtggaagggccaccaggcccagagggtccagctggtctgatcggaccccctggaatacagggaaatccgggcccagtcggtgatccgggcgagcggggtccccctggacgagcaggactgcctgggtctgacggagctccgggccctcctggtacatctctcatgttacccttcaggttcggatctggcgggggcgacaagggtccagtcgtcgcagcacaggaagcacaggcccaagccatccttcagcaggccagactggccctgcgaggccctcccgggccaatggggtacacaggacggcccggaccccttggccagccggggtcccctggactgaagggggaatccggggatctagggccacagggaccacggggtccccagggacttacagggccccccggcaaagcggggcggaggggtcgcgcaggggccgacggcgccagagggatgcctggcgatccgggcgtgaaaggcgataggggctttgacgggctgcccggcttacccggggaaaaaggacatcggggggacactggagctcaaggcctccccggcccccccggggaagatggcgagcggggcgatgacggggaaattggcccccggggcctgcctggggagtccggtcctcgaggtctcctggggccgaagggccctcccggcattccaggccctcctggcgtgcgcggcatggatggcccacagggacccaaagggtctctgggaccccagggggagccaggacctcctggacaacagggaacccccgggactcagggattacccggcccccagggagctattggtccacatggagaaaagggcccacagggtaagcccggactgcccggaatgcccgggtcggacggcccgcccggacatccggggaaggaggggccacctgggacaaagggcaatcagggcccaagcggaccccaggggcccctcgggtaccccggtccacgcggggtcaagggtgttgatggcatccggggcctcaaaggacacaaaggcgaaaaaggcgaggatggctttccgggatttaagggggacataggcgtgaaaggagaccgaggcgaagtcggggtgcccgggtctaggggagaagatggtcccgaaggaccaaaaggccgcacaggccccaccggtgaccctggcccaccagggctgatgggtgagaaggggaagctaggggtgccaggccttcccggatatcctggacgtcagggcccgaagggcagcttgggtttcccaggattcccaggagcatctggtgagaaaggagctcgcggtctctccgggaagtcaggacctaggggagagcgggggcccacgggcccacggggccagcgtggcccccgtggagccactggcaagtcgggcgcaaaggggaccagtgggggcgacgggccccacggccctcctggagagcgtggcctgcccggccctcaggggccaaacgggttccctggccctaaggggccacccggccctccaggaaaagacggtctacccggacatcccggtcagcggggcgaggtgggatttcaagggaagacgggacctcccggaccacctggcgtggttgggccccaaggggccgccggggagaccggacctatgggagagcgcggccacccgggacctcctgggccccctggggagcagggccttcccgggaccgccggcaaggaaggcaccaagggagacccgggtcctccaggcgcacctgggaaggacggccctgccgggctgagagggtttcccggagagagaggcctcccagggaccgccggcggtcctggccttaaaggaaatgagggcccatcaggaccaccaggtcctgcgggatcccccggtgaacggggcgccgcagggtccggcggccccattggcccccctgggcgaccaggccctcagggcccaccgggggctgcaggcgaaaaaggtgtgccgggtgagaagggtcctataggaccaaccggccgggatggtgtccagggccctgtaggcctgccaggccctgctgggccccccggcgtcgctggtgaggacggcgataaaggcgaggtgggcgatccaggacagaaggggacaaagggcaataaaggtgagcacggccccccaggaccccctggccccatcggcccagtgggccagcccggggccgccggcgctgacggcgaacccggtgctaggggtccacaagggcactttggagcaaaaggggacgaaggcactcgtggttttaacggtccccctggacccatcggactgcagggattaccaggaccatctggagaaaaaggtgagaccggagatgttggacctatgggtccacctggaccccctgggcctcgaggtcccgcagggcccaatggagccgacggtccccaggggccacctggcggagtgggaaacttgggccctcccggcgagaaaggagagcctggcgagtcaggatcccccggtattcagggcgagcccggtgtgaaggggccccgcggcgaacgaggagagaagggcgagtccggccaaccaggtgagccgggcccaccaggaccgaaaggtccaaccggggacgacggacctaaagggaatcctggacccgtcggcttcccaggcgatcctgggccacctggagagggagggcctcgcggacaggacggggctaagggtgatcgcggcgaggacggggaacccggccagcctgggtctcctggaccgacaggcgagaacggaccgcctgggccgctgggaaaaagaggcccagccggtagcccaggctccgaaggcagacagggagggaagggagcaaaaggggatcctggcgccatcggagctcctggcaagactggtcccgtgggccctgccgggcccgccggtaaacccggccccgatggcctgcggggcctgcctgggtctgtgggacagcaaggccgacctggggctacaggccaggccggtcctcccggcccagtcggcccacctggtctgccaggtttgcgaggcgatgcaggggccaagggggaaaagggccatcctggtctgattggactcatcggccctccaggagagcagggagagaagggcgacagaggactccctggtccccagggctcccccgggcaaaagggagaaatggggatccctggcgcctccggtccgataggcccgggcggcccccccggcctgccaggaccggcaggccctaagggcgccaagggcgcaaccgggcctggtgggcctaaaggtgaaaaaggcgtgcagggcccccctggtcaccccgggcccccaggagaggttatacagcctttaccgattcagatgcccaagaagactagacgatcagtggatggatcacggctgatgcaggaagatgaggccatcccaactggcggagctcccggcagccccggcggtctcgaggagatcttcggctccttggatagcctcagagaagagattgagcagatgagacggcctacaggaacacaggactccccagcaaggacctgccaggacctcaagctgtgccatccggagttacccgatggggaatactgggtggatcctaatcaagggtgcgcccgcgatgcctttcgggttttttgtaacttcaccgccggtggggaaacgtgcgtgactccaagagatgacgtgactcagttcagttacgtcgactctgagggttcccctgtcggcgtggttcagctgaccttcttgcggctgctatctgtttccgctcaccaggacgtgtcctatccttgctctggggccgcccgagacggcccgctcaggctgagaggagcgaatgaggatgaactgagtccagagactagcccttacgtgaaagaatttcgggatggttgtcaaactcagcagggcagaacagtgctcgaggtgcggacacccgtgctcgaacagcttcccgtgttagatgccagcttttcagacctgggcgcgccaccccggcgcggaggggtgcttctgggcccggtgtgcttcatgggctag

SEQ ID NO: 232694 - DNA, 4953 bp, Artificial Sequence
  derived and/or modified sequence
atggaaagatgtagtagatgccatagactcttattgctacttccacttgtgctgggcttatctgctgcccctggctgggctggggctccgcccgtggacgtgctgcgggcccttcgcttcccctcactgccagatggagtgcgccgcgcgaagggtatctgtccagccgacgtcgcttaccgggtcgctcggccagctcagctttctgcacctacgagacagttattcccaggcggatttcccaaggacttctcactactcacagttgtgcggacaagaccgggactgcaagcgccactgttaacgctgtactctgcgcagggcgtccggcagttaggtctcgagctcggtcggcccgtgcgattcctctacgaggatcagactggtagaccacagccgcctagccagccagtttttcgaggcctgtccctggccgacggcaaatggcacagggtcgccgtggccgtcaaaggacagtccgtgacactaattgttgactgtaaaaagagggtgactcggccccttccccggagcgctcgccccgttctagacacacacggcgtgattatattcggcgcccgcatcttggacgaagaagtgtttgaaggcgacgtgcaggagctggccatagttccgggggttcaggcagcatatgaatcctgtgagcaaaaagagctcgagtgtgaaggaggacaacgggagcggccccaaaaccaacaaccccaccgtgcccagcgatccccccagcaacaaccaagtcggttacaccgcccccagaaccaagagcctcagtcccaagatcccacgcccggcgaagaggaggagatcctggaaagctcacttctcccccctcttgaggaggccgcacatggcccccgtggcttaaagggggagaagggcgaacccgccgtgttggagcccgggatgttagtcgaaggcccgcccggtcccgagggccccgccggattgatcgggcctccggggattcagggtaatccgggccctgtaggcgatccaggggaaagaggccccccagggcgggccggcctgccggggtccgatggcgcaccggggccccccggtacgtccctaatgcttccttttagattcgggtctggcggcggagacaagggccctgtagtggccgcccaagaagcacaagcccaggctatccttcagcaagcacgtctggctttgaggggacctcccgggccaatggggtacactggacggccaggacctctggggcaacctggaagccctgggctgaaaggggaaagtggcgatctgggcccccagggccccagagggccgcaaggcttaactggcccgccaggaaaggctggtcggagaggtagagccggcgcagacggggcgcgtggtatgcctggcgaccccggtgtcaagggcgataggggatttgacggcctcccggggcttccaggagagaagggtcaccgaggagatacaggggctcagggcctgccaggacctcctggggaagacggcgagcgaggcgatgacggtgaaatcgggccaagaggcctccctggagaatctggccctcggggcctcctgggacctaaaggacccccggggataccaggtcctcctggggtcagggggatggacggccctcaaggccctaaaggatctcttggaccccaaggtgaacccgggccacccggtcagcagggcactcctggaacccaaggactgccaggcccgcaaggggctatcggccctcacggggagaaaggcccccagggcaagcccggcttgccagggatgccgggtagtgacggcccccccggtcatcccgggaaggaaggccctcctggaacaaaaggaaatcagggcccatctggcccgcagggcccccttggctacccgggcccacgcggcgtgaaaggagtggatggaattcggggactgaaaggacataaaggagagaaaggcgaggacggcttccccggatttaagggggatattggggtgaaaggggatcgaggtgaagtcggtgtccccggctcccgtggggaagatggtcccgaaggccctaagggccgtaccggccccaccggggacccaggaccgccgggcctgatgggcgaaaagggcaagctcggcgtccctggtctccctggatacccgggtaggcagggacctaaaggttccttgggctttccggggtttccaggggcaagcggggaaaaaggagcaagaggtctcagcgggaagtccgggccacggggcgaacgcggcccgaccggtccgagagggcagaggggaccacggggagctactggcaaatccggcgccaagggaacgtccggaggagacgggccccatggacctcctggcgagaggggtctgcccggcccacagggaccaaacgggttcccaggaccaaaaggaccgcccggtccaccaggtaaagacgggctgcccggtcaccctggtcagaggggggaggtcggttttcagggcaagactgggcctcccggtccccctggcgtcgttggaccgcagggagccgctggcgagacaggccccatgggcgagagagggcaccccggaccaccaggcccacctggtgagcagggactcccaggtaccgccgggaaagagggcacgaagggtgacccaggaccccccggcgccccagggaaagacggccccgctggccttcgcggatttcccggtgaacgcgggttgcccgggacggccgggggacccggactgaaaggaaatgaagggccctcaggccctccagggccagctggaagtcctggcgagaggggagcggctggaagcggagggcctatagggccgcccgggaggccaggcccacagggaccccctggggctgcaggggagaagggagtgcccggagagaaaggcccaatcggcccaactggacgagacggtgtgcaaggacccgtgggcctgcctgggcccgccggcccacccggagtggccggggaagacggcgataagggggaggttggggaccccgggcaaaagggtaccaaagggaacaagggcgagcacggacctccagggcccccaggtcctatcggcccagtgggtcagccgggggctgcgggagccgatggggagccaggcgcccgcggaccgcaagggcacttcggagccaaaggagacgaggggaccagaggatttaacgggccaccaggaccaatcggtctacagggattgcctgggccctccggagaaaaaggagagaccggagacgttggccctatggggcctccaggcccccctgggccgaggggccccgctggtcccaacggagctgatggccctcagggccctcctggaggcgtgggaaatttggggcccccgggcgaaaaaggggaaccaggtgaatctggatctcccggaattcagggagaaccaggcgttaagggtccccgcggggagcgtggagaaaagggagagtcaggtcagccaggagaacccggccccccaggaccaaagggccctacgggtgatgatggccctaagggcaaccccgggccagtgggtttccccggagaccccggtccacctggagagggaggacctaggggccaagatggagctaaaggcgacaggggcgaggacggagagcccggtcagccagggtcccctggtcctacaggggagaatgggccccctggtccccttgggaaaagagggccagcaggtagccctggcagcgaaggacgtcaaggtggaaagggcgctaagggtgacccgggcgctatcggcgctcctggaaaaacggggcccgtgggccctgccgggcctgccggaaaacctggaccagacggcttacgaggactgcccgggtccgtggggcagcaggggcggccgggcgcaacaggccaggcaggtccacctgggcctgtgggtccacctgggctgcctggcctgcgaggcgacgctggcgcaaagggagagaaaggtcatccaggactgatcgggttgatcggtcccccaggagaacagggtgaaaagggcgatagaggcttgccaggcccgcagggatcccccggacaaaaaggagagatgggcattccaggggcctctggccccatcggacccgggggtcctccaggtctgcctggccccgccggtcctaaaggagctaagggcgctacgggccctggcggccccaaaggcgagaaaggcgtgcagggccctcctggacatcctgggcctccaggcgaggttatccagccgctgccaattcagatgcctaagaagacccgcagatccgttgacgggtcacgactgatgcaagaggatgaagccatacctacaggaggggctccaggcagtcccgggggtctcgaggagatttttggcagtttggattccctcagagaggaaattgagcagatgaggcggcctactggtacccaggacagccctgcccggacctgccaggacctcaagctgtgtcatcccgaattaccggatggtgagtattgggtggacccaaatcagggatgcgctcgcgacgcattccgtgtcttttgcaactttaccgccggaggggaaacttgcgtcaccccaagggacgatgtcacccaattctcttacgtggacagcgagggaagcccagtaggagtagtgcagctcacttttctccgcctgctgagcgtgagtgctcaccaggacgtgagctatccatgtagtggagcagcacgagatgggcccctgcgcttgcgtggagccaacgaagacgaacttagccctgagacgtccccatacgtaaaagaattccgcgacggttgccaaacccagcaaggccggaccgtattggaagtccgtacaccagtgttggagcaactacctgtgctcgacgcctctttttccgatttaggcgctccccccagacggggcggtgtactcctaggacccgtttgtttcatgggttag

SEQ ID NO: 232695 - DNA, 4968 bp, Artificial Sequence
  derived and/or modified sequence
atggagcgttgttctcgctgccatcgtttgctcctgctcctgcccttggtgcttgggctgagtgccgctcccgggtgggccggcgccccccccgtggacgtgctccgtgcactcagatttcccagtctgcctgatggagtgaggcgagccaagggaatctgtcccgctgacgtcgcctatcgggtggcacggcccgcccaactcagcgcacccacacgtcagcttttccctggcggattcccgaaggatttctccctcctcaccgtagtgcggactcgaccgggactgcaggcccctcttctaactctttattcagcccagggtgttagacagctggggcttgagctggggaggccagtcagatttttgtacgaggatcagaccgggcgcccgcagccgccatcccagcccgtgttccggggcttatccctcgcagacggcaagtggcatagggtcgcggtggccgttaagggacagtcggtgacgcttattgtggattgtaagaaacgtgttacaaggcctctgcctaggagtgccaggccagtcctggacactcatggggtcatcatcttcggagcgagaattctcgacgaagaggtgttcgaaggagacgtgcaggagctcgcaattgttccaggagtgcaggcagcctacgagtcatgcgaacagaaagagctcgaatgtgaaggcgggcagcgggaacgcccgcaaaaccagcagccccacagagcacagcgaagcccacagcagcagccctcacgcctgcaccggccccaaaatcaggagccccagagccaacccaccgaatccctttactacgattacgaaccaccatattatgacgtcatgacaaccggcacaaccccagactaccaggcagcccacgggcccagggggttgaagggggaaaaaggggagccagcagtcctcgaacctggcatgctggttgaaggcccacccggaccggaaggtcccgcagggctgatcggaccacctggtatccagggaaatccaggccctgtgggtgacccgggcgagcggggccctccggggagggcaggtttgccaggaagtgacggagcccccgggccacctggaacgtccctaatgctgcccttcaggtttggatccggaggcggcgataaaggccccgtggttgctgcgcaggaggcccaggcacaggcaatcctgcagcaagcaagactggcactccgcggcccacccggccccatgggctataccgggcgacctggccccctggggcaacctgggagtcccggtctgaagggcgaatctggagatctgggaccgcagggccctcgaggcccccagggactgacggggcctccaggaaaggccgggaggagagggcgggctggagccgacggagcgaggggcatgcctggtgatcctggcgtgaaaggagaccggggattcgatggactcccggggctgcctggagaaaaaggccaccggggggatactggagctcagggtctgcctggtccgcctggggaggacggggagaggggagacgacggagagatcggcccccgaggactaccgggcgagagcgggccccgcgggttattgggaccgaaagggccccctggaattccagggcctcccggtgtgagaggcatggatggtccacaaggccccaaagggagcttaggccctcagggcgaacccggccctcccggacagcagggcacgccaggaacccagggcttgcccgggccgcagggcgcaatcggtcctcacggcgagaaaggtcctcagggaaaacctggtctgcctggaatgcctggctccgatggccccccaggtcatccaggaaaagagggccctcccggaacaaaagggaatcaggggcctagcggtccacaaggaccgctgggctatcccggcccgaggggtgtcaagggggttgatgggattcgggggctgaagggccacaagggggaaaaaggagaggacgggtttcccggattcaagggagatatcggcgtgaagggagacaggggtgaagtgggggtgccggggtcgcggggagaggacgggcctgagggccccaaagggagaacaggtcctactggcgaccccgggccaccaggcctgatgggtgagaaggggaagctaggggttcccggcctccctggttatcctgggcggcaagggccaaagggaagcttaggcttccctggattcccgggcgccagcggcgagaagggagcccggggtctgtctggcaagtccggtccccgtggagaacgcggccccacggggccaagggggcaacgaggaccacgtggagctactggcaagagtggtgctaaaggcacctccggcggggatggccctcacggtcccccaggggagcgaggcctccctggccctcaagggcctaatgggttcccaggccccaaggggcccctcggtcctcctgggaaagatggcctgcccggacatccaggacagagaggcgaggtgggctttcaggggaagactggtccacctgggccaccaggcgtcgtgggaccacagggggccgccggggagaccggtccaatgggagaacgggggcaccctgggcccccagggccaccaggggagcagggcctgccagggaccgccgggaaggaaggcaccaaaggggatccaggacctcccggcgcacctggaaaggatggccccgcaggactcagaggattcccaggagaacgggggctgccaggaaccgcgggggggccaggcttgaaaggcaacgaagggccgagcggtcccccaggcccggcaggttcccctggagagaggggcgccgcgggcagtggaggtccgatcgggccacccggcagaccaggcccccaaggcccacctggcgctgcgggagaaaagggggtccccggggagaaaggcccaatagggcctacaggcagagatggcgtccagggacccgtgggactgccaggcccggctggccccccaggcgtggccggcgaggatggggataagggagaggttggggaccccggacaaaaaggcaccaaggggaataagggcgaacacggacctcccggcccccctgggccgatcggaccagttggtcagcccggggcagcgggtgctgacggtgagcctggggctcgaggaccacagggacactttggtgccaagggggacgaggggactcgtggcttcaacggtcctcctggaccaatcggattgcagggcctcccaggaccctctggagagaaaggagaaaccggggacgtgggacctatggggccccctggcccacccggcccccgcggccctgcagggcctaatggtgccgacggtcctcaaggacctcccggtggcgtgggtaaccttggaccacccggcgagaagggagagcctggcgagtctggttctcctggcatccagggtgagcctggcgtgaagggacctcgaggggagagaggagagaagggggaatctggacagcccggagagcccggaccaccaggccccaaaggtcctacgggcgatgacggcccaaaagggaacccgggacctgtgggattccctggagatcctggccctccgggcgaagggggcccaaggggacaggatggcgccaaaggtgatcgcggagaagatggggagcctggacagcccgggtcaccaggcccaactggcgagaatggcccaccgggccctctgggcaagcgagggcctgctggctctcctggttctgaaggacgccaaggtgggaagggggccaaaggtgacccaggggctataggcgctcctggtaagacgggtcccgtcggacccgccggccctgccgggaagcctgggcccgatgggcttcgtggcctgccaggttcagttggccagcagggccgacctggtgctaccggacaggctggacccccgggtcccgtgggacctccgggattgccagggctcagaggcgatgccggtgccaaaggagagaagggacacccggggctgatcgggctgatcgggccaccaggtgagcagggagagaaaggagaccggggacttcccggaccacaggggagtcccggtcaaaaaggcgaaatggggattccaggcgcgagtgggccaatcggtcctggcgggccgccggggttgccagggcctgcaggtccgaaaggtgccaagggggcgacaggccccggcggaccaaaaggggagaagggtgtccagggccctcccgggcatcctggacctcctggagaggtgattcagcccctgcccatccagatgcccaaaaagacacggaggtccgtcgacggttcccggctgatgcaggaagacgaagccatccccactggcggcgctccggggtcacctggagggctggaagaaatttttggatccttggactcgcttcgggaagagattgaacagatgaggagaccgacaggcacacaagattcccccgctcgaacatgccaagatctgaagctgtgtcaccctgagcttccagacggtgagtattgggtagatcctaaccaaggatgcgccagagacgcatttagagtgttttgcaatttcacagcaggcggcgagacctgtgtgacgcctagggacgacgtcactcagttttcatatgtggactctgagggctcccccgtcggggtcgtgcagctgacctttctgcgtctgctgagtgtttcggcccatcaggacgtcagttacccctgcagcggtgctgcacgagatggccccctgcgccttcgtggcgccaatgaggatgagctcagcccagaaacatcgccctacgtgaaggagttcagggacggctgtcaaacacagcaggggaggacggtcctagaagtcagaaccccggtcctggaacaactccctgtgctggacgccagtttttccgatcttggggcaccgccacgtagggggggtgtgctgttgggaccagtatgcttcatgggatag

SEQ ID NO: 232696 - DNA, 4968 bp, Artificial Sequence
  derived and/or modified sequence
atggagaggtgtagccgctgccatcggctattgttattactgccactagtgctcggattatctgcagctccaggttgggccggcgctcctcctgtagacgtgctacgggccctgaggtttccaagtctgccggacggggttcgtcgagccaaggggatttgtccagccgacgtggcctatcgcgtcgcacggccggctcagctgtccgcccccacaaggcagctatttcctggagggtttcctaaagacttctctctgttgaccgtggttagaactcggcctggactccaagccccactcctgacactttattccgcacagggggtgagacaactcggactggaactgggtaggcccgtgcggtttctctatgaggatcaaactggaagacctcaacccccttcccagcccgtgtttagaggactcagcctcgccgacgggaagtggcaccgtgtggctgtggctgtgaaaggacagtcagtcaccctcattgttgattgcaagaagagagtcacaagaccattaccgagatctgcaagacctgtgctggatacgcacggagttattattttcggcgcacgcattttggatgaggaagttttcgagggcgatgtacaagaacttgccattgtcccaggtgtgcaagctgcctatgaaagctgcgagcaaaaagaactggaatgcgaaggaggacagcgcgaacggccacagaatcagcagccgcatcgcgcacagaggtcaccccagcagcaaccaagccgcttgcaccggcctcaaaatcaggagcctcagtcccaacctaccgaatctctgtattacgattacaagccaccatattatgacgtgatgaccacaggaactacacccgactaccaggccgctcacgggccgaggggcttaaaaggggagaagggggagcccgccgtgctggagcccggaatgctggtggagggaccccctggaccagaaggacccgccgggttgatcggccccccaggcatccagggcaacccagggccagtgggcgaccctggtgaaagaggaccacctggccgtgccggactgccgggctccgacggtgcgcccggcccgcctggcacaagtctgatgctacccttcaggtttggttctgggggaggcgataaaggcccggtagtggcagcacaggaggcccaggcacaggcaattctgcaacaggccagactagctcttcggggaccccctggccccatgggatacactggtaggccaggccccctaggccagcctggttctcccggccttaaaggagagagtggagacttaggtcctcaaggcccgagaggtccgcaagggctgactggcccccccggcaaagccggtcgaagagggagagctggggctgacggcgcaaggggaatgccaggagatcctggggtcaagggtgacagggggttcgatggtctgcccgggctgcctggcgagaagggccaccgaggagatactggcgcccagggcttgcccgggccccccggcgaggacggcgagcggggcgatgacggcgaaatcggcccgcgcggcttacctggtgagtccggtccccgggggcttcttggaccaaaaggtccacctggaatccccggtccacccggcgttaggggaatggacgggcctcagggccccaaggggtccttaggacctcagggagagcctggccctccaggccagcagggaacccccggcacacagggacttcctggtccgcaaggtgccatcggcccacatggagaaaagggtccacagggcaagcccggtctcccaggcatgcccgggagcgatggcccaccagggcacccgggcaaggagggccctccaggtactaaaggaaatcagggaccttcaggcccccagggaccacttggatatcccggtccacggggtgttaaaggggtggatgggatcagagggctgaaagggcacaaaggagagaagggcgaggacggctttcccggatttaagggcgacattggcgtcaagggcgatcgaggagaagtgggagtccctggatcaagaggagaggacggcccagaaggacccaagggtcggacgggacccacaggcgacccaggaccccccggactcatgggtgagaaaggcaaattaggcgtcccaggcttaccaggctaccccggccgacagggaccaaaggggagcctcggatttcctggatttcctggagctagtggggaaaagggggcacgcggactatcaggaaaaagtgggccacgaggagaacgcggtcctactgggcctagaggacaacgcggtccacggggagcgacgggtaaatctggtgccaaagggacttccgggggtgacggaccacatggtcctcctggggaacggggactgccagggccccaggggccaaacggattccccggcccaaagggaccccccggaccgccagggaaagacggactacctggccacccgggacagagaggggaggtgggctttcaagggaagacagggcccccagggcctccaggagtggtgggcccacaaggcgcagccggagagaccggcccaatgggtgaaagagggcaccccggaccacctggacctcctggcgaacaaggactgccggggacagcagggaaagaaggaacaaaaggtgaccccggccctcctggggcacccggaaaggatggtccagcaggattacgcgggttcccaggcgagagaggtcttccaggcaccgccggaggcccaggcctcaaaggcaatgaagggcctagtggccccccaggtccagccggctcgccgggcgaaagaggtgccgctggaagtggaggtccaatcggtcctcccggacggcctggtccccagggtccacctggggctgccggagagaaaggggtcccaggcgagaagggccctataggtcctaccggcagggatggcgtgcagggcccagtcggtctgcctggccccgccggtccacctggtgtggctggggaggacggcgataaaggtgaagtcggcgaccctggtcagaagggcacgaaggggaacaagggtgagcacggcccccctgggccacctggaccaataggacccgtcggtcagccaggtgcagccggcgcagacggcgagcccggtgctcggggacctcaaggtcattttggcgctaaaggtgacgagggcacaagaggctttaatgggcctccgggccccattgggctgcaggggcttcctggtcccagtggggagaaaggcgagaccggcgatgtcgggccgatgggtcctcccggccccccagggccccgaggcccagcaggcccaaatggagctgacggtccacaggggcctcccggcggtgtcggaaacctagggccccctggagagaaaggtgagccaggcgaaagcggaagtccaggtatccagggcgagccaggagtgaaaggaccccgaggtgagcggggcgaaaagggggagtccggccaacccggcgaacccgggcctcctggccctaaagggcctaccggcgatgacggcccaaagggaaaccccggtccagtcggatttccaggcgaccccggaccacctggagaaggcggcccccggggccaggatggagctaagggcgacaggggggaggatggcgaacccggtcagcccgggtctcctggacccaccggagagaacggccccccagggcccctgggcaagagaggacccgctggctcgcccgggagtgaggggaggcaaggtgggaagggggccaaaggtgatcccggcgctataggagcccctggaaaaactgggccagttgggcctgccggaccagctgggaagcctgggccagatggcctcaggggactgcccgggtccgtcggccaacagggcagacccggggctaccggccaggctggcccccctgggcctgtcggcccgcctgggctgcctggcctgagaggggacgctggagctaagggggagaaaggacacccggggctgattggcttaatcggcccacccggcgagcaaggagaaaagggcgaccgcggcttgccgggcccacagggaagtcctgggcagaagggcgaaatgggaatccccggcgcaagcggacccatcggccctggcggacctcccggcctgccgggcccggccggcccgaagggcgcaaagggtgctactggcccaggtggacccaaaggcgagaaaggcgtgcaaggtcctccaggtcacccaggaccaccaggggaggtgatccagcctctaccgattcagatgcctaagaaaaccagaaggtcagtagatgggtcgcgtctcatgcaggaggacgaggccatcccaacagggggggccccaggatcccccggcgggctcgaggagattttcgggagtttagactctctccgtgaggaaattgaacagatgcgaagaccgacaggcacccaggacagccccgcgaggacctgccaggatctgaagctctgccaccctgagttgcccgacggtgagtactgggtagacccgaatcaagggtgcgctcgtgacgccttccgcgtgttttgcaatttcaccgcgggcggagagacgtgtgtcactccaagggacgatgtcacacaattttcttatgtcgatagcgaggggtcacccgtgggggtggtgcagctcaccttcctgaggttgctatcagtgtctgcccatcaggacgtatcctatccatgctcaggggctgcaagagatggccccctgagactgaggggtgccaatgaagacgagctttctcccgaaacatccccctacgttaaagagtttcgggatggttgccaaacccagcagggcagaacagtcctcgaggttcgcacccccgttcttgagcaactgccagtgctggacgctagcttttcggatctcggtgctccacctcggcgcggcggggtgcttctaggtccagtgtgcttcatgggatag

SEQ ID NO: 232697 - DNA, 5031 bp, Artificial Sequence
  derived and/or modified sequence
atggagagatgctcacggtgtcaccgcctgttactgttactaccgctagtcctgggattgagcgctgccccaggctgggcgggtgcacccccagttgacgtgctcagggcactgcgttttccttcactaccggacggcgtgagacgggcaaaaggcatttgtcccgctgatgtggcttacagagtcgctaggcccgcccagctgagcgcacctactagacagttatttcccggcggattcccaaaggatttttctctgcttactgtggtgcgtacccgccctggcctgcaggcaccactgctgacgctgtacagtgctcagggggtcagacagctcggattagagctgggacctcctgtcagattcttatatgaagaccagaccggtaggccacagcctccatcccagcccgtgtttagaggcctgtcacttgcagatggtaagtggcatagagtggccgtagctgtgaaagggcagtcagtgactctgatcgtggactgcaagaaaagggtgactcgtcccctcccccgaagcgcacgaccagttctggacacccatggcgtaattatatttggggcgcgcattctagacgaagaagtatttgagggagatgtacaggagctagcgatagtgcccggtgtgcaagcagcttatgagagctgcgaacagaaggagttggaatgcgaaggcggacaaagagagcggccacagaaccagcaacctcacagagcccagcgaagtccccagcagcagcctagccgccttcatcggccccagaatcaggagccccaaagtcagcccaccgaatcactgtactatgattataagccaccttattatgacgtgatgacaacagggaccactcccgactatcaggatcctacacccggagaagaggaagagattctagaaagttctctgcttccacctctcgaagaggcagctcatgggcctcgcggtctgaagggtgaaaaaggagaacctgccgttctggaaccagggatgctggtcgagggtccgcctgggccggagggacccgccggtctcatcggcccaccaggtattcaggggaatccaggccccgtgggtgacccaggggaaagaggtccgccggggagagctggccttccaggctccgatggcgcacccggaccaccgggtaccagcttgatgctgccatttaggttcggttctggcggcggtgacaagggaccggtggtggccgcacaggaggcccaggcacaggcaatccttcaacaagcacggctcgcccttcggggtcccccgggacctatgggctacactggaaggcccggacctcttgggcagcccggaagccctggcctgaagggagagtccggcgacttagggccccagggccctcgcggacctcaaggtctgacaggccctccgggtaaggctggacgtaggggccgggcaggggcggacggggctcggggaatgccaggggatcctggggtgaagggcgaccggggctttgacggattgccagggctccctggtgaaaaaggtcatcgaggtgatactggcgctcaaggacttcctggcccgcctggcgaagatggggaacgaggcgatgatggtgagatcggccccagggggcttccaggcgagtccgggcccagaggactcttggggcccaaaggtccaccagggatcccaggcccgccaggcgttcgcggcatggatggtccacagggtcctaaggggtccctggggcctcagggagagccagggcccccaggccagcaaggcacccctggcactcagggactgccaggcccccagggcgcgattggtccgcacggcgagaaaggaccccaggggaagcccgggctgccaggcatgcccgggagtgacggccctcctgggcaccccggcaaggaagggccaccgggaaccaaggggaaccaggggccgagcggcccacagggcccgcttggatatcctgggccccggggagttaaaggcgtcgacgggatccgcggcctgaagggtcataagggcgagaagggcgaagatggcttcccggggtttaaaggcgacatcggggtgaaaggcgaccgaggagaggtcggggttccaggaagtaggggtgaggatggcccagaaggacctaagggacggacaggcccaacaggagaccctggaccccccggactgatgggcgaaaagggaaagctgggcgtccctggtctgcccggctaccccggccgccaaggccccaaggggtctctgggttttcccggatttcccggcgcctccggagaaaagggcgcacgagggttgtccgggaagagcgggccaagaggggaacggggccctaccggcccacgaggtcaacggggccctaggggcgccacgggtaagtccggcgccaaagggacatctggaggagacggtccgcatggccctcccggagagcgcggattgcccgggccacagggtccaaatggcttccctggccccaagggacccccgggcccacccggaaaggatggcctgcctggacatccgggacaacgaggcgaggtgggatttcagggtaagaccggacccccgggccctcccggggtggtcggcccgcagggtgccgccggagagactggcccaatgggggaacgaggacaccctggccccccgggtccgccaggggagcagggcctgccgggaactgctgggaaagaaggcactaagggggaccccgggcccccaggggctcctggaaaggacggccccgccggcctgagaggattccccggtgaaagggggctgcctgggaccgctggcggcccaggcctgaagggaaatgagggcccatccgggccccctggccccgctggaagcccaggggagcgcggggcggccggttctggcggccccatcggaccaccaggccgccccgggccacagggaccccctggcgcagccggtgagaaaggcgtgccgggagaaaaagggccgattgggccgaccggaagggacggcgtccagggaccagtggggctacccgggccagcaggcccgcccggcgtggccggcgaggacggcgacaaaggcgaagtcggtgaccctggccagaagggcacaaagggcaataaaggtgaacatggacctccaggtccacctggacccatcggtcccgtagggcagcccggcgccgccggagcagacggcgaaccaggggccagaggaccccagggccatttcggagcgaaaggagacgaaggcactcggggctttaatggaccccctggccctataggactgcagggacttcccggaccttctggagaaaaaggcgaaacgggcgatgtcgggcctatgggcccacctgggccacctgggcctcgagggcccgccggaccgaatggagcggatggacctcagggtccgccaggcggcgtggggaacctggggcctccaggggaaaaaggagaaccgggagagtcagggagccccggcatccagggtgagcctggtgtgaaagggccgcggggcgaaagaggcgaaaaaggtgaaagcggtcaaccaggagagccaggcccacctggccctaaaggcccgaccggcgatgatgggccgaaggggaatcccggacctgtggggttccccggagatcccggacccccaggagaaggcggaccgcgcggccaggatggtgccaagggtgacagaggggaagacggagaacccgggcaaccggggtcacctggcccgaccggggagaacgggccccctggccccctgggtaagcgcgggcccgctggctcccccggctctgagggtcggcaggggggaaaaggtgccaaaggagatcctggcgctattggcgcccctggcaaaacaggacccgtaggaccggcgggtcccgccggaaaacctggacccgatggcctcaggggccttccagggtccgtggggcagcaggggcgacccggggctacaggacaggccgggcctccgggccccgtcggaccccctggactgccaggtttacggggcgatgccggcgctaagggggaaaaggggcacccagggctgattgggctcataggaccccctggagagcaaggcgagaaaggggatcgcgggcttcccggtccccagggtagccctggacagaaaggtgaaatgggtatacctggagcatccggaccaattggcccgggcgggcctcctggactgcctggacccgccggccccaagggtgctaaaggagccacaggcccaggaggacctaaaggggaaaagggggtgcaggggccgccaggacatcctgggccaccgggagaggtgatacagcctctgcctatccaaatgcctaaaaagacccgtaggagcgtggacggcagccgactgatgcaggaagatgaagcgatccccaccggaggtgccccaggtagccccggcggtctggaagaaatcttcggctctctcgactccctgagagaggaaatcgagcagatgcggcgccctaccggcacgcaagacagccccgcccgtacgtgccaggacttaaagctctgtcacccagaacttccagacggggagtactgggtggaccctaaccagggatgtgctcgggatgcttttagagtgttctgcaactttacagcgggcggagagacatgtgtgaccccaagggacgatgttacccaattttcctatgtggactctgaaggctcccctgtgggcgtggtgcaactcacctttctgcgcctcctgtcagtctctgcacatcaggacgtgtcatatccttgcagtggcgccgccagggacggcccattgcgcttgagaggagctaacgaggacgaactctctcccgagacctccccatatgtcaaggaattcagggatgggtgccagacccagcagggaagaaccgtcttggaggttaggacccccgtgcttgaacagctgcctgtgctggatgcctccttctccgatctgggagcgccaccacgccgaggaggagttctgctgggccctgtatgttttatggggtag

SEQ ID NO: 232698 - DNA, 5031 bp, Artificial Sequence
  derived and/or modified sequence
atggaaagatgctcgagatgtcatagactgctgctgttgctgcccctcgtcctcggcttgtcagcagcaccgggatgggccggcgcgcctccagttgacgtactcagagcccttagattccctagtctccctgacggcgtgcgccgagctaagggaatctgccccgcagatgtcgcttaccgtgtggcgaggcctgcacagctttctgcacccacccggcagctcttccccggaggctttcccaaggacttcagcttgttgacagtggtgagaacgcggccgggcctgcaggccccactgcttacactgtacagcgcacagggggtgcggcagctggggttggagctgggaagaccagtgagattcctttacgaggaccagaccggacgtccccaacctccatcacaacccgtgttccgggggctgagcttggccgacgggaagtggcatcgggttgcggttgccgtgaaaggacagtctgttacgctgattgtcgactgcaaaaagagagtcaccagacccctgccacgtagcgctaggccagtgttggatacccacggtgtaattattttcggggcccgcatactggacgaagaggtgtttgagggggatgtgcaggaactggctattgttccgggggtccaggccgcatatgaaagctgtgaacagaaggagcttgagtgtgagggcggtcaaagggagcgaccacagaatcagcagccacacagggcgcagcgcagcccccaacaacagccatctagactgcacagaccacagaaccaggagcctcaaagtcagccaacggaaagcctgtattatgattacaagcctccgtactacgacgtgatgaccaccggcactacccctgactaccaggaccccacccccggtgaggaggaggaaatactcgagagttccttgctcccccccctggaggaggccgcccatggcccccggggactgaaaggtgagaaaggggagcccgccgtgttagaaccgggaatgttggtggaaggtcccccaggaccggaagggcctgccggtttaattgggccacctggcattcaaggcaaccccggccccgttggagatccgggcgagcgcggtcctccaggaagggcaggcctgccagggtctgacggcgcaccaggacccccagggacctctctgatgctcccttttcggttcgggtcggggggcggggataaaggtccggtggtggcggcccaagaggcccaggctcaagccatactgcaacaggccagactggccctgcgtggtcctcctgggccaatggggtatacagggagaccaggccccctaggacagccagggtctccgggcctgaagggagaatctggggatctcggaccacagggccccagggggccccagggcctgactggccctcctggcaaagcagggagaagagggcgggctggggcagacggcgctagaggcatgcccggagatcctggagtaaaaggcgaccgtggtttcgatggtctgccaggcttgcctggggaaaagggacatagaggggacactggggcccaagggttacctgggcctcccggagaagatggagaaagaggagatgatggagaaattggcccacgaggcctgcccggggaaagcggacctcgcggcctgcttggtccaaaaggcccccctggaatccccgggcccccgggcgtgcgggggatggacggaccacagggcccaaagggatccctgggaccccaaggggagcccgggccacccgggcaacaaggaactccaggtactcagggtctccctgggcctcagggggccatcggaccccacggtgaaaaaggaccccagggcaagcccgggctcccagggatgccaggttccgatggaccgcccggccaccccggcaaagagggcccaccaggaacgaaaggcaatcagggcccgtccggcccccagggaccacttggctatcccggtcctcgtggtgtgaagggcgtggacggcatccgcggactgaagggccataagggggaaaaaggcgaggatgggtttcccggatttaagggtgacatcggcgttaagggcgaccgcggagaggttggagtgccaggctcccgaggtgaagatggtccagaggggcctaagggcagaactgggccgaccggggatcccggccctcccggtcttatgggcgaaaagggaaagctcggcgtcccagggttgcctggataccccggacggcagggaccaaagggaagcttggggttccccggatttccaggcgcctccggtgaaaagggggccagggggcttagtggcaagagtggtccccgcggcgagcgagggccaactggtccccgcggccagcgaggtccaagaggggcaactggcaaatcaggggccaaagggacctctggtggagacggcccgcatggccccccaggggagcgcggactgcctggtccgcaaggcccaaatggatttccggggcctaaaggcccccccggacctcccggtaaggatggtctgcccggccaccctggccagaggggggaggttgggttccagggtaagacaggccctccagggccaccgggtgtggtcggacctcagggcgccgccggggaaaccggtccaatgggagaacgggggcatccaggcccccctggaccccccggggaacagggcttacccggcacagcagggaaggagggaacaaaaggtgatccaggccctccaggggcgcccggtaaagatgggcccgcaggcctcaggggcttccctggcgagagggggttaccagggaccgccggcggtccaggactcaagggcaatgaggggccttccggcccaccaggaccagccgggtctccaggagaaagaggggctgcaggtagcggtggaccaattggcccaccaggtcgaccaggcccccagggccccccaggggctgccggcgagaagggcgttccaggggagaaagggccaatcgggcccaccggccgggacggggtccagggtccagtgggtttgcctggtcctgcagggcccccgggggtggccggcgaggatggagataagggcgaagtcggcgacccaggacaaaaggggacaaaaggtaataaaggcgagcacgggcctcccggacctcccggacccattggccctgttggtcagccaggcgctgccggggctgatggggaacccggggccaggggtcctcaaggacatttcggagccaagggggacgaaggcacacgtggattcaacggtcctcctggacctattgggctgcagggtctgcccggtccaagcggagagaaaggtgaaactggggatgtcggaccgatgggccccccaggccctccagggccccggggaccagccggtccaaacggcgcagacggaccccagggaccgcctggcggcgttggtaatctgggtcctcccggagaaaagggtgaaccaggggaaagtggttctcctggaattcagggcgagcctggcgtgaagggccccaggggtgagcgtggcgagaagggagagagcgggcagcccggggaacctggacctccaggcccaaaggggcctaccggcgacgacgggccgaaagggaatcctggcccagtcggctttccaggcgacccaggtccacctggcgagggcgggcccagggggcaggacggagccaaaggcgatagaggagaggatggagaaccagggcaaccaggcagcccaggacccaccggcgagaatggaccacctggccctcttggtaagagggggcccgcaggtagccctggtagtgagggtagacaggggggaaagggcgccaagggggaccccggggctatcggagcccccggaaaaactggaccagtaggtcctgccggcccagctggaaagccaggtcctgacggcctgaggggcctccccggatccgtaggacagcaaggcaggccaggtgctacaggtcaggccggacctcctggaccagtgggaccaccgggcctccctggactgcgtggggatgcaggggctaagggagagaagggacatccggggctcatcgggctcatcggccccccaggagaacagggggagaagggagatcggggactccccgggccccagggctctcctggccagaaaggcgagatgggcatccccggagctagcgggccgattgggccgggggggccacccggtctgccggggcccgccggccccaagggcgccaagggggccaccggaccagggggcccaaaaggtgaaaagggtgtacagggcccgccagggcatccaggacctcccggcgaggtgattcagcccctaccaattcagatgccaaagaagacaaggcgcagcgtcgacggcagccggctgatgcaggaagatgaagcaatccccactggaggcgccccaggaagccctgggggactcgaagagatttttggaagcctcgacagcttacgcgaagagatcgagcaaatgagaaggccaacaggaactcaagacagccctgcccggacctgtcaggacctgaaattatgccaccctgagctacccgatggggagtattgggtggaccccaaccagggatgtgcgcgggatgcctttagagttttctgtaactttaccgcggggggggagacttgcgtgacacccagggacgatgtgacgcagttcagttacgtggattcagagggctcacccgtgggcgtcgtgcaactcacctttctgcggctcctgtccgtgagtgctcaccaggatgtgtcatacccatgttccggcgctgcaagagacggtcccctccgcctacgtggcgcgaacgaggacgagctcagtcctgaaactagcccttacgttaaggagtttcgtgatgggtgccagacccagcaggggcggaccgtactcgaggttcggacccccgtcttggagcagttacccgtgctggatgcatctttcagcgatctaggagctccgcctcgccggggaggggtgttgctaggacccgtctgctttatgggctag

SEQ ID NO: 232699 - DNA, 5031 bp, Artificial Sequence
  derived and/or modified sequence
atggagcgctgttccaggtgccaccggctgctactcctgctgcctcttgtgcttggtctctccgccgcgcccgggtgggccggtgcgccgcctgttgacgtgcttagagccctgagattcccatccctcccagatggcgtccgtcgcgccaagggcatatgcccagcagacgtcgcctatcgagttgctcgaccagctcaactgtccgccccaactaggcaactatttcctggcggcttccccaaagatttcagcctcctaacagtagttcggacacggcctggtttgcaggcccctctgctgaccttgtacagcgcccaaggagtccgacaactgggacttgagctgggtcggcctgtgcgattcctttacgaagatcaaactggtagacctcagccccctagccagcccgtctttaggggactgtcactggccgacggtaagtggcacagagtcgcagttgccgtcaagggacagtcggtgacactgatcgtggattgcaagaagcgggttaccaggcccttacctcgatccgcccggcccgtcttggatacgcacggggtaattatatttggcgctcgtatcctcgacgaagaggtgttcgaaggcgacgtgcaagagctggccatagttcctggagtccaagcagcttacgagagctgcgaacaaaaggagttagaatgtgaaggcggccagcgtgaaagacctcaaaaccaacaaccccacagggcccagcgatcgcctcagcagcagcccagccgcctccaccgacctcagaaccaggaacctcagagccagccaacagaaagcctctattatgactatgaaccaccgtactatgacgttatgactaccggtacgacgcccgactaccaagatcccacacccggtgaggaggaggagatactcgagtcatcactgctccctccactagaagaagccgctcatggaccgcgtgggttaaagggtgaaaagggggagcctgcagtcctggagccaggaatgctagtggagggtccccctggcccggaaggacccgccggtctcatcggtcccccaggaatccagggcaaccccgggcctgttggcgaccccggtgaaagaggtccaccagggcgggctggattgcctggctctgatggcgcgccaggacctcctggaactagcttaatgctcccttttcgattcggctccggaggaggagataagggtcctgtggtggctgcacaagaagcccaggcacaagccatccttcagcaggctagattggctctgcgcggccccccaggaccaatggggtatactggtcgtccaggaccattagggcaacctggatcacctggcttgaaaggggagtcaggtgatttggggcctcaagggcctcgcgggccccagggactaactgggcctccaggaaaggccggaaggaggggtcgggccggagctgatggcgctcgcggtatgccgggcgatcccggagttaagggagatagagggtttgacggactgcctgggttgcctggcgaaaagggtcacagaggcgacactggcgcccagggtcttccagggccacctggagaggatggggagaggggcgacgacggtgagatcggcccccgcggtctacccggcgaaagtggcccaaggggcttgctgggaccaaagggcccccccggaataccaggcccgccaggcgtccgcgggatggatggacctcaggggcctaaaggatcgcttggcccacaaggggagcctggaccacccggacagcagggaacacccgggacgcagggcctcccgggccctcagggggcaattggcccacatggggaaaagggcccccagggtaaacctggcctgcctgggatgcccggtagcgacggaccccccggccaccctggtaaggaaggtcctccgggaactaagggaaaccaaggcccttctggtcctcaagggcccctaggataccccggcccccgcggggtcaaaggcgtcgatggcatccggggccttaagggtcataagggagaaaaaggcgaggatggatttccaggctttaagggagatatcggagttaaaggcgatcgcggcgaagttggcgtgcctgggtcaagaggtgaagacggtccagaaggacctaaaggccgcacaggcccaacgggagacccaggtcctcccggactgatgggggagaaaggtaaactcggtgtgccggggcttccagggtatccggggcgccaaggccccaaaggctcattgggatttcctgggtttcctggcgctagcggtgagaaaggcgcaaggggcctgtcagggaaatccgggcccagaggagaacgtggccccactggccccagaggacagcgagggccgagaggggcaacaggaaagtcaggtgcaaaaggtactagtggtggcgatggtcctcatggcccacccggagaacgtggcttacccggtccccaggggccaaacggtttccccggcccaaagggtccgcctggaccaccgggtaaagacgggcttcccggccatcctggccagaggggcgaggttggtttccaaggcaaaaccgggcctcccgggcctccaggggtcgtgggcccacaaggcgctgcaggcgagaccgggcctatgggagagcggggccaccccggaccccccggacccccaggggaacagggactgcctggaaccgccggaaaggagggaaccaagggcgacccaggccccccaggagccccaggtaaagacgggcccgccgggttgagaggcttcccgggggagaggggactgccaggcaccgccggcgggccaggactaaaaggtaatgaagggccctctgggcctcccgggcctgccggaagccctggcgaacgaggggccgctggatcagggggcccgatcggtccaccggggcgacctggcccccagggccctccaggcgcagctggagagaaaggagtgcctggcgagaaggggcccatcggcccaactgggcgcgatggtgtccagggccccgttggccttccaggccctgccgggccaccaggcgttgctggcgaggacggggataaaggtgaggtgggagaccccggacagaagggtactaagggtaacaaaggagagcacggtccccccggtcccccaggccccattggccccgtaggtcagcccggagccgctggagccgacggggagccaggggcacgggggccccagggacacttcggcgccaaaggcgacgaagggacacggggtttcaacggtcccccaggacccatcggccttcaaggcctccccggccccagtggagagaagggcgaaaccggcgatgtgggccccatgggcccaccagggccccccggaccccggggtcctgcaggtcctaatggagcagacggtccacagggcccacctgggggcgtcggcaatctcggtcctccaggtgagaagggggagccgggtgagtcaggcagccctggaatccagggcgaacccggggtgaagggacctaggggcgagaggggcgagaagggagagagtggacagccaggtgaaccaggaccacccggtcccaaagggcctaccggggacgatggaccaaaaggtaacccagggccggtcggattcccgggggacccagggcctcccggcgaaggaggccccaggggccaggatggtgccaagggggatagaggggaggatggcgagccggggcaacctgggagtccgggccctaccggcgagaatgggccccctggccccctcggcaagaggggacccgcgggctcaccagggagtgagggcaggcaaggcggcaagggtgccaagggcgacccaggcgctatcggagcacctggaaagacaggtcccgtggggccagcggggcctgctggcaagcccggccctgacggtctgagaggactgccaggatccgtcggccaacagggacgaccaggggcaacaggtcaagccggtcccccaggacccgtgggacctcccggactgccaggtctgcgcggtgacgcgggggctaaaggcgaaaaaggacaccccgggctgattggtctgatcggaccaccaggggaacaaggcgaaaagggagatagagggctgccaggaccccagggttctccaggccagaagggggaaatggggatccctggcgccagcggtcccattgggcccggagggccccccggactgccaggaccagccggccctaaaggagccaagggcgcgactggacccggcgggccgaaaggagagaagggagtacaggggcctcctgggcatcctggtccacccggcgaagttattcagccgttacccattcagatgccaaaaaagacccgtagaagcgtcgatggttcccgactgatgcaggaggatgaagcaatacccaccggaggtgctcctgggagtcctggtggcttagaggaaatattcggatccctggacagcttacgtgaggaaatcgagcagatgcggaggccaacgggaacacaggactcgccagcacgcacttgtcaggatctgaagctgtgccaccctgaactccctgacggagaatattgggtggacccaaatcagggatgtgcccgagacgcatttcgggtgttctgcaatttcactgccggaggggagacatgtgtgactccgagagatgacgtgactcagttcagctacgtggattctgaaggcagtcccgtaggtgtggtccagctcacgtttctgcggcttctgtcggtgtcagctcatcaggatgtgtcatacccatgctctggagccgctcgggacgggcccttaaggctgaggggcgctaatgaggacgaattgagtcctgaaacttctccgtatgtaaaggaatttagggacggatgccagacacagcagggaagaacagtactggaagtgcgtactccagttctggaacagctgcctgtgctggatgcctcatttagcgacctcggagctcccccaagaagaggaggcgtgctgctgggccccgtgtgctttatgggctag

SEQ ID NO: 232700 - DNA, 5031 bp, Artificial Sequence
  derived and/or modified sequence
atggagcgttgttccagatgtcaccgccttcttcttttgctcccattagtgcttggattgagcgcagcccccggctgggccggggctcctccggtcgacgtgcttagggcactcaggttcccaagtctccccgacggcgttagaagggccaaagggatttgtcccgctgatgtggcctatcgcgtagccagacctgcccagttaagtgcgcccactcggcagttgttcccaggcggcttcccaaaggatttttctcttctcacggtggtcagaacgcgcccaggactgcaggctcccttactaactctctacagtgctcagggcgtgcgccagctgggactggaactgggacgccctgttcgatttttgtatgaggaccagactgggcgcccgcaacctccaagccaaccagttttcaggggcttgtctctggccgacggcaaatggcatcgagtcgccgtggcagtcaaggggcaaagtgtgacattgattgtggactgcaaaaagcgcgtgactaggcctctgccccggagtgctcgcccagtgttggacacccacggcgtgatcattttcggcgcccggatcctcgatgaggaagtctttgaaggcgacgtccaggagctggccatagtgcctggagtgcaagccgcctacgagtcatgcgagcagaaggaactcgagtgtgaaggtggacaaagagaaagaccacaaaaccaacaacctcacagagcccagcggagcccacagcagcagccatccaggctacacagaccacagaaccaggaacctcagagccagccgaccgagagcctctattacgattacgagcctccatactatgatgtgatgaccacagggacaacccccgactaccaggaccccactcccggggaagaggaagaaatactcgagtccagtttgctgccccctctggaggaggctgcccatggtcccaggggcctgaagggggagaagggggaacctgctgtcctggagccaggcatgctcgtggaggggcctcctgggccagaaggtcctgccggcctgattgggccaccaggcattcagggaaaccccgggccggtgggtgaccccggggaacgcgggcccccgggacgggcaggcctcccagggtcagacggggcacccggcccgccaggaacttcacttatgctgcccttccgtttcgggagcgggggtggcgacaaaggtccagtggttgcggcccaggaagcccaggcccaagcaatactgcaacaggctaggctggccctccgcgggcctcccggacccatgggctacactggtcggccagggcccctaggccagccgggttcaccaggtctgaaaggagagagtggcgatcttgggccgcaggggcctcggggccctcagggcctcacgggcccacccggaaaagccggccgccggggaagggctggcgccgacggagcgaggggaatgccaggtgaccctggcgtgaaaggcgatcgaggattcgatggcctgcccggattacctggggagaagggccacagaggagacacaggcgcccaggggttgccaggaccccctggtgaggacggagaacgcggcgatgacggagagatcgggccgagagggctgccaggggagtccggaccaagggggctgttgggaccaaaagggccccctggtatcccaggacctcctggtgtacgggggatggatggtccgcagggccctaagggaagtttgggcccccagggggaacccggcccacccgggcagcaaggtacccccgggacccaggggcttccaggaccgcaaggagcaattggtccacacggcgagaaggggcctcagggcaagcctggtttgccggggatgcccggtagcgacggcccgcccggacatcccggcaaagaggggccacctgggactaaagggaaccaaggtccctctggtccccaaggacccctcggatatcccggcccacgcggcgtgaagggtgtggacgggatcaggggcctaaagggtcacaaaggcgaaaaaggcgaggatggttttccgggttttaaaggggacattggtgtgaaaggcgacaggggggaggtcggggtgccaggtagtagaggcgaagatggacctgaaggacccaagggtcggactggcccaacaggggacccagggccacctggcctgatgggtgaaaagggaaagctgggcgtgccaggtcttcctggatatccagggagacagggtccaaaggggagcttggggttccctgggtttcccggtgcttcgggcgaaaaaggagcaagggggttaagcggcaaatcgggcccacgaggagagcgcgggcctacagggccacgggggcagagaggccccaggggagccaccggaaagtctggtgctaaagggaccagcggaggagatggcccacacggacccccaggagaacgcgggttaccagggcctcaaggccctaacggattccctggtcctaagggccctctgggacctccgggcaaggacgggctcccggggcaccccggacagcgcggagaggttggatttcagggtaagaccggcccacctggaccgcctggagtcgtcggtccccagggcgcggctggcgagaccggacccatgggcgaacgtggacatcctgggcccccggggccgcctggggagcagggacttcccggaaccgcgggaaaagaaggtacaaaaggagaccctgggcctccaggggccccagggaaggatgggcctgccggactaagaggatttccaggggaacgtggtcttcctggtacagcaggaggacctggattgaaaggaaacgaagggcctagcggcccacctggccccgccggctccccgggggaaagaggggctgcaggatcagggggacctattggcccaccgggaagacccggaccccaaggtccccccggcgcagctggcgaaaaaggggttccaggtgaaaaggggccgatcggacccaccggcagagatggggtgcaggggcctgtcggcctgccaggcccagctggaccccccggcgtggccggcgaggacggagataaaggcgaggtcggagaccccggccagaagggaactaagggaaacaagggggaacatggccctcccggccccccgggcccaataggccctgtgggccagccaggagcagccggagcagacggagaaccgggagccagagggccccagggacacttcggcgctaagggggatgaggggaccaggggctttaatggacctccggggccaattggcctccaggggctgccaggcccaagtggtgaaaagggagagaccggtgatgtgggacccatggggccgccagggccccctggacctcgtgggcccgcaggtccgaacggggccgacggacctcagggccccccagggggcgtggggaacctgggaccacctggagagaagggcgaacccggcgagtcagggtctccaggcatccagggcgaacccggagtgaaggggccaaggggagagcggggcgaaaagggagaatctggtcagccgggagaacctgggccccctggcccaaaagggccaactggagacgatggccccaaaggtaaccccggccccgtgggattcccaggggaccctggaccacccggagaggggggcccccggggacaggatggagcaaagggcgataggggtgaggacggcgaaccaggacagcctggttctcccggcccgacgggcgagaatggccctcctggaccattgggcaaacgggggccggccggcagcccaggatcagaaggccggcagggggggaagggagctaagggtgatcctggagccatcggtgccccaggcaagaccggccccgttgggcctgcaggcccggcaggcaagccaggaccagacggactccgggggctccctggatcagtgggccaacagggtagacccggcgccaccgggcaggcgggcccacccggccccgtcggcccccccggcctgcccggcttacgcggggacgccggcgctaagggcgagaaaggccatcccggccttattgggctgatcggcccccctggagaacagggagagaagggggacaggggacttcctggcccgcagggaagtcctggtcagaaaggcgagatggggattcccggcgcgagcgggcccatcggtccaggaggccctcctgggctaccaggtccagccgggcccaagggtgccaagggagcgaccgggccagggggaccaaagggggagaagggggtgcaaggcccccccggccatcccggaccacccggtgaggtcatccagcccttacccatacaaatgccaaagaagacacggagatctgttgacgggagtcgcttgatgcaggaagacgaagcaatccctacaggcggggctcctggatccccagggggccttgaggaaattttcggatcgcttgactccctccgcgaggaaatcgagcagatgagacggcctacaggcactcaggactcgcccgctcgaacctgccaggatttgaagctgtgtcatcctgaattgcccgacggcgaatactgggtggatcctaaccaaggctgtgcacgcgacgcttttcgcgttttctgcaactttacagccgggggcgaaacatgtgtgacccctcgggatgatgtcacccagttctcatacgtcgacagcgaggggtctcccgtgggggtagtccaactcacctttctcaggttactctccgtaagtgcgcatcaagatgtctcatacccttgctcaggagctgccagggacggtcccctgcgtctgcgcggggccaatgaggacgagctgagccccgagacatccccctacgtgaaggaatttagggatggatgccagacccagcaggggagaacggttctcgaggtgcggacaccagtcctcgaacagctcccagtgttggacgcatcattttcggacctgggggctcctccccgcagagggggtgtgcttctcgggccagtatgtttcatgggttag

SEQ ID NO: 232701 - DNA, 4968 bp, Artificial Sequence
  derived and/or modified sequence
atggagcgatgctcccgctgtcaccggctgcttttgctgctgccactggtattaggactgagcgccgcccccggctgggccggtgccccccccgttgacgtcctgcgagccctgagatttcctagccttccagacggggtacgcagggcaaaaggcatctgccctgcagacgttgcctatcgggttgctcggcccgcacagctcagcgctcccacccggcagttgtttccaggggggttccccaaggacttctctctgctaactgtcgtgcgcacaaggccaggccttcaagcgcccctcttgaccttatattcagcccagggcgtgaggcaattagggctcgagctggggccccccgtgagatttctgtacgaggaccagactggcagacctcaaccgcccagtcagccagtgttccgcggattgtcactggccgacggcaagtggcaccgggtggccgtggcagtaaaaggccagagcgtgactctcatcgtggactgtaaaaagcgggtgacgagaccgctgcctcggtcagctcgcccagtgctggacacccacggcgtaatcatcttcggcgccagaattctggacgaggaggtttttgagggggatgtacaggaacttgctatcgtgcccggtgtgcaagccgcttatgaatcctgcgagcaaaaagagctggagtgcgagggaggccagcgcgagcgcccccagaatcaacagccgcatagagcacagcgaagtccacaacagcagcctagcaggcttcaccggccccagaaccaagaaccccagtcgcagccaacggaatccctgtactacgactacaaacctccttattatgacgtgatgactacaggcacgactcctgactaccaggccgctcacgggcccagagggcttaagggggagaagggagaacctgctgtactcgaaccaggcatgttggtcgaggggccaccgggcccagaagggcctgccggactgatcggcccaccaggaatccagggtaacccaggccctgtgggggacccgggggagaggggtccgcccggtcgcgccgggctgcctgggagcgacggcgctcctggcccacctggcacctccttgatgttgcctttccgattcggaagcggtggtggcgacaaggggcccgtcgtcgcagcccaggaagctcaggcccaggcaatccttcaacaggctaggttagccctgaggggcccacctggcccgatggggtacactggccgtccaggcccgctcggccagccaggcagcccgggcctcaagggagaatctggagatctggggcctcagggccctcgaggtcctcagggtcttactgggccccccggaaaagctggacgccgcgggcgtgcaggagccgacggagcacggggtatgcctggggaccccggcgtgaaaggtgaccggggatttgacggcctccctgggttgccgggtgaaaagggtcatcgcggtgacactggtgcccagggactacccggtccacccggagaagacggggagagaggggacgacggtgaaattgggccccggggcttgcccggtgagtcgggtccacggggcctgctaggtcccaagggtccgcccggcatccccggccctccgggagttcgcggtatggacgggccccagggccccaagggctctctgggcccacagggggaacccggacctccaggccaacaaggcacaccaggaacccagggccttccagggccccagggagccatcgggccccatggggagaaagggccacagggtaaaccaggcctcccgggcatgcctggaagcgatggtcctccaggtcaccccggaaaagaggggccccccgggacaaagggtaatcagggacctagcgggcctcagggacctctgggctaccccgggcctcgcggcgttaagggcgtagatggcattaggggattaaagggccataaaggcgagaaaggagaggacggctttccagggtttaagggcgacattggggtgaagggcgaccggggcgaagtgggcgtgcccggaagtaggggagaagatggtcctgaggggcccaaaggtcgcacaggccccactggtgaccctgggcctcccggcttgatgggcgaaaagggcaaactgggcgtgccaggactacccggctatcccggcagacagggccccaaaggtagtctggggttccccgggttcccaggcgcatctggcgaaaagggagcccgtgggctctctgggaagtcgggcccgcgaggagagcgaggacctactggcccacgagggcagagaggtcccagaggagctacgggtaagtccggagccaagggaacctcagggggtgacggcccccatggaccacctggcgagagggggctcccaggccctcagggcccaaacgggtttccaggaccgaaggggcctcccggtccaccgggcaaagacggcctgcccggtcatccgggacagcgcggggaggtcggttttcagggcaagaccggccccccaggcccccccggggttgtcgggcctcagggagcagcgggtgaaacaggaccaatgggagaaagggggcaccccggccctcctgggccccccggggagcagggccttcctggtactgcaggtaaagagggaaccaagggggaccccggaccacccggcgcccctggaaaggacggaccagccggcctacgcggctttccaggcgagcgagggttaccaggcacagcaggtgggccgggccttaaagggaacgaggggccttcagggcctccagggcctgcagggtcaccaggcgagcgcggtgcagccggctccggtggccctataggcccacccggccggcctggcccacaaggaccaccaggcgcagccggcgagaaaggtgtccccggtgagaaagggcccatcggtcctacagggcgggacggagtgcaagggcctgtaggtctcccaggacctgcaggcccacccggggtagcaggggaagacggagacaaaggtgaagtgggcgatcccggtcagaaagggacgaagggaaataagggggagcacggtcccccagggcctcccggccccatcggtcctgtgggtcaaccaggcgccgcaggagcagacggggaacctggagcgcgtgggcctcaggggcacttcggcgccaaaggtgatgaaggcactcggggattcaatggcccgcccggacccatcggactgcagggcttacccggcccctccggcgaaaagggcgagacaggcgatgtcggacccatgggccctcctggaccaccgggccccagagggcccgccggccccaacggagccgatggtccacagggtcccccgggcggggttggaaaccttgggccacccggcgaaaagggtgagcccggggagagtgggtctccagggatccagggcgagccaggtgtcaagggtcccagaggcgagaggggggagaagggagagagtggccagcctggagagccgggacccccaggccctaaaggaccaaccggcgacgacggccccaaggggaatcccgggcctgtggggttcccaggggatcccggtcctccaggagagggtggtccaagggggcaggacggtgcaaaaggagatagaggcgaggacggcgagcccgggcagcccggatcaccaggccctacaggggaaaatgggcccccaggaccactcgggaaacggggccccgctggctcaccgggatctgagggccgccagggaggtaagggagcaaagggcgacccaggggctataggcgcacccggaaaaactggccccgtgggacccgcgggtcccgcagggaagcctggacctgatggactgcggggcttaccaggtagcgtggggcagcaaggtcggcctggggctacggggcaggcaggtccacccggccccgtggggccacccgggcttccgggtctgcgcggagatgccggggcaaagggtgaaaaagggcaccccggcttaattgggctgattggtccgcctggcgagcagggggagaaaggggatcgcggtctgcccggcccccagggaagtcccgggcagaagggggaaatgggaataccaggggcgtccgggccaattgggcctggcggaccacccggtctgccggggcctgcagggcccaaaggtgccaaaggagccaccggccctggagggccaaaaggagagaagggggtacagggacctcctggccacccgggccctccaggtgaagtgatacagccccttcccattcagatgccgaagaaaactagaaggagtgtggatgggagccggctcatgcaggaggatgaggccatccctactgggggcgcgcccggtagtcccggcgggttagaagaaattttcggcagcctggattctctgcgtgaggaaattgaacaaatgcggaggccaaccggaactcaggactccccagctcggacatgccaagacctaaagctgtgccaccctgaactgcctgacggagaatactgggtcgaccccaaccagggatgcgcgagagacgctttcagggtgttctgcaatttcaccgcgggaggcgagacgtgcgtgactccaagagatgacgtgacacagttttcttacgtagatagcgaggggagcccagtgggcgtggttcagctgacattcctacgattactctccgtgtcggcacatcaagatgtgtcctacccctgttcaggggcagcaagggacggccctctgcgcctgaggggtgctaacgaagatgagctgagccctgagaccagtccttacgtgaaagaattcagggatggatgccagacccagcagggccgcacagtgttggaggtccggacccccgttctggaacagctacctgtacttgacgcttctttcagcgacctcggtgcgccccctaggcgcggcggcgtgctgttaggcccggtttgttttatggggtag

SEQ ID NO: 232702 - DNA, 4968 bp, Artificial Sequence
  derived and/or modified sequence
atggaaaggtgcagtcgctgtcatcggctcctactgctactgcctctggtgctaggtctgagcgctgcgcctgggtgggctggtgccccgcctgtggatgtgctccgtgccctgagattcccaagtctgcccgacggagtgcggagagctaagggaatctgtcctgcggatgtggcctatcgggtcgccaggcctgctcagctgtctgctcctacccgccaactgtttcctggcggtttcccaaaagacttttctttgcttactgtcgtccgcacccggcctgggctgcaagcacccctgcttaccttgtattctgcacaaggggtccggcagctcggcctggaactcggtcgccctgtgcgctttctgtatgaagaccagaccgggcggccccagcctcctagccagcctgtattcagaggtctgtcactggcagatggaaagtggcacagggtggctgtcgccgttaaggggcaatccgttaccttgatcgtagactgcaagaaacgtgtgactaggcccctccctcgcagcgccaggcccgtgctcgatacgcacggggttatcatattcggagcaaggattctggatgaggaggtgttcgagggggatgtgcaggagctggcgatagtacctggagtacaggccgcatatgagagttgcgagcagaaggagctggaatgtgaaggcggccagcgggaacggccgcagaaccagcagccacatagagcccaaaggtccccacagcaacaaccgtcccgcctgcatagaccgcagaaccaggaaccacaaagccagcccacggagtccctgtactacgactatgaacctccatattatgatgttatgaccacgggcactacccccgactaccaggccgcacacggacctcgtggccttaagggcgaaaagggggaacctgcagtactggagccaggaatgcttgtcgaagggcctcccggacccgaaggtcctgcggggttgatcggtccaccaggaatccaggggaacccgggccctgtgggtgatccgggtgagagagggccgcctggcagggctggcctgcccggttctgatggcgctccgggcccacctggcacaagtctgatgctgccgtttcgttttggatctggcggcggggataaaggccccgtggttgctgctcaagaggcccaggcgcaggccatcctacagcaggctcgcttagccttaagagggcccccgggccctatgggatacacaggaaggccaggccctctgggtcagcctggctcccctggcctaaaaggcgaatcaggcgacctggggccacagggaccgcggggtccccagggcttgaccgggccccctggaaaggctggtcgcagggggcgtgcaggcgctgacggcgcacgtggaatgcccggcgacccaggtgtgaaaggcgacagaggtttcgatggtttgcctggactgccaggagagaagggtcaccggggagatactggcgctcaggggctccccggccctccgggggaggatggagaaagaggcgatgacggggaaataggaccacggggcttgccaggagagtctggcccaaggggcctgctcggccccaagggacccccaggcattcccgggccacccggcgtgcggggcatggatggaccccagggtcccaagggatcactggggccacaaggtgagcccggcccccccggccagcaaggaacgccgggcactcagggattgcccggtccccagggagcaattggtccccatggggagaaaggcccccagggcaaacccggtctcccaggcatgccaggcagcgatgggccccctggtcacccgggtaaggaaggtccgccaggcactaagggcaatcaaggtccatctggtcctcagggccctctcggttatcccggacctcgcggagttaagggggtcgatggtatacgaggcctcaaggggcataagggcgaaaagggggaggacggcttcccaggtttcaagggcgacatcggtgtgaaaggagaccgaggtgaggtgggcgttcctgggtccagaggagaagacggacctgagggccctaagggacgaactgggcctacaggagaccccggaccccctgggctgatgggggagaagggcaagctcggtgtgccaggactccctggttatcctgggcgccaggggccaaagggctcactcggctttccaggctttcccggtgcttcaggtgaaaaaggggcgcgcgggctgagtgggaagtcaggaccccggggggaaaggggccctactggtccacggggtcagcgcggtccacggggggcaaccggtaaaagcggcgcgaaggggacctcaggtggggacggaccccatggtccccctggggaacgtggcttacccggaccccagggcccgaatggctttcctggccctaagggtcctcctggcccgcctggtaaggacgggctcccaggacacccaggacagaggggagaagtgggctttcaaggcaagaccggaccaccgggaccaccaggagtggtggggccccagggcgcagccggggaaaccgggcccatgggtgaacgcggacacccagggccccccggtccccctggcgaacaaggactgcctgggaccgcggggaaagaaggcacaaagggtgacccaggccccccaggagcccctggtaaagacggacctgccggactaaggggcttcccaggggaacggggcctgcccggcacagccgggggtccgggattaaagggaaacgaaggaccgtctggtccaccaggccctgcaggctcacccggtgagaggggagccgccggtagtggcggccccataggccctccagggcggccgggccctcaaggaccaccaggagccgccggggaaaagggggttcccggcgagaaagggcccattggcccaaccggccgcgatggagtccagggccctgtcggactgcctggccccgccgggcccccaggcgtagctggtgaagatggggataaaggtgaggtaggggaccctgggcagaagggtacaaagggcaacaaaggagaacacggtcctccaggtccccctgggccgatcgggcctgtggggcaacccggcgcggccggtgctgatggcgagcctggcgcccggggaccccagggacatttcggtgctaaaggcgacgaaggcaccagaggctttaacgggcctccgggacctatcggtctgcaggggttgcccggcccttctggggaaaaaggggagactggggacgtgggccctatgggccccccgggcccccccggacccagaggaccagcaggtcccaacggtgccgatggcccccagggcccacccgggggagtcgggaatctcggcccacctggcgaaaagggtgaaccaggggaatccggcagcccaggcatacagggggagcccggggttaagggcccccgcggagagcgcggcgagaagggcgaaagcggacagcccggagagcccggaccccctggtccaaaaggtcccacgggagacgatggccctaagggtaatcccgggccagttgggtttccaggagaccctggaccgccaggcgaaggagggccccgggggcaggacggcgcgaagggtgaccgaggcgaggacggcgagccagggcagcccggtagtcccgggcctacaggggagaatggaccacctgggcctttaggaaagagggggcccgccgggtccccgggctcggagggaagacagggtggcaagggcgctaagggagatcccggagcgatcggcgccccaggaaagacgggtcctgtggggccagcaggccccgcaggtaaaccaggccccgatggcctgcgtggactccccggcagtgtgggtcagcagggcagacctggcgccacaggtcaggccgggccacccggcccagtcggacctcctggtcttcccgggctacgcggcgatgctggagctaaaggtgaaaaaggccatcccggcctgatcggcctgatcggccctccaggagagcaaggagagaaaggagaccgcggtctgcctggaccccagggcagccccgggcagaagggtgaaatgggaattcctggggccagcggccctattggacccggcgggcctcctggacttcctgggcctgcgggccccaagggagctaagggggcaactggaccaggtggacccaagggggagaaaggcgttcagggcccgcccggccaccccggccctccaggtgaggtgatccagcccttaccaattcagatgcccaagaagactcgcaggtcagtggatggatcacgtcttatgcaagaagacgaggccatcccgaccggcggggccccgggaagtcctggtggtttggaggaaatattcgggtccttggattccttaagagaggagatcgaacagatgcgaagacccactgggacccaggattcccctgcccgtacctgtcaggatctgaaactgtgccatcctgagctgccagacggggaatactgggtggacccgaaccaggggtgcgcaagagacgcattccgcgttttttgtaacttcaccgctggcggggaaacatgcgtgaccccacgcgacgatgtgactcagtttagctacgtggatagcgagggttctccagtcggcgtggtgcagcttacatttctcaggctgttgtcagtttctgcccatcaggacgtgtcatacccatgtagtggggccgcgcgcgacggccccctccgtctgcggggggctaatgaagatgaactaagcccggagactagtccttacgtgaaggaatttagggacggatgccaaacccagcaaggcagaacggtcttagaagtgcggactcccgtgctcgagcagttaccggtgttggatgcaagcttctctgatcttggcgcacctcctaggagggggggagtgctcttgggtcctgtatgcttcatggggtag

SEQ ID NO: 232703 - DNA, 5031 bp, Artificial Sequence
  derived and/or modified sequence
atggagcggtgctcccggtgccatagactactcctgctccttccactcgttttaggcctcagtgctgccccaggctgggcaggtgccccaccagttgatgtgctgcgcgccctccgctttcctagtctccccgatggagtgagaagggcaaaaggcatatgcccagccgacgtggcctatcgcgtagccagacctgctcagcttagtgcacctaccaggcagctgttccctggtggcttccccaaagatttctcgcttctgactgtggtgcgaacaagacccggccttcaagcaccactcttgacattatattccgcacaaggtgtgaggcagctcggccttgaactgggtagaccagtccggtttctgtacgaggatcagaccggccgacctcagccccctagccagccggtatttagaggcctgtccttggctgatgggaagtggcatagagtagctgtggctgtcaaagggcagtctgttacacttatagtcgactgtaaaaagagggtcacccgaccactgccccggtcagcgcgccccgtgctagatactcacggcgttatcatcttcggcgccaggattctggatgaggaagtgttcgagggggatgtgcaggagctagcaattgtgcctggagtccaggccgcctatgaatcatgtgagcagaaggaattagaatgcgaaggtggacaaagggagagacctcagaaccagcaaccccacagagcccagcgctccccccagcagcagccgagccggctgcaccggccacagaaccaggagccccagtctcagcctacagagagtctgtattatgattacaaacctccttattatgatgtgatgaccaccggcaccacgcctgactaccaggaccccaccccaggggaggaggaggaaattctcgagagctctctgctgccccctttggaggaagcggcccacggcccccggggcctgaagggagaaaagggagagccagccgtcctggagccaggaatgcttgtggaaggtccccctggccctgaaggtcctgctgggctaatcggtccccctggcatccagggtaacccaggaccggtgggcgatccaggggagcgcggaccccccgggcgtgccgggctgccagggagcgatggcgctcctggcccacctgggacctctctgatgttacccttcaggttcgggagcggaggcggcgataaaggccccgttgtagccgcacaggaagcgcaggctcaggccatactacagcaggctagactcgctcttcgagggccgcccgggcctatggggtatacaggacgtccaggtcctttgggacagcctgggtctccgggcctgaaaggggaaagtggtgatctgggaccccagggacctcgtggccctcaaggtcttacagggccgcctggcaaagccggcagaagagggcgggctggcgctgacggcgctcgaggaatgccgggtgatcctggtgtgaaaggcgatagagggtttgacggcctgcctggcctccccggagaaaaaggccaccgcggagacaccggagcccagggtttacccggaccgccgggtgaagacggggagcgcggggacgatggcgagatcgggccacgcggactccctggcgaaagcggcccccggggcttgctggggcccaaaggcccacccggtattccaggcccgccaggagtgcggggcatggacgggcctcaagggcccaaaggttcgcttgggcctcagggggaacccggccctcccggtcagcaaggcacacccggcacccaggggctgcctggcccacagggagcaatcggacctcatggtgaaaaaggtcctcaggggaaacctgggctgcccgggatgccggggagtgatgggcctccaggacaccctgggaaggaagggcctccaggtacgaagggcaatcaaggtcccagcggacctcagggaccactgggctacccaggcccaagaggcgtcaaaggcgtcgatggcattagaggcttgaagggccacaagggtgagaaaggtgaagatggattccctggctttaagggtgacattggggttaagggcgatagaggggaagtgggggtgccaggatctcggggagaggatggaccagagggacctaagggcagaacgggtcccactggcgaccctggacctccagggctgatgggggaaaaaggaaagctcggagtacctggcctgcccggatatcccggccggcagggcccaaaagggagcctggggttccccggcttcccgggagccagtggcgaaaaaggcgctcgcggcctgtctggcaagagcggcccacggggcgagaggggccctaccggccccagaggacagcggggaccccgaggagcaaccgggaaaagtggcgctaagggcacaagcggaggagatggcccacacggcccgccaggggaaaggggattacctgggccccagggtcccaatgggtttcctggaccaaagggtcccccaggcccgccaggcaaagacgggctgcccgggcatcctggacagcgaggcgaagtgggtttccagggaaagaccggcccaccaggcccccccggggtggttggaccacagggagccgcgggggaaaccggcccaatgggagagcgtggtcatcctggtcccccaggtccgcccggcgagcaagggttgcccggcactgccggtaaggagggaactaagggagaccccggcccacccggagcaccagggaaggatggccctgctggattgagagggtttccaggagaacgcggattgccggggacagctggcgggccaggtctcaaggggaacgagggaccatccggcccacctggtccagcagggagccccggggaacgcggcgctgcgggttccggcgggccgatcggcccaccgggaagacctggccctcagggacctcccggagccgctggagaaaaaggagtgcctggagagaagggtcccattggaccaactggaagggacggcgtgcagggccctgtcggactgcccggccccgccggcccccccggagtggcaggagaggacggggacaagggagaggttggagatccaggccagaaaggaactaagggcaataaaggagaacacggcccccccggtccacccggccccatcggaccagtcggacagccaggcgccgcgggggccgacggcgaacctggtgccagaggtccccagggacatttcggggctaaaggcgatgagggaaccagaggattcaacggccctccgggcccaatcggcttgcagggtttgccgggcccttctggagaaaaaggtgaaacaggcgacgtcgggcctatggggcctccaggcccacctggcccgcgagggcctgccggacccaacggggccgatggccctcaaggcccccctggaggcgtggggaatctcggacctccaggggagaagggagagcctggcgagagcggatccccagggatacaaggcgaacccggggtgaaggggccacgcggggaacgaggcgagaagggagaaagcgggcagcctggcgaaccgggaccacccgggccaaaaggtccgaccggcgacgacggccctaaaggcaatcctggacccgttggcttccccggagatcccggaccgccaggtgagggcggaccacggggccaggatggagcgaagggggacaggggtgaagatggcgagcccggacagccgggatcaccgggacctactggcgaaaacgggcctccagggcctttgggaaaaaggggacccgccggctctcctggatccgagggccgacaaggcggtaagggtgccaagggtgacccaggggcaataggggcccccggcaaaactgggcctgtaggcccagcagggccagctgggaagcccggcccagacggcctgagagggttgcctggatcagtgggccaacaggggaggccgggagcgaccggtcaagccggccctccaggtcctgtgggacctcccggcttgccaggtctgagaggggatgcaggtgccaagggtgaaaaaggccatcctgggcttattggcctgatcggccctcctggcgaacaaggcgagaagggggatcgaggactgcctggtccccagggatcacccggccagaagggcgaaatggggatccccggcgccagtggcccaatcggccctggcgggccacctgggttgcccgggcccgcagggcctaaaggtgcaaaaggagccactggccccgggggcccgaaaggcgaaaaaggggtgcaaggcccccccggccacccgggaccccctggagaagtgatccagcccttgcctattcagatgcctaaaaagacaaggcgaagtgtggatggctcaagattaatgcaagaagacgaagccatccctacaggcggagctcctgggagccccgggggactggaagaaatcttcggatcacttgattctcttagagaggagattgagcagatgcgacgccctaccggtactcaggactctccagcgcggacctgccaggatcttaaattatgtcaccccgagctccctgatggagaatactgggttgacccaaatcagggttgtgcacgcgacgccttcagagtattctgcaattttaccgccggaggcgagacctgtgtcacacctcgcgacgacgtgacgcaattttcttacgtagatagcgaagggtcaccggtcggagtggttcagctgaccttcctcaggctcttgtcggtctccgcccaccaggatgtgagttacccatgctcaggtgccgcgcgggatggtcctcttaggctaagaggggctaacgaggacgagctctcgccggagacctccccttacgtgaaagaatttagagacggatgtcaaacacaacagggtcgaactgtccttgaagtaagaacaccagtgctcgaacagctccccgtcctggatgcctccttttctgacttgggcgccccgccacggagaggcggtgtcctattggggcccgtgtgttttatggggtag

SEQ ID NO: 232704 - DNA, 4968 bp, Artificial Sequence
  derived and/or modified sequence
atggaaagatgtagtagatgccatcgactgctcttgttgctccccctggtacttggcctgtccgccgcgccaggatgggctggggccccaccagtcgacgtgcttcgggctcttcgcttccctagcctccctgacggtgttcgcagagcaaaagggatatgcccagctgatgtggcctatagagtggctcgccccgctcaactcagtgcgccaacgaggcagctgtttcctggcggttttccgaaggactttagccttttaacagtggtcaggacccgcccaggattgcaggcacctctcctcaccctgtacagcgcgcagggtgtgaggcagctgggtctcgagctggggcgtccggtccggttcctctacgaagaccaaaccggccggccacagccccctagccagccagttttccgtggtctatcactcgcggatggcaaatggcaccgcgtggcagtggcggtaaagggccagagcgtgacgctgatcgtggactgcaagaagagagtgaccagacctctacctaggtcggcccgcccagtgctcgatacgcacggcgtcatcatttttggtgccaggatcctggacgaagaagtcttcgaaggtgacgttcaagaactggcaattgtgcccggagtgcaggccgcctacgaaagctgcgagcaaaaagaactggagtgcgaagggggccagcgggagagaccacagaaccaacagcctcatcgcgcccagcgatctccacagcagcaaccgtcacgccttcatcgcccacaaaatcaagaaccgcagtctcaaccaaccgagtccctgtattacgattataagcctccctattatgacgtaatgacaaccggaactactccagattatcaagcagcccatggccccagggggcttaagggagaaaaaggcgagcctgctgtgctggaaccggggatgctcgtcgaaggacctccagggcccgagggacccgctggccttatcggccctccaggcattcagggcaatcccggtcccgtcggagatcctggtgagcgaggcccacccggccgggccggattgccaggcagcgatggagcccctggtcctcccgggaccagtctgatgttaccgttcaggtttggaagtgggggcggagataaaggccctgtggtcgcggcccaggaggcccaggcacaggccattctgcagcaggctcggctcgcgctgaggggacccccgggtcccatgggctacactggtcgtcccggccccctgggccagccaggctctcctgggttgaaaggagaatccggcgacttaggtccacagggaccaaggggcccccagggtctaactgggccccctggaaaggctgggcgccgcgggagggctggcgcggatggagcacgaggtatgcctggagaccccggcgtgaagggggatcggggattcgacgggcttcccggcttgccgggggagaaagggcacagaggcgacacaggggcccagggattgcctggcccacctggtgaggacggcgaaagaggcgatgatggggagatcgggcccagaggcctgcccggggagtcgggacctagagggctgctgggacctaaaggccctccaggcatccccggtcccccaggggtgagggggatggatggacctcagggccccaaggggtctctaggccctcagggcgaacccggtccacccgggcagcaagggacccctggaacacaggggctgccaggccctcaaggagccattgggccgcacggagagaagggccctcagggaaaaccgggactgcccggtatgcccggatctgatggacctcctgggcatcccggtaaagaaggaccacctggtacaaagggaaaccagggtccttcaggccctcagggccccctcgggtatcctgggcctcggggggtaaagggggtggacggaatacgaggcctcaaaggacataaaggtgagaagggggaggatggtttccctggtttcaagggagacattggagtcaaaggagaccgaggggaagtcggggtgcctggcagccgaggcgaggacggtccagagggtccgaaaggcagaacggggcctacgggggacccaggacctcccggcttgatgggcgaaaaaggcaagctcggcgttccaggactacctggttaccccgggcgccagggacctaaaggcagcttaggatttccgggcttccccggtgccagtggagagaagggggcccgaggtttgtcaggcaaatccggaccccgcggcgagaggggacctaccggcccacgcggacaacgcggcccgagaggcgccacaggcaagtcgggtgccaaaggcaccagcggcggtgacgggcctcacggacctccgggcgagcggggtctccccggccctcaggggccaaacggattccccggtccaaaagggccaccaggccccccggggaaggatggcctcccaggccaccccggccagcgcggagaagttggattccagggcaaaaccgggcctcccggaccaccgggtgtcgtcggcccccaaggcgccgctggcgagaccggccccatgggggagaggggacacccagggccgcctggaccccctggagagcagggacttcccggcacagctgggaaagaggggacgaaaggcgaccccgggcctcccggcgctccgggcaaagacgggcccgccgggcttcgaggattccctggagaacgggggctacccggcacagccggcggccccggccttaaggggaacgaaggaccgagtggcccacccggacccgctgggagtcccggggagcgaggggcagcagggagtggggggccaattgggccacctggtagaccaggccctcagggtcccccgggcgccgccggcgaaaagggtgtccctggggaaaaaggccccattggccctacaggccgagatggcgtgcaggggccggtgggcctgcccggcccagctggtccgcccggcgtggctggagaagacggggacaagggggaagtgggagaccctggccagaagggaaccaagggcaataagggagaacacgggcccccaggtccccccgggccaatcggtcccgtcggacagcctggcgccgctggagccgatggtgagcccggagctagaggaccccaagggcattttggagccaaaggagacgagggcactagaggctttaacggccccccaggaccgattgggcttcagggtctacccggcccatctggggagaagggagaaaccggtgatgtgggaccaatgggccctccagggcctcccggccctcgtgggcccgctggccctaatggcgcagatggtccccagggtccacctggcggcgtggggaacctgggccctcccggcgaaaagggagaacctggcgaatcaggcagtccagggatccaaggcgaacctggtgtcaaaggtccccggggcgaacgcggcgagaagggcgaatctggacaacctggggagccgggccccccaggcccgaaagggccaacaggagacgacggaccaaaaggaaaccccggtccagtcgggttcccaggcgatccaggtccacccggagaggggggacccaggggccaggacggagcaaaaggggatcgcggggaggatggcgaacccgggcagcctggatcgcctggaccgaccggtgaaaacgggcctcccggccctctgggtaagcggggccctgctggaagtcccggatctgagggcaggcagggaggcaaaggcgccaagggagacccaggtgccataggtgctcccgggaagactggaccagtaggccccgccggccccgctggcaaaccagggcctgatggactccgagggctgcctgggagcgtgggacagcagggtagacctggtgcaaccgggcaggccgggccccccggcccagtggggccaccaggactccccgggctgcgtggggacgctggcgccaaaggagagaagggacacccaggcttgatcgggctgatcggaccgccaggggaacagggcgaaaaaggggatagaggacttccagggccacagggttccccaggacaaaaaggagaaatggggattcctggggctagtggacctattggcccaggtgggccacctgggctacccggccctgcaggccccaaaggcgccaaaggcgccactgggcctggaggaccaaagggggagaaaggtgtgcagggcccacccggccatcccggccctccaggagaagtgatccagccactgccaatacagatgcccaaaaaaacaagacggagcgtggacggctcccgcctgatgcaggaagacgaggccattccaaccggaggagccccgggatcccctggcggcctggaagagatattcgggagtttagacagtctgagggaagaaatcgaacagatgcgtaggccaaccggaacacaagatagccctgctcggacatgccaggacttaaagctgtgccatcccgagttgcccgacggcgaatattgggtggacccaaatcaggggtgtgcacgggacgcatttagggtgttctgtaattttactgctggtggggagacgtgcgtgacccctcgcgacgacgtgacccagttcagttatgtcgattcagaaggatcaccggtcggcgtcgttcagctaacctttttacggctgctaagcgtatctgcccatcaagacgtcagctacccttgtagcggcgcagcaagagatggtccactgaggctgcgcggcgctaacgaagacgaattgagtccagaaacttctccctatgtaaaggagtttagggacggatgccagacccagcagggcaggacagtccttgaagtcaggactcccgtcttggagcaattgccagtcttggacgcgtctttttcagacttgggcgcacccccgcgtcggggtggagtactcctgggcccagtgtgctttatgggttag

SEQ ID NO: 232705 - DNA, 4953 bp, Artificial Sequence
  derived and/or modified sequence
atggagcgctgcagccgctgccaccggctgctgctgctgctgcccctggtgctgggcctgtctgctgcccctggctgggccggggcccctcctgtggatgtgctgcgggccctgcgcttccccagcctgcctgatggagtgcggcgggccaagggcatctgcccagcagatgtggcctacagagtggcccggcctgcccagctgagcgcccccacccggcagctgtttcctgggggcttccccaaggacttcagcctgctgactgtggtgaggacccggcccggcctgcaggcccccctgctgaccctgtacagcgcccagggcgtgcggcagctgggcctggagctgggccggcctgtgcgcttcctgtatgaggaccagacaggccggccccagccccccagccagcctgtgttccggggcctgagcctggctgatggcaagtggcaccgggtggccgtggccgtgaagggccagagcgtgaccctcatcgtggactgcaagaagagggtgacccggcccctgcccaggtctgcccggcctgtgctggacacccacggcgtcatcatctttggagcccgcatcctggatgaggaggtgtttgaaggagatgtgcaggagctggccatcgtgcctggggtgcaggccgcctatgagagctgtgagcagaaggagctggagtgtgagggcggccagcgggagcggccccagaaccagcagccccaccgggcccagaggagcccccagcagcagcccagccggctgcaccggccccagaaccaggagccccagagccaggaccccaccccaggagaggaggaggagatcctggagagcagcctgctgccccccctggaggaggccgcccacggcccccggggcctgaagggggagaagggggagcctgctgtgctggagcccggcatgctggtggagggccccccaggccctgagggccctgctggcctcatcggccccccaggcatccagggcaaccctggccctgtgggggaccctggagagcggggccccccaggccgggccggcctgcccggcagtgatggagcccctggccccccaggcaccagcctgatgctgcccttccgcttcggcagcggcggcggggacaagggccctgtggtggccgcccaggaggcccaggcccaggccatcctgcagcaggcccggctggccctgcggggccccccaggccccatgggctacacaggccggcccggccccctgggccagcccggcagccctggcctgaagggggagagcggggacctgggcccccagggcccccggggcccccagggcctgaccggccccccaggcaaggccggccggcggggccgggccggggctgatggagcccggggcatgcctggggaccccggggtgaagggggaccggggctttgatggcctgcccggcctgcctggagagaagggccacagaggagacaccggggcccagggcctgcccggccccccaggagaagatggagagagaggagatgatggagaaattggcccccggggcctgcctggagagagcggcccccggggcctgctgggccccaagggccccccaggcatccctggccccccaggagtgcggggcatggatggcccccagggccccaagggcagcctgggcccccagggcgagcccggccccccaggccagcagggcaccccaggcacccagggcctgcccggcccccagggcgccatcggcccccatggagagaagggcccccagggcaagccaggcctgcccggcatgcctggcagtgatggccccccaggccaccctgggaaggagggccccccaggcaccaagggcaaccagggccccagcggcccccagggccccctgggctacccaggcccccggggcgtgaagggcgtggatggcatccggggcctgaagggccacaagggggagaagggggaggatggcttccctggcttcaagggggacatcggcgtgaagggggacagaggagaggtgggcgtgcccggcagcagaggagaagatggccctgagggccccaagggccgcacaggccccaccggggaccccggccccccaggcctgatgggagagaagggcaagctgggcgtgcccggcctgcccggctacccaggccggcagggccccaagggcagcctgggcttccctggcttccctggggccagcggggagaagggggcccggggcctgagcggcaagagcggccccagaggagagcggggccccaccggcccccggggccagaggggccccaggggggccaccgggaagagcggggccaagggcaccagcggaggagatggcccccacggccccccaggagagcggggcctgcccggcccccagggccccaacggcttccctggccccaagggccccccaggccccccaggcaaggatggcctgcccggccaccctggccagagaggagaggtgggcttccagggcaagacaggccccccaggccccccaggagtggtgggcccccagggcgctgctggggagaccggccccatgggagagcggggccaccctggccccccaggccccccaggagagcagggcctgcctggaacagctgggaaggagggcaccaagggggaccccggccccccaggggcccctgggaaggatggccctgctggcctgcggggcttccctggagagcggggcctgcctggaacagctgggggccctggcctgaagggaaatgaaggccccagcggccccccaggccctgctggcagccctggagagagaggagctgctggcagcggcggccccatcggccccccaggccggcccggcccccagggccccccaggagctgctggggagaagggcgtgcctggagagaagggccccatcggccccaccggcagagatggagtgcagggccctgtgggcctgcccggccctgctggccccccaggagtggccggggaggatggagacaagggggaggtgggggaccccggccagaagggcaccaagggcaacaagggggagcacggccccccaggccccccaggccccatcggccctgtgggccagcctggagctgctggagcagatggagagcccggggcccggggcccccagggccactttggagccaagggagatgagggcacccggggcttcaatggacctcctggccccatcggcctgcagggcctgcccggccccagcggggagaagggggagactggagatgtgggccccatgggccccccaggccccccaggcccccggggccctgctggccccaatggagcagatggcccccagggccccccaggcggcgtgggcaacctgggccccccaggagagaagggggagcctggagagagcggcagccctggcatccagggcgagcccggggtgaagggccccagaggagagcggggggagaagggggagagcggccagcctggagagcccggccccccaggccccaagggccccactggagatgatggccccaagggcaaccctggccctgtgggcttccctggggaccccggccccccaggagagggcggcccccggggccaggatggagccaagggggacagaggagaagatggagagcccggccagcccggcagccctggccccaccggggagaatggacctcctggccccctgggcaagaggggccctgctggcagccctggcagcgagggccggcagggcggcaaaggagccaagggggaccccggggccatcggggcccctgggaagacaggccctgtgggccctgctggccctgctgggaagccaggcccagatggcctgcggggcctgcccggctctgtgggccagcagggccggcctggggccaccggccaggccggccccccaggccctgtgggccccccaggcctgcccggcctgcggggagatgctggggccaagggggagaagggccaccctggcctcatcggcctgattggccccccaggagagcagggcgagaagggggaccggggcctgcccggcccccagggcagccctggccagaagggggagatgggcatccctggggccagcggccccatcggccctgggggccccccaggcctgcccggccctgctggccccaagggggccaagggggccaccggccctgggggccccaagggggagaagggcgtgcagggccccccaggccaccctggccccccaggagaggtgatccagcccctgcccatccagatgcccaagaagaccaggagatctgtggatggcagccggctgatgcaggaggatgaggccatccccaccggcggggcccctggcagccctgggggcctggaggagatcttcggcagcctggacagcctgcgggaggagattgagcagatgaggcggcccaccggcacccaggacagccctgcccggacctgccaggacctgaagctgtgccaccctgagctgcctgatggagagtactgggtggaccccaaccagggctgtgccagagatgccttccgggtcttctgcaacttcaccgctggaggagagacctgtgtgaccccaagagatgatgtgacccagttctcctatgtggacagcgagggcagccctgtgggcgtggtgcagctgaccttcctgcggctgctgtctgtgtctgcccaccaggatgtgtcctacccctgcagcggggccgccagagatggccccctgcggctgcggggggccaatgaagatgagctgagccctgagaccagcccctacgtgaaggagttcagagatggctgccagacccagcagggccgcacagtgctggaggtgaggacccctgtgctggagcagctgcctgtgctggatgccagcttcagtgacctgggcgcccccccaagaagaggaggagtgctgctgggccctgtgtgcttcatgggctag

SEQ ID NO: 232706 - DNA, 4968 bp, Artificial Sequence
  derived and/or modified sequence
atggagcgctgcagccgctgccaccggctgctgctgctgctgcccctggtgctgggcctgtctgctgcccctggctgggccggggcccctcctgtggatgtgctgcgggccctgcgcttccccagcctgcctgatggagtgcggcgggccaagggcatctgcccagcagatgtggcctacagagtggcccggcctgcccagctgagcgcccccacccggcagctgtttcctgggggcttccccaaggacttcagcctgctgactgtggtgaggacccggcccggcctgcaggcccccctgctgaccctgtacagcgcccagggcgtgcggcagctgggcctggagctgggccggcctgtgcgcttcctgtatgaggaccagacaggccggccccagccccccagccagcctgtgttccggggcctgagcctggctgatggcaagtggcaccgggtggccgtggccgtgaagggccagagcgtgaccctcatcgtggactgcaagaagagggtgacccggcccctgcccaggtctgcccggcctgtgctggacacccacggcgtcatcatctttggagcccgcatcctggatgaggaggtgtttgaaggagatgtgcaggagctggccatcgtgcctggggtgcaggccgcctatgagagctgtgagcagaaggagctggagtgtgagggcggccagcgggagcggccccagaaccagcagccccaccgggcccagaggagcccccagcagcagcccagccggctgcaccggccccagaaccaggagccccagagccagcccacagagagcctgtactatgactatgagcccccctactatgatgtgatgaccaccggcaccaccccagactaccaggccgcccacggcccccggggcctgaagggggagaagggggagcctgctgtgctggagcccggcatgctggtggagggccccccaggccctgagggccctgctggcctgattggccccccaggcatccagggcaaccctggccctgtgggggaccccggggagcggggccccccaggccgggccggcctgcccggcagtgatggagcccctggccccccaggcaccagcctgatgctgcccttccgctttggaagtggcggcggggacaagggccctgtggtggccgcccaggaggcccaggcccaggccatcctgcagcaggcccggctggccctgcggggccccccaggccccatgggctacacaggccggcccggccccctgggccagcccggcagccctggcctgaagggggagagcggggacctgggcccccagggcccccggggcccccagggcctgactggacctcctgggaaggccggcagaagaggccgggccggggctgatggagcccggggcatgcctggggaccccggggtgaagggggaccggggctttgatggcctgcccggcctgcccggggagaagggccacagaggagacacaggagcccagggcctgcccggccccccaggagaagatggagagagaggagatgatggagagatcggcccccggggcctgcccggggagagcggcccccggggcctgctgggccccaagggccccccaggcatccctggccccccaggagtgcggggcatggatggcccccagggccccaagggcagcctgggcccccagggcgagcccggccccccaggccagcagggcaccccaggcacccagggcctgcccggcccccagggcgccatcggcccccacggggagaagggcccccagggcaagccaggcctgcccggcatgcctggcagtgatggccccccaggccaccctgggaaggagggccccccaggcaccaagggcaaccagggccccagcggcccccagggccccctgggctacccaggcccccggggcgtgaagggcgtggatggcatccggggcctgaagggccacaagggggagaagggagaagatggcttccctggcttcaagggggacattggagtgaagggggacagaggagaggtgggcgtgcccggcagcagaggagaagatggccctgagggccccaagggccgcacaggccccactggagaccccggccccccaggcctgatgggagagaagggcaagctgggcgtgcccggcctgcccggctacccaggccggcagggccccaagggcagcctgggcttccctggcttccctggggccagcggggagaagggggcccggggcctgagcggcaagagcggccccagaggagagcggggccccaccggcccccggggccagaggggccccaggggggccaccgggaagagcggggccaagggcaccagcggaggagatggcccccacggccccccaggagagcggggcctgcccggcccccagggccccaacggcttccctggccccaagggccccccaggccccccaggcaaggatggcctgcccggccaccctggccagagaggagaggtgggcttccagggcaagacaggccccccaggccccccaggagtggtgggcccccagggcgccgccggggagaccggccccatgggagagcggggccaccctggccccccaggccccccaggagagcagggcctgcccggcacagctgggaaggagggcaccaagggggaccccggccccccaggggcccctgggaaggatggccctgctggcctgcggggcttccctggagagcggggcctgcccggcacagctgggggccctggcctgaagggaaatgaaggccccagcggccccccaggccctgctggcagccctggagagagaggagctgctggcagcggcggccccatcggccccccaggccggcccggcccccagggccccccaggagctgctggggagaagggcgtgcctggagagaagggccccatcggccccaccggcagagatggagtgcagggccctgtgggcctgcccggccctgctggccccccaggagtggccggagaagatggagacaagggggaggtgggggaccccggccagaagggcaccaagggcaacaagggggagcacggccccccaggccccccaggccccatcggccctgtgggccagcccggggctgctggagcagatggagagcccggggcccggggcccccagggccactttggagccaagggagatgagggcacccggggcttcaacggccccccaggccccatcggcctgcagggcctgcccggccccagcggggagaagggggagactggagatgtgggccccatgggccccccaggccccccaggcccccggggccctgctggccccaacggggctgatggcccccagggccccccaggaggagtgggcaacctgggccccccaggagagaagggggagcccggggagagcggcagccctggcatccagggcgagcccggggtgaagggccccagaggagagcggggggagaagggggagagcggccagcccggggagcccggccccccaggccccaagggccccactggagatgatggccccaagggcaaccctggccctgtgggcttccctggggaccccggccccccaggagagggcggcccccggggccaggatggagccaagggggacagaggagaagatggagagcccggccagcccggcagccctggccccactggagaaaatggccccccaggccccctgggcaagaggggccctgctggcagccctggcagcgagggccggcagggcggcaagggggccaagggggaccccggggccatcggggcccctgggaagacaggccctgtgggccctgctggccctgctgggaagccaggcccagatggcctgcggggcctgcccggctctgtgggccagcagggccggcctggggccaccggccaggccggccccccaggccctgtgggccccccaggcctgcccggcctgcggggagatgctggggccaagggggagaagggccaccctggcctgattggcctcatcggccccccaggagagcagggcgagaagggggaccggggcctgcccggcccccagggcagccctggccagaagggggagatgggcatccctggggccagcggccccatcggccctgggggccccccaggcctgcccggccctgctggccccaagggggccaagggggccactggacctgggggccccaagggggagaagggcgtgcagggccccccaggccaccctggccccccaggagaggtgatccagcccctgcccatccagatgcccaagaagacccggcgctctgtggatggcagccggctgatgcaggaggatgaggccatccccactggaggagcccctggcagccctgggggcctggaggagatcttcggcagcctggacagcctgcgggaggagattgagcagatgagaagacccaccggcacccaggacagccctgcccggacctgccaggacctgaagctgtgccaccctgagctgcctgatggagagtactgggtggaccccaaccagggctgtgccagagatgccttccgggtcttctgcaacttcaccgctggaggagagacctgtgtgaccccaagagatgatgtgacccagttctcctatgtggacagcgagggcagccctgtgggcgtggtgcagctgaccttcctgcggctgctgtctgtgtctgcccaccaggatgtgtcctacccctgcagcggggccgccagagatggccccctgcggctgcggggggccaatgaagatgagctgagccctgagaccagcccctacgtgaaggagttcagagatggctgccagacccagcagggccgcacagtgctggaggtgaggacccctgtgctggagcagctgcctgtgctggatgccagcttcagtgacctgggcgccccaccccggcggggcggcgtgctgctgggccctgtgtgcttcatgggctag

SEQ ID NO: 232707 - DNA, 4953 bp, Artificial Sequence
  derived and/or modified sequence
atggagcgctgcagccgctgccaccggctgctgctgctgctgcccctggtgctgggcctgtctgctgcccctggctgggccggggcccctcctgtggatgtgctgcgggccctgcgcttccccagcctgcctgatggagtgcggcgggccaagggcatctgcccagcagatgtggcctacagagtggcccggcctgcccagctgagcgcccccacccggcagctgtttcctgggggcttccccaaggacttcagcctgctgactgtggtgaggacccggcccggcctgcaggcccccctgctgaccctgtacagcgcccagggcgtgcggcagctgggcctggagctgggccggcctgtgcgcttcctgtatgaggaccagacaggccggccccagccccccagccagcctgtgttccggggcctgagcctggctgatggcaagtggcaccgggtggccgtggccgtgaagggccagagcgtgaccctcatcgtggactgcaagaagagggtgacccggcccctgcccaggtctgcccggcctgtgctggacacccacggcgtcatcatctttggagcccgcatcctggatgaggaggtgtttgaaggagatgtgcaggagctggccatcgtgcctggggtgcaggccgcctatgagagctgtgagcagaaggagctggagtgtgagggcggccagcgggagcggccccagaaccagcagccccaccgggcccagaggagcccccagcagcagcccagccggctgcaccggccccagaaccaggagccccagagccaggaccccaccccaggagaggaggaggagatcctggagagcagcctgctgccccccctggaggaggccgcccacggcccccggggcctgaagggggagaagggggagcctgctgtgctggagcccggcatgctggtggagggccccccaggccctgagggccctgctggcctcatcggccccccaggcatccagggcaaccctggccctgtgggggaccctggagagcggggccccccaggccgggccggcctgcccggcagtgatggagcccctggccccccaggcaccagcctgatgctgcccttccgcttcggcagcggcggcggggacaagggccctgtggtggccgcccaggaggcccaggcccaggccatcctgcagcaggcccggctggccctgcggggccccccaggccccatgggctacacaggccggcccggccccctgggccagcccggcagccctggcctgaagggggagagcggggacctgggcccccagggcccccggggcccccagggcctgaccggccccccaggcaaggccggccggcggggccgggccggggctgatggagcccggggcatgcctggggaccccggggtgaagggggaccggggctttgatggcctgcccggcctgcctggagagaagggccacagaggagacaccggggcccagggcctgcccggccccccaggagaagatggagagagaggagatgatggagaaattggcccccggggcctgcctggagagagcggcccccggggcctgctgggccccaagggccccccaggcatccctggccccccaggagtgcggggcatggatggcccccagggccccaagggcagcctgggcccccagggcgagcccggccccccaggccagcagggcaccccaggcacccagggcctgcccggcccccagggcgccatcggcccccatggagagaagggcccccagggcaagccaggcctgcccggcatgcctggcagtgatggccccccaggccaccctgggaaggagggccccccaggcaccaagggcaaccagggccccagcggcccccagggccccctgggctacccaggcccccggggcgtgaagggcgtggatggcatccggggcctgaagggccacaagggggagaagggggaggatggcttccctggcttcaagggggacatcggcgtgaagggggacagaggagaggtgggcgtgcccggcagcagaggagaagatggccctgagggccccaagggccgcacaggccccaccggggaccccggccccccaggcctgatgggagagaagggcaagctgggcgtgcccggcctgcccggctacccaggccggcagggccccaagggcagcctgggcttccctggcttccctggggccagcggggagaagggggcccggggcctgagcggcaagagcggccccagaggagagcggggccccaccggcccccggggccagaggggccccaggggggccaccgggaagagcggggccaagggcaccagcggaggagatggcccccacggccccccaggagagcggggcctgcccggcccccagggccccaacggcttccctggccccaagggccccctgggccccccaggcaaggatggcctgcccggccaccctggccagagaggagaggtgggcttccagggcaagacaggccccccaggccccccaggagtggtgggcccccagggcgctgctggggagaccggccccatgggagagcggggccaccctggccccccaggccccccaggagagcagggcctgcctggaacagctgggaaggagggcaccaagggggaccccggccccccaggggcccctgggaaggatggccctgctggcctgcggggcttccctggagagcggggcctgcctggaacagctgggggccctggcctgaagggaaatgaaggccccagcggccccccaggccctgctggcagccctggagagagaggagctgctggcagcggcggccccatcggccccccaggccggcccggcccccagggccccccaggagctgctggggagaagggcgtgcctggagagaagggccccatcggccccaccggcagagatggagtgcagggccctgtgggcctgcccggccctgctggccccccaggagtggccggggaggatggagacaagggggaggtgggggaccccggccagaagggcaccaagggcaacaagggggagcacggccccccaggccccccaggccccatcggccctgtgggccagcctggagctgctggagcagatggagagcccggggcccggggcccccagggccactttggagccaagggagatgagggcacccggggcttcaatggacctcctggccccatcggcctgcagggcctgcccggccccagcggggagaagggggagactggagatgtgggccccatgggccccccaggccccccaggcccccggggccctgctggccccaatggagcagatggcccccagggccccccaggcggcgtgggcaacctgggccccccaggagagaagggggagcctggagagagcggcagccctggcatccagggcgagcccggggtgaagggccccagaggagagcggggggagaagggggagagcggccagcctggagagcccggccccccaggccccaagggccccactggagatgatggccccaagggcaaccctggccctgtgggcttccctggggaccccggccccccaggagagggcggcccccggggccaggatggagccaagggggacagaggagaagatggagagcccggccagcccggcagccctggccccaccggggagaatggacctcctggccccctgggcaagaggggccctgctggcagccctggcagcgagggccggcagggcggcaaaggagccaagggggaccccggggccatcggggcccctgggaagacaggccctgtgggccctgctggccctgctgggaagccaggcccagatggcctgcggggcctgcccggctctgtgggccagcagggccggcctggggccaccggccaggccggccccccaggccctgtgggccccccaggcctgcccggcctgcggggagatgctggggccaagggggagaagggccaccctggcctcatcggcctgattggccccccaggagagcagggcgagaagggggaccggggcctgcccggcccccagggcagccctggccagaagggggagatgggcatccctggggccagcggccccatcggccctgggggccccccaggcctgcccggccctgctggccccaagggggccaagggggccaccggccctgggggccccaagggggagaagggcgtgcagggccccccaggccaccctggccccccaggagaggtgatccagcccctgcccatccagatgcccaagaagaccaggagatctgtggatggcagccggctgatgcaggaggatgaggccatccccaccggcggggcccctggcagccctgggggcctggaggagatcttcggcagcctggacagcctgcgggaggagattgagcagatgaggcggcccaccggcacccaggacagccctgcccggacctgccaggacctgaagctgtgccaccctgagctgcctgatggagagtactgggtggaccccaaccagggctgtgccagagatgccttccgggtcttctgcaacttcaccgctggaggagagacctgtgtgaccccaagagatgatgtgacccagttctcctatgtggacagcgagggcagccctgtgggcgtggtgcagctgaccttcctgcggctgctgtctgtgtctgcccaccaggatgtgtcctacccctgcagcggggccgccagagatggccccctgcggctgcggggggccaatgaagatgagctgagccctgagaccagcccctacgtgaaggagttcagagatggctgccagacccagcagggccgcacagtgctggaggtgaggacccctgtgctggagcagctgcctgtgctggatgccagcttcagtgacctgggcgcccccccaagaagaggaggagtgctgctgggccctgtgtgcttcatgggctag

SEQ ID NO: 232708 - DNA, 5031 bp, Artificial Sequence
  derived and/or modified sequence
atggagcgctgcagccgctgccaccggctgctgctgctgctgcccctggtgctgggcctgtctgctgcccctggctgggccggggcccctcctgtggatgtgctgcgggccctgcgcttccccagcctgcctgatggagtgcggcgggccaagggcatctgcccagcagatgtggcctacagagtggcccggcctgcccagctgagcgcccccacccggcagctgtttcctgggggcttccccaaggacttcagcctgctgactgtggtgaggacccggcccggcctgcaggcccccctgctgaccctgtacagcgcccagggcgtgcggcagctgggcctggagctgggccggcctgtgcgcttcctgtatgaggaccagacaggccggccccagccccccagccagcctgtgttccggggcctgagcctggctgatggcaagtggcaccgggtggccgtggccgtgaagggccagagcgtgaccctcatcgtggactgcaagaagagggtgacccggcccctgcccaggtctgcccggcctgtgctggacacccacggcgtcatcatctttggagcccgcatcctggatgaggaggtgtttgaaggagatgtgcaggagctggccatcgtgcctggggtgcaggccgcctatgagagctgtgagcagaaggagctggagtgtgagggcggccagcgggagcggccccagaaccagcagccccaccgggcccagaggagcccccagcagcagcccagccggctgcaccggccccagaaccaggagccccagagccagcccacagagagcctgtactatgactatgagcccccctactatgatgtgatgaccaccggcaccaccccagactaccaggaccccaccccaggagaggaggaggagatcctggagagcagcctgctgccccccctggaggaggccgcccacggcccccggggcctgaagggggagaagggggagcctgctgtgctggagcccggcatgctggtggagggccccccaggccctgagggccctgctggcctcatcggccccccaggcatccagggcaaccctggccctgtgggggaccctggagagcggggccccccaggccgggccggcctgcccggcagtgatggagcccctggccccccaggcaccagcctgatgctgcccttccgcttcggcagcggcggcggggacaagggccctgtggtggccgcccaggaggcccaggcccaggccatcctgcagcaggcccggctggccctgcggggccccccaggccccatgggctacacaggccggcccggccccctgggccagcccggcagccctggcctgaagggggagagcggggacctgggcccccagggcccccggggcccccagggcctgaccggccccccaggcaaggccggccggcggggccgggccggggctgatggagcccggggcatgcctggggaccccggggtgaagggggaccggggctttgatggcctgcccggcctgcctggagagaagggccacagaggagacaccggggcccagggcctgcccggccccccaggagaagatggagagagaggagatgatggagaaattggcccccggggcctgcctggagagagcggcccccggggcctgctgggccccaagggccccccaggcatccctggccccccaggagtgcggggcatggatggcccccagggccccaagggcagcctgggcccccagggcgagcccggccccccaggccagcagggcaccccaggcacccagggcctgcccggcccccagggcgccatcggcccccatggagagaagggcccccagggcaagccaggcctgcccggcatgcctggcagtgatggccccccaggccaccctgggaaggagggccccccaggcaccaagggcaaccagggccccagcggcccccagggccccctgggctacccaggcccccggggcgtgaagggcgtggatggcatccggggcctgaagggccacaagggggagaagggggaggatggcttccctggcttcaagggggacatcggcgtgaagggggacagaggagaggtgggcgtgcccggcagcagaggagaagatggccctgagggccccaagggccgcacaggccccaccggggaccccggccccccaggcctgatgggagagaagggcaagctgggcgtgcccggcctgcccggctacccaggccggcagggccccaagggcagcctgggcttccctggcttccctggggccagcggggagaagggggcccggggcctgagcggcaagagcggccccagaggagagcggggccccaccggcccccggggccagaggggccccaggggggccaccgggaagagcggggccaagggcaccagcggaggagatggcccccacggccccccaggagagcggggcctgcccggcccccagggccccaacggcttccctggccccaagggccccccaggccccccaggcaaggatggcctgcccggccaccctggccagagaggagaggtgggcttccagggcaagacaggccccccaggccccccaggagtggtgggcccccagggcgctgctggggagaccggccccatgggagagcggggccaccctggccccccaggccccccaggagagcagggcctgcctggaacagctgggaaggagggcaccaagggggaccccggccccccaggggcccctgggaaggatggccctgctggcctgcggggcttccctggagagcggggcctgcctggaacagctgggggccctggcctgaagggaaatgaaggccccagcggccccccaggccctgctggcagccctggagagagaggagctgctggcagcggcggccccatcggccccccaggccggcccggcccccagggccccccaggagctgctggggagaagggcgtgcctggagagaagggccccatcggccccaccggcagagatggagtgcagggccctgtgggcctgcccggccctgctggccccccaggagtggccggggaggatggagacaagggggaggtgggggaccccggccagaagggcaccaagggcaacaagggggagcacggccccccaggccccccaggccccatcggccctgtgggccagcctggagctgctggagcagatggagagcccggggcccggggcccccagggccactttggagccaagggagatgagggcacccggggcttcaatggacctcctggccccatcggcctgcagggcctgcccggccccagcggggagaagggggagactggagatgtgggccccatgggccccccaggccccccaggcccccggggccctgctggccccaatggagcagatggcccccagggccccccaggcggcgtgggcaacctgggccccccaggagagaagggggagcctggagagagcggcagccctggcatccagggcgagcccggggtgaagggccccagaggagagcggggggagaagggggagagcggccagcctggagagcccggccccccaggccccaagggccccactggagatgatggccccaagggcaaccctggccctgtgggcttccctggggaccccggccccccaggagagggcggcccccggggccaggatggagccaagggggacagaggagaagatggagagcccggccagcccggcagccctggccccaccggggagaatggacctcctggccccctgggcaagaggggccctgctggcagccctggcagcgagggccggcagggcggcaaaggagccaagggggaccccggggccatcggggcccctgggaagacaggccctgtgggccctgctggccctgctgggaagccaggcccagatggcctgcggggcctgcccggctctgtgggccagcagggccggcctggggccaccggccaggccggccccccaggccctgtgggccccccaggcctgcccggcctgcggggagatgctggggccaagggggagaagggccaccctggcctcatcggcctgattggccccccaggagagcagggcgagaagggggaccggggcctgcccggcccccagggcagccctggccagaagggggagatgggcatccctggggccagcggccccatcggccctgggggccccccaggcctgcccggccctgctggccccaagggggccaagggggccaccggccctgggggccccaagggggagaagggcgtgcagggccccccaggccaccctggccccccaggagaggtgatccagcccctgcccatccagatgcccaagaagaccaggagatctgtggatggcagccggctgatgcaggaggatgaggccatccccaccggcggggcccctggcagccctgggggcctggaggagatcttcggcagcctggacagcctgcgggaggagattgagcagatgaggcggcccaccggcacccaggacagccctgcccggacctgccaggacctgaagctgtgccaccctgagctgcctgatggagagtactgggtggaccccaaccagggctgtgccagagatgccttccgggtcttctgcaacttcaccgctggaggagagacctgtgtgaccccaagagatgatgtgacccagttctcctatgtggacagcgagggcagccctgtgggcgtggtgcagctgaccttcctgcggctgctgtctgtgtctgcccaccaggatgtgtcctacccctgcagcggggccgccagagatggccccctgcggctgcggggggccaatgaagatgagctgagccctgagaccagcccctacgtgaaggagttcagagatggctgccagacccagcagggccgcacagtgctggaggtgaggacccctgtgctggagcagctgcctgtgctggatgccagcttcagtgacctgggcgcccccccaagaagaggaggagtgctgctgggccctgtgtgcttcatgggctag

SEQ ID NO: 232709 - DNA, 4953 bp, Artificial Sequence
  derived and/or modified sequence
atggagcgctgcagccgctgccaccggctgctgctgctgctgcccctggtgctgggcctgtctgctgcccctggctgggccggggcccctcctgtggatgtgctgcgggccctgcgcttccccagcctgcctgatggagtgcggcgggccaagggcatctgcccagcagatgtggcctacagagtggcccggcctgcccagctgagcgcccccacccggcagctgtttcctgggggcttccccaaggacttcagcctgctgactgtggtgaggacccggcccggcctgcaggcccccctgctgaccctgtacagcgcccagggcgtgcggcagctgggcctggagctgggcccccctgtgcgcttcctgtatgaggaccagacaggccggccccagccccccagccagcctgtgttccggggcctgagcctggctgatggcaagtggcaccgggtggccgtggccgtgaagggccagagcgtgaccctcatcgtggactgcaagaagagggtgacccggcccctgcccaggtctgcccggcctgtgctggacacccacggcgtcatcatctttggagcccgcatcctggatgaggaggtgtttgaaggagatgtgcaggagctggccatcgtgcctggggtgcaggccgcctatgagagctgtgagcagaaggagctggagtgtgagggcggccagcgggagcggccccagaaccagcagccccaccgggcccagaggagcccccagcagcagcccagccggctgcaccggccccagaaccaggagccccagagccaggaccccaccccaggagaggaggaggagatcctggagagcagcctgctgccccccctggaggaggccgcccacggcccccggggcctgaagggggagaagggggagcctgctgtgctggagcccggcatgctggtggagggccccccaggccctgagggccctgctggcctcatcggccccccaggcatccagggcaaccctggccctgtgggggaccctggagagcggggccccccaggccgggccggcctgcccggcagtgatggagcccctggccccccaggcaccagcctgatgctgcccttccgcttcggcagcggcggcggggacaagggccctgtggtggccgcccaggaggcccaggcccaggccatcctgcagcaggcccggctggccctgcggggccccccaggccccatgggctacacaggccggcccggccccctgggccagcccggcagccctggcctgaagggggagagcggggacctgggcccccagggcccccggggcccccagggcctgaccggccccccaggcaaggccggccggcggggccgggccggggctgatggagcccggggcatgcctggggaccccggggtgaagggggaccggggctttgatggcctgcccggcctgcctggagagaagggccacagaggagacaccggggcccagggcctgcccggccccccaggagaagatggagagagaggagatgatggagaaattggcccccggggcctgcctggagagagcggcccccggggcctgctgggccccaagggccccccaggcatccctggccccccaggagtgcggggcatggatggcccccagggccccaagggcagcctgggcccccagggcgagcccggccccccaggccagcagggcaccccaggcacccagggcctgcccggcccccagggcgccatcggcccccatggagagaagggcccccagggcaagccaggcctgcccggcatgcctggcagtgatggccccccaggccaccctgggaaggagggccccccaggcaccaagggcaaccagggccccagcggcccccagggccccctgggctacccaggcccccggggcgtgaagggcgtggatggcatccggggcctgaagggccacaagggggagaagggggaggatggcttccctggcttcaagggggacatcggcgtgaagggggacagaggagaggtgggcgtgcccggcagcagaggagaagatggccctgagggccccaagggccgcacaggccccaccggggaccccggccccccaggcctgatgggagagaagggcaagctgggcgtgcccggcctgcccggctacccaggccggcagggccccaagggcagcctgggcttccctggcttccctggggccagcggggagaagggggcccggggcctgagcggcaagagcggccccagaggagagcggggccccaccggcccccggggccagaggggccccaggggggccaccgggaagagcggggccaagggcaccagcggaggagatggcccccacggccccccaggagagcggggcctgcccggcccccagggccccaacggcttccctggccccaagggccccccaggccccccaggcaaggatggcctgcccggccaccctggccagagaggagaggtgggcttccagggcaagacaggccccccaggccccccaggagtggtgggcccccagggcgctgctggggagaccggccccatgggagagcggggccaccctggccccccaggccccccaggagagcagggcctgcctggaacagctgggaaggagggcaccaagggggaccccggccccccaggggcccctgggaaggatggccctgctggcctgcggggcttccctggagagcggggcctgcctggaacagctgggggccctggcctgaagggaaatgaaggccccagcggccccccaggccctgctggcagccctggagagagaggagctgctggcagcggcggccccatcggccccccaggccggcccggcccccagggccccccaggagctgctggggagaagggcgtgcctggagagaagggccccatcggccccaccggcagagatggagtgcagggccctgtgggcctgcccggccctgctggccccccaggagtggccggggaggatggagacaagggggaggtgggggaccccggccagaagggcaccaagggcaacaagggggagcacggccccccaggccccccaggccccatcggccctgtgggccagcctggagctgctggagcagatggagagcccggggcccggggcccccagggccactttggagccaagggagatgagggcacccggggcttcaatggacctcctggccccatcggcctgcagggcctgcccggccccagcggggagaagggggagactggagatgtgggccccatgggccccccaggccccccaggcccccggggccctgctggccccaatggagcagatggcccccagggccccccaggcggcgtgggcaacctgggccccccaggagagaagggggagcctggagagagcggcagccctggcatccagggcgagcccggggtgaagggccccagaggagagcggggggagaagggggagagcggccagcctggagagcccggccccccaggccccaagggccccactggagatgatggccccaagggcaaccctggccctgtgggcttccctggggaccccggccccccaggagagggcggcccccggggccaggatggagccaagggggacagaggagaagatggagagcccggccagcccggcagccctggccccaccggggagaatggacctcctggccccctgggcaagaggggccctgctggcagccctggcagcgagggccggcagggcggcaaaggagccaagggggaccccggggccatcggggcccctgggaagacaggccctgtgggccctgctggccctgctgggaagccaggcccagatggcctgcggggcctgcccggctctgtgggccagcagggccggcctggggccaccggccaggccggccccccaggccctgtgggccccccaggcctgcccggcctgcggggagatgctggggccaagggggagaagggccaccctggcctcatcggcctgattggccccccaggagagcagggcgagaagggggaccggggcctgcccggcccccagggcagccctggccagaagggggagatgggcatccctggggccagcggccccatcggccctgggggccccccaggcctgcccggccctgctggccccaagggggccaagggggccaccggccctgggggccccaagggggagaagggcgtgcagggccccccaggccaccctggccccccaggagaggtgatccagcccctgcccatccagatgcccaagaagaccaggagatctgtggatggcagccggctgatgcaggaggatgaggccatccccaccggcggggcccctggcagccctgggggcctggaggagatcttcggcagcctggacagcctgcgggaggagattgagcagatgaggcggcccaccggcacccaggacagccctgcccggacctgccaggacctgaagctgtgccaccctgagctgcctgatggagagtactgggtggaccccaaccagggctgtgccagagatgccttccgggtcttctgcaacttcaccgctggaggagagacctgtgtgaccccaagagatgatgtgacccagttctcctatgtggacagcgagggcagccctgtgggcgtggtgcagctgaccttcctgcggctgctgtctgtgtctgcccaccaggatgtgtcctacccctgcagcggggccgccagagatggccccctgcggctgcggggggccaatgaagatgagctgagccctgagaccagcccctacgtgaaggagttcagagatggctgccagacccagcagggccgcacagtgctggaggtgaggacccctgtgctggagcagctgcctgtgctggatgccagcttcagtgacctgggcgcccccccaagaagaggaggagtgctgctgggccctgtgtgcttcatgggctag
